United States Patent Application Publication US 2021/0170017 A1 - sequence listing, part 4

SEQ ID NO: 3997 - RNA, 2277 nt, Artificial Sequence
  mRNA product Design d-3 comprising derived and/or modified sequence from HRSV(A2)__F_DSCav1_mut0 (opt2)
gggagagggcgcuuggcuugcaaggacccugagcugcggcauugaagcacacccaacccaacucgacugaagucagccucacugaaccggaucugagaaucuucucucucugggcuugccagggcucuccgaaccuagcuagcauccucuucaauuccaacuagaaagcuuaccauggagcuccucauccucaaggccaacgccaucaccaccauccucaccgccgucaccuucugcuucgccuccggccagaacaucaccgaggaguucuaccaguccaccugcuccgccgucuccaagggcuaccucuccgcccuccgcaccggcugguacaccuccgucaucaccaucgagcucuccaacaucaaggagaacaagugcaacggcaccgacgccaaggucaagcucaucaagcaggagcucgacaaguacaagaacgccgucaccgagcuccagcuccucaugcaguccacccccgccaccggcuccggcuccgccaucgccuccggcgucgccgucugcaagguccuccaccucgagggcgaggucaacaagaucaaguccgcccuccucuccaccaacaaggccgucgucucccucuccaacggcgucuccguccucaccuucaagguccucgaccucaagaacuacaucgacaagcagcuccuccccauccucaacaagcaguccugcuccaucuccaacaucgagaccgucaucgaguuccagcagaagaacaaccgccuccucgagaucacccgcgaguucuccgucaacgccggcgucaccacccccgucuccaccuacaugcucaccaacuccgagcuccucucccucaucaacgacaugcccaucaccaacgaccagaagaagcucauguccaacaacguccagaucguccgccagcaguccuacuccaucaugugcaucaucaaggaggagguccucgccuacgucguccagcucccccucuacggcgucaucgacacccccugcuggaagcuccacaccuccccccucugcaccaccaacaccaaggagggcuccaacaucugccucacccgcaccgaccgcggcugguacugcgacaacgccggcuccgucuccuucuucccccaggccgagaccugcaagguccaguccaaccgcgucuucugcgacaccaugaacucccgcacccuccccuccgaggucaaccucugcaacgucgacaucuucaaccccaaguacgacugcaagaucaugaccuccaagaccgacgucuccuccuccgucaucaccucccucggcgccaucgucuccugcuacggcaagaccaagugcaccgccuccaacaagaaccgcggcaucaucaagaccuucuccaacggcugcgacuacgucuccaacaagggcgucgacaccgucuccgucggcaacacccucuacuacgucaacaagcaggagggcaagucccucuacgucaagggcgagcccaucaucaacuucuacgacccccucgucuuccccuccgacgaguucgacgccuccaucucccaggucaacgagaagaucaaccagucccucgccuucauccgcaaguccgacgagcuccuccacaacgucaacgccggcaaguccaccaccaacaucaugaucaccaccaucaucaucgucaucaucgucauccuccucucccucaucgccgucggccuccuccucuacugcaaggcccgcuccacccccgucacccucuccaaggaccagcucuccggcaucaacaacaucgccuucuccaacugaggacuagugaagggaacacccaaauuuaauucagccuuaagcacaauuaauuaagagugaaacguaauuguacaagcaguuggucacccaccauagggcaugaucaacaccgcaaccuuuccuuuuucccccagugauucugaaaaaccccucuucccuucagcuugcuuagauguuccaaauuuaguaagcuuaaggcggccuacagaagaaaaagaaaaaaaaggccacaaaaguucccucucacuuucaguaaauaaaauaaaagcagcaacagaaauaaagaaauaaaugaaauucaaaaugaaauaaauauuguguugugcagcauuaaaaaaucaauaaaaauuaaaaaugagcaagaucuaaaaaaaaaaaaaaaaaaaaaaaaaaaaaaaaaaaaaaaaaaaaaaaaaaaaaaaaaaaaaaaaugcaucccccccccccccccccccccccccccccccaaaggcucuuuucagagccaccagaauu

SEQ ID NO: 3998 - RNA, 2277 nt, Artificial Sequence
  mRNA product Design d-3 comprising derived and/or modified sequence from HRSV(A2)__F_DSCav1_mut0 (opt3)
gggagagggcgcuuggcuugcaaggacccugagcugcggcauugaagcacacccaacccaacucgacugaagucagccucacugaaccggaucugagaaucuucucucucugggcuugccagggcucuccgaaccuagcuagcauccucuucaauuccaacuagaaagcuuaccauggagcugcucauccuuaaggccaacgcuauuaccacaauacugacugcagugacguucugcuuugccagcggccagaauaucaccgaagaguucuaccaauccacauguucugcggucucaaaaggguauuugagugcuuuaagaacuggaugguacaccagcguuauuacaaucgaacuguccaacauuaaggagaauaaaugcaacgguaccgacgccaaggugaaacuaaucaagcaggaacucgauaaguauaaaaaugcaguaacugagcugcagcuucugaugcagucuacacccgccaccggcucggggucagcuauagcaagcggaguggccgucuguaagguguugcaccucgagggcgaaguuaacaaaaucaagagugcucugcuguccacgaauaaagccguggucucucucagcaacgguguguccguauuaacuuuuaagguucuggaccuuaagaauuacauugauaaacaauugcugccuauccuaaacaagcagucaugcaguauuagcaauaucgagaccgugauagaguuccagcagaaaaacaauaggcuccuggaaauuacacgggaguuuucugucaacgcgggggugacuaccccaguguccacauauaugcuuaccaauucagaacuguugagccucaucaacgacaugccgauuacgaacgaucaaaagaaacugaugaguaauaacguccagaucguucgccagcagucuuacuccaucauguguauuauaaaggaggaaguguuagcauauguagugcaacugccccucuacggagucaucgacacuccuugcuggaaacuucauacaagcccacuguguaccacuaauacaaaggagggcucgaacauuugcuugacccgaacggaucguggcugguacugugacaaugccgggucuguguccuucuuuccccaggcugaaaccugcaagguucagucaaacagaguguucugugauacaaugaauaguagaacucugccuagcgaggucaaccucugcaauguggacaucuuuaacccaaaauaugauugcaagauaaugaccuccaaaacagacguaucuagcucaguuauuaccagucugggagccaucguguccuguuacgguaagacuaaaugcacagcaagcaauaagaacaggggcaucauuaagaccuucucuaaugggugugauuaugucucaaacaaaggaguggacacugucagugugggcaauacgcuuuacuauguuaacaagcaagaggguaaaagccuguacgugaagggggaacccaucauuaacuuuuaugacccuuugguauucccauccgaugaguuugacgcuucuauaucgcaggucaaugagaaaaucaaccagagccucgccuucauucggaaguccgaugaacuguuacacaaugugaacgcgggaaagucaacaaccaauaucaugaucacuaccauuauaaucguuauuaucgugauucugcuaagucucaucgccgucggccugcuuuuguacugcaaagcacgcucuacaccggugacccugagcaaggaccagcucuccggcauaaacaauaucgcuuucucaaacugaggacuagugaagggaacacccaaauuuaauucagccuuaagcacaauuaauuaagagugaaacguaauuguacaagcaguuggucacccaccauagggcaugaucaacaccgcaaccuuuccuuuuucccccagugauucugaaaaaccccucuucccuucagcuugcuuagauguuccaaauuuaguaagcuuaaggcggccuacagaagaaaaagaaaaaaaaggccacaaaaguucccucucacuuucaguaaauaaaauaaaagcagcaacagaaauaaagaaauaaaugaaauucaaaaugaaauaaauauuguguugugcagcauuaaaaaaucaauaaaaauuaaaaaugagcaagaucuaaaaaaaaaaaaaaaaaaaaaaaaaaaaaaaaaaaaaaaaaaaaaaaaaaaaaaaaaaaaaaaaugcaucccccccccccccccccccccccccccccccaaaggcucuuuucagagccaccagaauu

SEQ ID NO: 3999 - RNA, 2277 nt, Artificial Sequence
  mRNA product Design d-3 comprising derived and/or modified sequence from HRSV(A2)__F_DSCav1_mut0 (opt4)
gggagagggcgcuuggcuugcaaggacccugagcugcggcauugaagcacacccaacccaacucgacugaagucagccucacugaaccggaucugagaaucuucucucucugggcuugccagggcucuccgaaccuagcuagcauccucuucaauuccaacuagaaagcuuaccauggagcugcugauccugaaggccaacgccaucaccaccauccugaccgccgugaccuucugcuucgccagcggccagaacaucaccgaggaguucuaccagagcaccugcagcgccgugagcaagggcuaccugagcgcccugagaaccggcugguacaccagcgugaucaccaucgagcugagcaacaucaaggagaacaagugcaacggcaccgacgccaaggugaagcugaucaagcaggagcuggacaaguacaagaacgccgugaccgagcugcagcugcugaugcagagcacccccgccaccggcagcggcagcgccaucgccagcggcguggccgugugcaaggugcugcaccuggagggcgaggugaacaagaucaagagcgcccugcugagcaccaacaaggccguggugagccugagcaacggcgugagcgugcugaccuucaaggugcuggaccugaagaacuacaucgacaagcagcugcugcccauccugaacaagcagagcugcagcaucagcaacaucgagaccgugaucgaguuccagcagaagaacaacagacugcuggagaucaccagagaguucagcgugaacgccggcgugaccacccccgugagcaccuacaugcugaccaacagcgagcugcugagccugaucaacgacaugcccaucaccaacgaccagaagaagcugaugagcaacaacgugcagaucgugagacagcagagcuacagcaucaugugcaucaucaaggaggaggugcuggccuacguggugcagcugccccuguacggcgugaucgacacccccugcuggaagcugcacaccagcccccugugcaccaccaacaccaaggagggcagcaacaucugccugaccagaaccgacagaggcugguacugcgacaacgccggcagcgugagcuucuucccccaggccgagaccugcaaggugcagagcaacagaguguucugcgacaccaugaacagcagaacccugcccagcgaggugaaccugugcaacguggacaucuucaaccccaaguacgacugcaagaucaugaccagcaagaccgacgugagcagcagcgugaucaccagccugggcgccaucgugagcugcuacggcaagaccaagugcaccgccagcaacaagaacagaggcaucaucaagaccuucagcaacggcugcgacuacgugagcaacaagggcguggacaccgugagcgugggcaacacccuguacuacgugaacaagcaggagggcaagagccuguacgugaagggcgagcccaucaucaacuucuacgacccccugguguuccccagcgacgaguucgacgccagcaucagccaggugaacgagaagaucaaccagagccuggccuucaucagaaagagcgacgagcugcugcacaacgugaacgccggcaagagcaccaccaacaucaugaucaccaccaucaucaucgugaucaucgugauccugcugagccugaucgccgugggccugcugcuguacugcaaggccagaagcacccccgugacccugagcaaggaccagcugagcggcaucaacaacaucgccuucagcaacugaggacuagugaagggaacacccaaauuuaauucagccuuaagcacaauuaauuaagagugaaacguaauuguacaagcaguuggucacccaccauagggcaugaucaacaccgcaaccuuuccuuuuucccccagugauucugaaaaaccccucuucccuucagcuugcuuagauguuccaaauuuaguaagcuuaaggcggccuacagaagaaaaagaaaaaaaaggccacaaaaguucccucucacuuucaguaaauaaaauaaaagcagcaacagaaauaaagaaauaaaugaaauucaaaaugaaauaaauauuguguugugcagcauuaaaaaaucaauaaaaauuaaaaaugagcaagaucuaaaaaaaaaaaaaaaaaaaaaaaaaaaaaaaaaaaaaaaaaaaaaaaaaaaaaaaaaaaaaaaaugcaucccccccccccccccccccccccccccccccaaaggcucuuuucagagccaccagaauu

SEQ ID NO: 4000 - RNA, 2277 nt, Artificial Sequence
  mRNA product Design d-3 comprising derived and/or modified sequence from HRSV(A2)__F_DSCav1_mut0 (opt5)
gggagagggcgcuuggcuugcaaggacccugagcugcggcauugaagcacacccaacccaacucgacugaagucagccucacugaaccggaucugagaaucuucucucucugggcuugccagggcucuccgaaccuagcuagcauccucuucaauuccaacuagaaagcuuaccauggagcugcucauccugaaggccaacgcuauuaccacaauccuuacggccgugaccuucugcuuugcgagcggccagaauauuacagaagaguucuaccaauccaccuguucugcugucagcaaaggguaucuguccgcccucagaacaggaugguacaccucuguuaucacaauugaacugagcaacaucaaggagaauaaaugcaacggcaccgacgccaaggugaaacuuaucaagcaggaacuggauaaguauaaaaaugcugugacggagcuccagcugcugaugcaguccacccccgccacagggucuggaagcgcuauugccuccggcgucgcgguguguaagguucuccaccuggagggggaagugaacaaaaucaagagcgcccuucugucuaccaauaaagcugucgugucccucagcaacggaguuucugugcugacauuuaagguccuugaccugaagaauuacauugauaaacaacuccugccuauccugaacaagcaguccugcagcauuucuaauaucgagaccgugauugaguuccagcagaaaaacaaucggcuccuggaaaucacgcgcgaguuuuccgugaacgccggcgucacaaccccgguuagcacauauaugcuuaccaauuccgaacugcucucucugaucaacgacaugcccauuaccaacgaucaaaagaaacuuaugagcaauaacgugcagaucgugagacagcaguccuacagcauuauguguaucauuaaggaggaaguccuggcuuaugugguucaacucccucuguacggcgugaucgacacacccugcuggaaacugcauacgucuccucucuguaccacaaauaccaaggagggguccaacaucugccugacacggaccgaucgcggaugguacugugacaaugccggcagcgucucuuucuuuccccaggcggaaacgugcaaggugcagagcaacagaguuuucugugauacaaugaacuccagaacccugccuucugaggugaaucucugcaaugucgacauuuuuaacccgaaauaugauugcaagaucaugaccagcaaaacagacguguccagcucugucauuaccucccugggggccaucgugagcuguuacggaaagacaaaaugcacggcuucuaauaagaaccggggcauuaucaagaccuucuccaaugggugugauuauguuagcaacaaaggaguggacacagucuccgugggcaauacccuuuacuauguuaacaagcaagagggcaaaucucuguacgugaagggggaacccaucauuaacuuuuaugacccucucgucuuccccagcgaugaguuugacgccuccaucucucaggugaaugagaaaauuaaccagagccuggcuuucauccgcaaguccgaugaacugcuccacaaugugaacgccggaaagagcacaaccaauauuaugaucacgaccauuaucaucguuauuaucgucauucugcuuucucugaucgccgugggccuccugcuguacugcaaagcuagauccacaccugugacccuuagcaaggaccagcucucugggauuaacaauaucgcguucuccaacugaggacuagugaagggaacacccaaauuuaauucagccuuaagcacaauuaauuaagagugaaacguaauuguacaagcaguuggucacccaccauagggcaugaucaacaccgcaaccuuuccuuuuucccccagugauucugaaaaaccccucuucccuucagcuugcuuagauguuccaaauuuaguaagcuuaaggcggccuacagaagaaaaagaaaaaaaaggccacaaaaguucccucucacuuucaguaaauaaaauaaaagcagcaacagaaauaaagaaauaaaugaaauucaaaaugaaauaaauauuguguugugcagcauuaaaaaaucaauaaaaauuaaaaaugagcaagaucuaaaaaaaaaaaaaaaaaaaaaaaaaaaaaaaaaaaaaaaaaaaaaaaaaaaaaaaaaaaaaaaaugcaucccccccccccccccccccccccccccccccaaaggcucuuuucagagccaccagaauu

SEQ ID NO: 4001 - RNA, 2277 nt, Artificial Sequence
  mRNA product Design d-3 comprising derived and/or modified sequence from HRSV(A2)__F_DSCav1_mut0 (opt6)
gggagagggcgcuuggcuugcaaggacccugagcugcggcauugaagcacacccaacccaacucgacugaagucagccucacugaaccggaucugagaaucuucucucucugggcuugccagggcucuccgaaccuagcuagcauccucuucaauuccaacuagaaagcuuaccauggaacuacuaauacuaaaagccaaugcaauaacaaccauacuaaccgccguaacauuuuguuucgcaucaggucaaaacauaaccgaagaauuuuaucaaucaacaugcucagcaguaucaaaaggauacuuauccgcucuaagaacaggaugguacacaaguguaauuacaauagagcucucaaacauaaaagaaaacaaaugcaauggaacugacgcaaaaguuaaacuuauaaaacaagaacuagauaaauauaaaaaugcaguaaccgaauuacaacuccuaaugcaauccacaccugcuaccgguuccggaucagccauagcaucuggaguagccguaugcaaaguccuccaccuagaaggagaaguaaauaaaaucaaaucagcacuauuaucuaccaauaaagcaguugucucacuauccaauggcguaucaguacuaacauucaaaguauuagaccuuaaaaacuacauagacaaacaacuauuaccaauucugaacaaacaauccuguucaauaucaaacaucgaaacgguaauagaauuucaacaaaaaaauaacagauuacuugaaauaacaagagaauuuucaguaaaugcaggaguuacaacacccgucuccaccuacaugcucacaaauucagaauuauuaucacuuauaaacgacaugccaauaacuaacgaccaaaaaaaacuaaugucaaacaauguccaaauaguccgacaacaauccuacucaauaaugugcauuauaaaagaagaaguccuagccuacguuguccaacuacccuuauauggaguaauagauaccccaugcuggaaacuucauaccuccccccuaugcacaacaaacacaaaagaaggcucaaacaucugcuuaacacguacagaccgagguugguacugugauaacgcaggauccguaucauuuuucccacaagcagaaacaugcaaaguacaaucaaaccgcguuuuuugugacaccaugaacagcagaacccucccuucagaaguaaaccuaugcaacgucgauauauuuaacccaaaauacgauugcaaaauaaugacaucaaaaaccgaugucucaucuucaguaauaaccucucuaggagcaauagucucauguuacggaaaaacaaaaugcacagcaaguaauaaaaauagaggaauaauaaaaacauucucuaauggcugcgacuacguauccaauaaaggcguugacacaguauccguaggcaacacacucuacuauguuaacaaacaagaaggaaaaaguuuauacguuaaaggagaaccaauuauaaacuuuuacgacccacucguauucccaucugaugaauuugacgcaucaaucucacaaguaaaugaaaaaaucaaucagucccuugccuuuauaagaaaaucagaugaacuuuuacacaacguuaacgccggaaaaucaacaaccaauauaaugaucacaaccauaauaauaguuauaauuguaauuuuauuauccuuaauagccgucggacuacuacuauacugcaaagcaagaucuacacccguaacccuaucaaaagaccaacuaaguggaauaaauaacauugcauucucaaauuaaggacuagugaagggaacacccaaauuuaauucagccuuaagcacaauuaauuaagagugaaacguaauuguacaagcaguuggucacccaccauagggcaugaucaacaccgcaaccuuuccuuuuucccccagugauucugaaaaaccccucuucccuucagcuugcuuagauguuccaaauuuaguaagcuuaaggcggccuacagaagaaaaagaaaaaaaaggccacaaaaguucccucucacuuucaguaaauaaaauaaaagcagcaacagaaauaaagaaauaaaugaaauucaaaaugaaauaaauauuguguugugcagcauuaaaaaaucaauaaaaauuaaaaaugagcaagaucuaaaaaaaaaaaaaaaaaaaaaaaaaaaaaaaaaaaaaaaaaaaaaaaaaaaaaaaaaaaaaaaaugcaucccccccccccccccccccccccccccccccaaaggcucuuuucagagccaccagaauu

SEQ ID NO: 4002 - RNA, 2277 nt, Artificial Sequence
  mRNA product Design d-3 comprising derived and/or modified sequence from HRSV(A2)__F_DSCav1_mut0 (opt11)
gggagagggcgcuuggcuugcaaggacccugagcugcggcauugaagcacacccaacccaacucgacugaagucagccucacugaaccggaucugagaaucuucucucucugggcuugccagggcucuccgaaccuagcuagcauccucuucaauuccaacuagaaagcuuaccauggaacuccuaauacuaaaggcaaacgcaaucacuacaauucuaaccgccgugacauucugcuucgccuccggacaaaacaucaccgaagaauuuuaccaauccacaugcucggccgucaguaaaggcuaccucucggcucuccgaaccggcugguacaccuccgucaucaccaucgaacucuccaacaucaaagaaaacaaaugcaacggcaccgacgccaaagucaaacuaaucaaacaagaacucgacaaauacaaaaacgccgucacagaacuccaacuacuaaugcaaucaacacccgcuacaggaagcggcuccgccaucgccagcggcguagcugucugcaaaguccuccaccucgaaggugaagucaacaaaaucaaaucagcccuacucagcacaaacaaagccguuguaagccuauccaacggcgucuccguacuaacauucaaaguccuugaccucaagaacuacaucgacaaacaacuucucccaauccuaaacaaacaaagcugcucaauuuccaacaucgaaacaguaaucgaauuucaacaaaaaaacaaccgacuccucgaaaucacccgcgaauuuuccguuaacgccggcguuacaacccccgucuccaccuacaugcucaccaauuccgaacuacuaucacucauaaacgacaugccuaucacaaacgaccaaaaaaaacuaaugucaaacaauguccaaaucguccgccagcaaagcuauuccaucaugugcaucaucaaagaggaaguccucgccuacguaguccaacugccccucuacggcgucauugauacccccugcuggaaacuccacaccuccccccucugcaccacaaacaccaaagaagguuccaacaucugccuaacacgaaccgacagaggcugguacugcgacaacgccggcagcgucuccuucuucccccaagcagaaaccuguaaaguccagucuaaccgcgucuucugcgacacaaugaacucaagaacccuaccuuccgaaguaaaccucugcaacguagacaucuucaacccuaaauacgacugcaaaaucaugacuucaaaaacagacguaagcucuuccguaaucacuucccucggcgccaucguauccugcuacgguaaaaccaaaugcaccgccuccaacaaaaaccgagggaucauaaaaaccuucuccaacggcugcgacuacguaucuaacaaaggcgucgacaccgucuccgucggcaacacccucuauuacguaaacaaacaagagggcaaaucacuauacgucaaaggcgagccaaucauaaacuucuaugacccacucgucuucccuucagacgaauuugaugccagcaucagccaagucaacgaaaaaaucaaccaaucacucgccuucauccgcaaaagcgacgaacuccuucacaacgucaacgcaggcaaaucaaccaccaacaucaugaucaccaccaucaucaucgucaucaucguuauccuacucagccucaucgcaguuggucuucuccuuuacugcaaagcccgcuccacccccgucacccucaguaaagaccaacucagcggaaucaacaacauagcauucuccaacuaaggacuagugaagggaacacccaaauuuaauucagccuuaagcacaauuaauuaagagugaaacguaauuguacaagcaguuggucacccaccauagggcaugaucaacaccgcaaccuuuccuuuuucccccagugauucugaaaaaccccucuucccuucagcuugcuuagauguuccaaauuuaguaagcuuaaggcggccuacagaagaaaaagaaaaaaaaggccacaaaaguucccucucacuuucaguaaauaaaauaaaagcagcaacagaaauaaagaaauaaaugaaauucaaaaugaaauaaauauuguguugugcagcauuaaaaaaucaauaaaaauuaaaaaugagcaagaucuaaaaaaaaaaaaaaaaaaaaaaaaaaaaaaaaaaaaaaaaaaaaaaaaaaaaaaaaaaaaaaaaugcaucccccccccccccccccccccccccccccccaaaggcucuuuucagagccaccagaauu

SEQ ID NO: 4003 - RNA, 1960 nt, Artificial Sequence
  mRNA product Design d-4 comprising derived and/or modified sequence from HRSV(A2)__F_DSCav1_mut0 (opt1)
gggagagucccgcagucggcguccagcggcucugcuuguucgugugugugucguugcaggccuuauucaagcuuaccauggagcugcucauccugaaggccaacgccaucaccaccauccugacggcggugaccuucugcuucgccagcggccagaacaucaccgaggaguucuaccaguccacgugcagcgccgucuccaagggguaccucagcgcccugcggaccggcugguacaccuccgugaucaccaucgagcugagcaacaucaaggagaacaagugcaacgggaccgacgccaaggugaagcucaucaagcaggagcuggacaaguacaagaacgcggucacggagcugcagcuccugaugcaguccaccccggcaaccggcuccggcuccgccaucgcgagcggcgucgccgugugcaaggugcugcaccucgagggggaggucaacaagaucaagagcgcccugcuguccaccaacaaggccguggugagccucuccaacggcgucagcgugcugaccuucaaggugcuggaccucaagaacuacaucgacaagcagcugcugcccauccugaacaagcagagcugcuccaucagcaacaucgagacggugaucgaguuccagcagaagaacaaccggcuccuggagaucacccgcgaguucagcgugaacgccggggucaccacccccguguccacguacaugcugaccaacagcgagcuccugucccugaucaacgacaugccgaucaccaacgaccagaagaagcucaugagcaacaacgugcagaucguccggcagcaguccuacagcaucaugugcaucaucaaggaggaggugcuggcguacgugguccagcugccccucuacggcgugaucgacacccccugcuggaagcugcacacgagcccccugugcaccaccaacaccaaggagggguccaacaucugccucacgcgcaccgaccggggcugguacugcgacaacgccggcagcgucuccuucuucccgcaggccgagaccugcaaggugcagagcaaccgcguguucugcgacaccaugaacucccggacgcugcccagcgagguaaaccucugcaacgucgacaucuucaaccccaaguacgacugcaagaucaugaccuccaagaccgacgugagcuccagcgugaucaccucccugggggccaucgucagcugcuacggcaagacgaagugcaccgccagcaacaagaaccgggggaucaucaagaccuucuccaacggcugcgacuacgugagcaacaagggcguggacaccguguccgucgggaacacccuguacuacgugaacaagcaggagggcaagagccucuacgugaagggggagcccaucaucaacuucuacgacccgcuggucuuccccuccgacgaguucgacgcgagcaucucccaggugaacgagaagaucaaccagagccuggccuucauccgcaaguccgacgagcugcuccacaacgugaacgccggcaagagcacgaccaacaucaugaucaccaccaucaucaucgucaucaucgugauccugcugucccucaucgccguggggcugcugcucuacugcaaggcccggagcacgcccgucacccuguccaaggaccagcugagcggcaucaacaacaucgcguucuccaacugaggacuaguggaagcauuuuccuggcugauuaaaagaaauuacucagcuauggucaucuguuccuguuagaaggcuaugcagcauauuauauacuaugcgcauguuaugaaaugcauaauaaaaaauuuuaaaaaaucuaaaagaucuaaaaaaaaaaaaaaaaaaaaaaaaaaaaaaaaaaaaaaaaaaaaaaaaaaaaaaaaaaaaaaaaugcaucccccccccccccccccccccccccccccccaaaggcucuuuucagagccaccagaauu

SEQ ID NO: 4004 - RNA, 1960 nt, Artificial Sequence
  mRNA product Design d-4 comprising derived and/or modified sequence from HRSV(A2)__F_DSCav1_mut0 (opt1)
gggagagucccgcagucggcguccagcggcucugcuuguucgugugugugucguugcaggccuuauucaagcuuaccauggagcugcucauccugaaggccaacgccaucaccaccauccugacggcggugaccuucugcuucgccagcggccagaacaucaccgaggaguucuaccaguccacgugcagcgccgucuccaagggguaccucagcgcccugcgcaccggcugguacaccuccgugaucaccaucgagcugagcaacaucaaggagaacaagugcaacgggaccgacgccaaggugaagcucaucaagcaggagcuggacaaguacaagaacgcggucacggagcugcagcuccugaugcaguccacccccgccaccggcagcggguccgccaucgccagcggcguggcggugugcaagguccugcaccucgagggcgaggugaacaagaucaaguccgcccugcugagcaccaacaaggccguggucucccucagcaacgggguguccgugcugacguucaagguccuggaccucaagaacuacaucgacaagcagcugcugccgauccucaacaagcagagcugcuccaucagcaacaucgagaccgugaucgaguuccagcagaagaacaaccggcugcuggagaucacccgcgaguucuccgugaacgccggcgucaccacgcccgugagcaccuacaugcucaccaacagcgagcugcugucccucaucaacgacaugcccaucaccaacgaccagaagaagcugaugagcaacaacgugcagaucguccggcagcaguccuacagcaucaugugcaucaucaaggaggaggugcuggccuacgugguccagcucccccuguacggggugaucgacacgccgugcuggaagcugcacaccagcccccucugcaccaccaacacgaaggagggcuccaacaucugccugacccgcaccgaccgggggugguacugcgacaacgcgggcuccgugagcuucuucccccaggccgagaccugcaagguccaguccaaccgcguguucugcgacacgaugaacagccggacccuccccuccgaggucaaccugugcaacguggacaucuucaacccgaaguacgacugcaagaucaugaccagcaagaccgacguguccagcuccgucaucacgagccugggcgccaucguguccugcuacgggaagaccaagugcaccgccagcaacaagaaccggggcaucaucaagaccuucuccaacgggugcgacuacgugagcaacaagggcgucgacacggugagcgugggcaacacccucuacuacgucaacaagcaggaggggaagucccuguacgugaagggcgagcccaucaucaacuucuacgacccccugguguuccccagcgacgaguucgacgccuccaucagccaggucaacgagaagaucaaccagucccucgcguucauccgcaagagcgacgagcugcugcacaacgugaacgccgggaaguccaccaccaacaucaugaucaccacgaucaucaucgugaucaucgucauccuccugagccugaucgccgugggccuccugcuguacugcaaggcccgguccaccccggugacccugagcaaggaccagcucuccgggaucaacaacaucgccuucagcaacugaggacuaguggaagcauuuuccuggcugauuaaaagaaauuacucagcuauggucaucuguuccuguuagaaggcuaugcagcauauuauauacuaugcgcauguuaugaaaugcauaauaaaaaauuuuaaaaaaucuaaaagaucuaaaaaaaaaaaaaaaaaaaaaaaaaaaaaaaaaaaaaaaaaaaaaaaaaaaaaaaaaaaaaaaaugcaucccccccccccccccccccccccccccccccaaaggcucuuuucagagccaccagaauu

SEQ ID NO: 4005 - RNA, 1960 nt, Artificial Sequence
  mRNA product Design d-4 comprising derived and/or modified sequence from HRSV(A2)__F_DSCav1_mut0 (opt2)
gggagagucccgcagucggcguccagcggcucugcuuguucgugugugugucguugcaggccuuauucaagcuuaccauggagcuccucauccucaaggccaacgccaucaccaccauccucaccgccgucaccuucugcuucgccuccggccagaacaucaccgaggaguucuaccaguccaccugcuccgccgucuccaagggcuaccucuccgcccuccgcaccggcugguacaccuccgucaucaccaucgagcucuccaacaucaaggagaacaagugcaacggcaccgacgccaaggucaagcucaucaagcaggagcucgacaaguacaagaacgccgucaccgagcuccagcuccucaugcaguccacccccgccaccggcuccggcuccgccaucgccuccggcgucgccgucugcaagguccuccaccucgagggcgaggucaacaagaucaaguccgcccuccucuccaccaacaaggccgucgucucccucuccaacggcgucuccguccucaccuucaagguccucgaccucaagaacuacaucgacaagcagcuccuccccauccucaacaagcaguccugcuccaucuccaacaucgagaccgucaucgaguuccagcagaagaacaaccgccuccucgagaucacccgcgaguucuccgucaacgccggcgucaccacccccgucuccaccuacaugcucaccaacuccgagcuccucucccucaucaacgacaugcccaucaccaacgaccagaagaagcucauguccaacaacguccagaucguccgccagcaguccuacuccaucaugugcaucaucaaggaggagguccucgccuacgucguccagcucccccucuacggcgucaucgacacccccugcuggaagcuccacaccuccccccucugcaccaccaacaccaaggagggcuccaacaucugccucacccgcaccgaccgcggcugguacugcgacaacgccggcuccgucuccuucuucccccaggccgagaccugcaagguccaguccaaccgcgucuucugcgacaccaugaacucccgcacccuccccuccgaggucaaccucugcaacgucgacaucuucaaccccaaguacgacugcaagaucaugaccuccaagaccgacgucuccuccuccgucaucaccucccucggcgccaucgucuccugcuacggcaagaccaagugcaccgccuccaacaagaaccgcggcaucaucaagaccuucuccaacggcugcgacuacgucuccaacaagggcgucgacaccgucuccgucggcaacacccucuacuacgucaacaagcaggagggcaagucccucuacgucaagggcgagcccaucaucaacuucuacgacccccucgucuuccccuccgacgaguucgacgccuccaucucccaggucaacgagaagaucaaccagucccucgccuucauccgcaaguccgacgagcuccuccacaacgucaacgccggcaaguccaccaccaacaucaugaucaccaccaucaucaucgucaucaucgucauccuccucucccucaucgccgucggccuccuccucuacugcaaggcccgcuccacccccgucacccucuccaaggaccagcucuccggcaucaacaacaucgccuucuccaacugaggacuaguggaagcauuuuccuggcugauuaaaagaaauuacucagcuauggucaucuguuccuguuagaaggcuaugcagcauauuauauacuaugcgcauguuaugaaaugcauaauaaaaaauuuuaaaaaaucuaaaagaucuaaaaaaaaaaaaaaaaaaaaaaaaaaaaaaaaaaaaaaaaaaaaaaaaaaaaaaaaaaaaaaaaugcaucccccccccccccccccccccccccccccccaaaggcucuuuucagagccaccagaauu

SEQ ID NO: 4006 - RNA, 1960 nt, Artificial Sequence
  mRNA product Design d-4 comprising derived and/or modified sequence from HRSV(A2)__F_DSCav1_mut0 (opt3)
gggagagucccgcagucggcguccagcggcucugcuuguucgugugugugucguugcaggccuuauucaagcuuaccauggagcugcucauccuuaaggccaacgcuauuaccacaauacugacugcagugacguucugcuuugccagcggccagaauaucaccgaagaguucuaccaauccacauguucugcggucucaaaaggguauuugagugcuuuaagaacuggaugguacaccagcguuauuacaaucgaacuguccaacauuaaggagaauaaaugcaacgguaccgacgccaaggugaaacuaaucaagcaggaacucgauaaguauaaaaaugcaguaacugagcugcagcuucugaugcagucuacacccgccaccggcucggggucagcuauagcaagcggaguggccgucuguaagguguugcaccucgagggcgaaguuaacaaaaucaagagugcucugcuguccacgaauaaagccguggucucucucagcaacgguguguccguauuaacuuuuaagguucuggaccuuaagaauuacauugauaaacaauugcugccuauccuaaacaagcagucaugcaguauuagcaauaucgagaccgugauagaguuccagcagaaaaacaauaggcuccuggaaauuacacgggaguuuucugucaacgcgggggugacuaccccaguguccacauauaugcuuaccaauucagaacuguugagccucaucaacgacaugccgauuacgaacgaucaaaagaaacugaugaguaauaacguccagaucguucgccagcagucuuacuccaucauguguauuauaaaggaggaaguguuagcauauguagugcaacugccccucuacggagucaucgacacuccuugcuggaaacuucauacaagcccacuguguaccacuaauacaaaggagggcucgaacauuugcuugacccgaacggaucguggcugguacugugacaaugccgggucuguguccuucuuuccccaggcugaaaccugcaagguucagucaaacagaguguucugugauacaaugaauaguagaacucugccuagcgaggucaaccucugcaauguggacaucuuuaacccaaaauaugauugcaagauaaugaccuccaaaacagacguaucuagcucaguuauuaccagucugggagccaucguguccuguuacgguaagacuaaaugcacagcaagcaauaagaacaggggcaucauuaagaccuucucuaaugggugugauuaugucucaaacaaaggaguggacacugucagugugggcaauacgcuuuacuauguuaacaagcaagaggguaaaagccuguacgugaagggggaacccaucauuaacuuuuaugacccuuugguauucccauccgaugaguuugacgcuucuauaucgcaggucaaugagaaaaucaaccagagccucgccuucauucggaaguccgaugaacuguuacacaaugugaacgcgggaaagucaacaaccaauaucaugaucacuaccauuauaaucguuauuaucgugauucugcuaagucucaucgccgucggccugcuuuuguacugcaaagcacgcucuacaccggugacccugagcaaggaccagcucuccggcauaaacaauaucgcuuucucaaacugaggacuaguggaagcauuuuccuggcugauuaaaagaaauuacucagcuauggucaucuguuccuguuagaaggcuaugcagcauauuauauacuaugcgcauguuaugaaaugcauaauaaaaaauuuuaaaaaaucuaaaagaucuaaaaaaaaaaaaaaaaaaaaaaaaaaaaaaaaaaaaaaaaaaaaaaaaaaaaaaaaaaaaaaaaugcaucccccccccccccccccccccccccccccccaaaggcucuuuucagagccaccagaauu

SEQ ID NO: 4007 - RNA, 1960 nt, Artificial Sequence
  mRNA product Design d-4 comprising derived and/or modified sequence from HRSV(A2)__F_DSCav1_mut0 (opt4)
gggagagucccgcagucggcguccagcggcucugcuuguucgugugugugucguugcaggccuuauucaagcuuaccauggagcugcugauccugaaggccaacgccaucaccaccauccugaccgccgugaccuucugcuucgccagcggccagaacaucaccgaggaguucuaccagagcaccugcagcgccgugagcaagggcuaccugagcgcccugagaaccggcugguacaccagcgugaucaccaucgagcugagcaacaucaaggagaacaagugcaacggcaccgacgccaaggugaagcugaucaagcaggagcuggacaaguacaagaacgccgugaccgagcugcagcugcugaugcagagcacccccgccaccggcagcggcagcgccaucgccagcggcguggccgugugcaaggugcugcaccuggagggcgaggugaacaagaucaagagcgcccugcugagcaccaacaaggccguggugagccugagcaacggcgugagcgugcugaccuucaaggugcuggaccugaagaacuacaucgacaagcagcugcugcccauccugaacaagcagagcugcagcaucagcaacaucgagaccgugaucgaguuccagcagaagaacaacagacugcuggagaucaccagagaguucagcgugaacgccggcgugaccacccccgugagcaccuacaugcugaccaacagcgagcugcugagccugaucaacgacaugcccaucaccaacgaccagaagaagcugaugagcaacaacgugcagaucgugagacagcagagcuacagcaucaugugcaucaucaaggaggaggugcuggccuacguggugcagcugccccuguacggcgugaucgacacccccugcuggaagcugcacaccagcccccugugcaccaccaacaccaaggagggcagcaacaucugccugaccagaaccgacagaggcugguacugcgacaacgccggcagcgugagcuucuucccccaggccgagaccugcaaggugcagagcaacagaguguucugcgacaccaugaacagcagaacccugcccagcgaggugaaccugugcaacguggacaucuucaaccccaaguacgacugcaagaucaugaccagcaagaccgacgugagcagcagcgugaucaccagccugggcgccaucgugagcugcuacggcaagaccaagugcaccgccagcaacaagaacagaggcaucaucaagaccuucagcaacggcugcgacuacgugagcaacaagggcguggacaccgugagcgugggcaacacccuguacuacgugaacaagcaggagggcaagagccuguacgugaagggcgagcccaucaucaacuucuacgacccccugguguuccccagcgacgaguucgacgccagcaucagccaggugaacgagaagaucaaccagagccuggccuucaucagaaagagcgacgagcugcugcacaacgugaacgccggcaagagcaccaccaacaucaugaucaccaccaucaucaucgugaucaucgugauccugcugagccugaucgccgugggccugcugcuguacugcaaggccagaagcacccccgugacccugagcaaggaccagcugagcggcaucaacaacaucgccuucagcaacugaggacuaguggaagcauuuuccuggcugauuaaaagaaauuacucagcuauggucaucuguuccuguuagaaggcuaugcagcauauuauauacuaugcgcauguuaugaaaugcauaauaaaaaauuuuaaaaaaucuaaaagaucuaaaaaaaaaaaaaaaaaaaaaaaaaaaaaaaaaaaaaaaaaaaaaaaaaaaaaaaaaaaaaaaaugcaucccccccccccccccccccccccccccccccaaaggcucuuuucagagccaccagaauu

SEQ ID NO: 4008 - RNA, 1960 nt, Artificial Sequence
  mRNA product Design d-4 comprising derived and/or modified sequence from HRSV(A2)__F_DSCav1_mut0 (opt5)
gggagagucccgcagucggcguccagcggcucugcuuguucgugugugugucguugcaggccuuauucaagcuuaccauggagcugcucauccugaaggccaacgcuauuaccacaauccuuacggccgugaccuucugcuuugcgagcggccagaauauuacagaagaguucuaccaauccaccuguucugcugucagcaaaggguaucuguccgcccucagaacaggaugguacaccucuguuaucacaauugaacugagcaacaucaaggagaauaaaugcaacggcaccgacgccaaggugaaacuuaucaagcaggaacuggauaaguauaaaaaugcugugacggagcuccagcugcugaugcaguccacccccgccacagggucuggaagcgcuauugccuccggcgucgcgguguguaagguucuccaccuggagggggaagugaacaaaaucaagagcgcccuucugucuaccaauaaagcugucgugucccucagcaacggaguuucugugcugacauuuaagguccuugaccugaagaauuacauugauaaacaacuccugccuauccugaacaagcaguccugcagcauuucuaauaucgagaccgugauugaguuccagcagaaaaacaaucggcuccuggaaaucacgcgcgaguuuuccgugaacgccggcgucacaaccccgguuagcacauauaugcuuaccaauuccgaacugcucucucugaucaacgacaugcccauuaccaacgaucaaaagaaacuuaugagcaauaacgugcagaucgugagacagcaguccuacagcauuauguguaucauuaaggaggaaguccuggcuuaugugguucaacucccucuguacggcgugaucgacacacccugcuggaaacugcauacgucuccucucuguaccacaaauaccaaggagggguccaacaucugccugacacggaccgaucgcggaugguacugugacaaugccggcagcgucucuuucuuuccccaggcggaaacgugcaaggugcagagcaacagaguuuucugugauacaaugaacuccagaacccugccuucugaggugaaucucugcaaugucgacauuuuuaacccgaaauaugauugcaagaucaugaccagcaaaacagacguguccagcucugucauuaccucccugggggccaucgugagcuguuacggaaagacaaaaugcacggcuucuaauaagaaccggggcauuaucaagaccuucuccaaugggugugauuauguuagcaacaaaggaguggacacagucuccgugggcaauacccuuuacuauguuaacaagcaagagggcaaaucucuguacgugaagggggaacccaucauuaacuuuuaugacccucucgucuuccccagcgaugaguuugacgccuccaucucucaggugaaugagaaaauuaaccagagccuggcuuucauccgcaaguccgaugaacugcuccacaaugugaacgccggaaagagcacaaccaauauuaugaucacgaccauuaucaucguuauuaucgucauucugcuuucucugaucgccgugggccuccugcuguacugcaaagcuagauccacaccugugacccuuagcaaggaccagcucucugggauuaacaauaucgcguucuccaacugaggacuaguggaagcauuuuccuggcugauuaaaagaaauuacucagcuauggucaucuguuccuguuagaaggcuaugcagcauauuauauacuaugcgcauguuaugaaaugcauaauaaaaaauuuuaaaaaaucuaaaagaucuaaaaaaaaaaaaaaaaaaaaaaaaaaaaaaaaaaaaaaaaaaaaaaaaaaaaaaaaaaaaaaaaugcaucccccccccccccccccccccccccccccccaaaggcucuuuucagagccaccagaauu

SEQ ID NO: 4009 - RNA, 1960 nt, Artificial Sequence
  mRNA product Design d-4 comprising derived and/or modified sequence from HRSV(A2)__F_DSCav1_mut0 (opt6)
gggagagucccgcagucggcguccagcggcucugcuuguucgugugugugucguugcaggccuuauucaagcuuaccauggaacuacuaauacuaaaagccaaugcaauaacaaccauacuaaccgccguaacauuuuguuucgcaucaggucaaaacauaaccgaagaauuuuaucaaucaacaugcucagcaguaucaaaaggauacuuauccgcucuaagaacaggaugguacacaaguguaauuacaauagagcucucaaacauaaaagaaaacaaaugcaauggaacugacgcaaaaguuaaacuuauaaaacaagaacuagauaaauauaaaaaugcaguaaccgaauuacaacuccuaaugcaauccacaccugcuaccgguuccggaucagccauagcaucuggaguagccguaugcaaaguccuccaccuagaaggagaaguaaauaaaaucaaaucagcacuauuaucuaccaauaaagcaguugucucacuauccaauggcguaucaguacuaacauucaaaguauuagaccuuaaaaacuacauagacaaacaacuauuaccaauucugaacaaacaauccuguucaauaucaaacaucgaaacgguaauagaauuucaacaaaaaaauaacagauuacuugaaauaacaagagaauuuucaguaaaugcaggaguuacaacacccgucuccaccuacaugcucacaaauucagaauuauuaucacuuauaaacgacaugccaauaacuaacgaccaaaaaaaacuaaugucaaacaauguccaaauaguccgacaacaauccuacucaauaaugugcauuauaaaagaagaaguccuagccuacguuguccaacuacccuuauauggaguaauagauaccccaugcuggaaacuucauaccuccccccuaugcacaacaaacacaaaagaaggcucaaacaucugcuuaacacguacagaccgagguugguacugugauaacgcaggauccguaucauuuuucccacaagcagaaacaugcaaaguacaaucaaaccgcguuuuuugugacaccaugaacagcagaacccucccuucagaaguaaaccuaugcaacgucgauauauuuaacccaaaauacgauugcaaaauaaugacaucaaaaaccgaugucucaucuucaguaauaaccucucuaggagcaauagucucauguuacggaaaaacaaaaugcacagcaaguaauaaaaauagaggaauaauaaaaacauucucuaauggcugcgacuacguauccaauaaaggcguugacacaguauccguaggcaacacacucuacuauguuaacaaacaagaaggaaaaaguuuauacguuaaaggagaaccaauuauaaacuuuuacgacccacucguauucccaucugaugaauuugacgcaucaaucucacaaguaaaugaaaaaaucaaucagucccuugccuuuauaagaaaaucagaugaacuuuuacacaacguuaacgccggaaaaucaacaaccaauauaaugaucacaaccauaauaauaguuauaauuguaauuuuauuauccuuaauagccgucggacuacuacuauacugcaaagcaagaucuacacccguaacccuaucaaaagaccaacuaaguggaauaaauaacauugcauucucaaauuaaggacuaguggaagcauuuuccuggcugauuaaaagaaauuacucagcuauggucaucuguuccuguuagaaggcuaugcagcauauuauauacuaugcgcauguuaugaaaugcauaauaaaaaauuuuaaaaaaucuaaaagaucuaaaaaaaaaaaaaaaaaaaaaaaaaaaaaaaaaaaaaaaaaaaaaaaaaaaaaaaaaaaaaaaaugcaucccccccccccccccccccccccccccccccaaaggcucuuuucagagccaccagaauu

SEQ ID NO: 4010 - RNA, 1960 nt, Artificial Sequence
  mRNA product Design d-4 comprising derived and/or modified sequence from HRSV(A2)__F_DSCav1_mut0 (opt11)
gggagagucccgcagucggcguccagcggcucugcuuguucgugugugugucguugcaggccuuauucaagcuuaccauggaacuccuaauacuaaaggcaaacgcaaucacuacaauucuaaccgccgugacauucugcuucgccuccggacaaaacaucaccgaagaauuuuaccaauccacaugcucggccgucaguaaaggcuaccucucggcucuccgaaccggcugguacaccuccgucaucaccaucgaacucuccaacaucaaagaaaacaaaugcaacggcaccgacgccaaagucaaacuaaucaaacaagaacucgacaaauacaaaaacgccgucacagaacuccaacuacuaaugcaaucaacacccgcuacaggaagcggcuccgccaucgccagcggcguagcugucugcaaaguccuccaccucgaaggugaagucaacaaaaucaaaucagcccuacucagcacaaacaaagccguuguaagccuauccaacggcgucuccguacuaacauucaaaguccuugaccucaagaacuacaucgacaaacaacuucucccaauccuaaacaaacaaagcugcucaauuuccaacaucgaaacaguaaucgaauuucaacaaaaaaacaaccgacuccucgaaaucacccgcgaauuuuccguuaacgccggcguuacaacccccgucuccaccuacaugcucaccaauuccgaacuacuaucacucauaaacgacaugccuaucacaaacgaccaaaaaaaacuaaugucaaacaauguccaaaucguccgccagcaaagcuauuccaucaugugcaucaucaaagaggaaguccucgccuacguaguccaacugccccucuacggcgucauugauacccccugcuggaaacuccacaccuccccccucugcaccacaaacaccaaagaagguuccaacaucugccuaacacgaaccgacagaggcugguacugcgacaacgccggcagcgucuccuucuucccccaagcagaaaccuguaaaguccagucuaaccgcgucuucugcgacacaaugaacucaagaacccuaccuuccgaaguaaaccucugcaacguagacaucuucaacccuaaauacgacugcaaaaucaugacuucaaaaacagacguaagcucuuccguaaucacuucccucggcgccaucguauccugcuacgguaaaaccaaaugcaccgccuccaacaaaaaccgagggaucauaaaaaccuucuccaacggcugcgacuacguaucuaacaaaggcgucgacaccgucuccgucggcaacacccucuauuacguaaacaaacaagagggcaaaucacuauacgucaaaggcgagccaaucauaaacuucuaugacccacucgucuucccuucagacgaauuugaugccagcaucagccaagucaacgaaaaaaucaaccaaucacucgccuucauccgcaaaagcgacgaacuccuucacaacgucaacgcaggcaaaucaaccaccaacaucaugaucaccaccaucaucaucgucaucaucguuauccuacucagccucaucgcaguuggucuucuccuuuacugcaaagcccgcuccacccccgucacccucaguaaagaccaacucagcggaaucaacaacauagcauucuccaacuaaggacuaguggaagcauuuuccuggcugauuaaaagaaauuacucagcuauggucaucuguuccuguuagaaggcuaugcagcauauuauauacuaugcgcauguuaugaaaugcauaauaaaaaauuuuaaaaaaucuaaaagaucuaaaaaaaaaaaaaaaaaaaaaaaaaaaaaaaaaaaaaaaaaaaaaaaaaaaaaaaaaaaaaaaaugcaucccccccccccccccccccccccccccccccaaaggcucuuuucagagccaccagaauu

SEQ ID NO: 4011 - RNA, 2057 nt, Artificial Sequence
  mRNA product Design d-5 comprising derived and/or modified sequence from HRSV(A2)__F_DSCav1_mut0 (opt1)
gggagagggcgcuuggcuugcaaggacccugagcugcggcauugaagcacacccaacccaacucgacugaagucagccucacugaaccggaucugagaaucuucucucucugggcuugccagggcucuccgaaccuagcuagcauccucuucaauuccaacuagaaagcuuaccauggagcugcucauccugaaggccaacgccaucaccaccauccugacggcggugaccuucugcuucgccagcggccagaacaucaccgaggaguucuaccaguccacgugcagcgccgucuccaagggguaccucagcgcccugcggaccggcugguacaccuccgugaucaccaucgagcugagcaacaucaaggagaacaagugcaacgggaccgacgccaaggugaagcucaucaagcaggagcuggacaaguacaagaacgcggucacggagcugcagcuccugaugcaguccaccccggcaaccggcuccggcuccgccaucgcgagcggcgucgccgugugcaaggugcugcaccucgagggggaggucaacaagaucaagagcgcccugcuguccaccaacaaggccguggugagccucuccaacggcgucagcgugcugaccuucaaggugcuggaccucaagaacuacaucgacaagcagcugcugcccauccugaacaagcagagcugcuccaucagcaacaucgagacggugaucgaguuccagcagaagaacaaccggcuccuggagaucacccgcgaguucagcgugaacgccggggucaccacccccguguccacguacaugcugaccaacagcgagcuccugucccugaucaacgacaugccgaucaccaacgaccagaagaagcucaugagcaacaacgugcagaucguccggcagcaguccuacagcaucaugugcaucaucaaggaggaggugcuggcguacgugguccagcugccccucuacggcgugaucgacacccccugcuggaagcugcacacgagcccccugugcaccaccaacaccaaggagggguccaacaucugccucacgcgcaccgaccggggcugguacugcgacaacgccggcagcgucuccuucuucccgcaggccgagaccugcaaggugcagagcaaccgcguguucugcgacaccaugaacucccggacgcugcccagcgagguaaaccucugcaacgucgacaucuucaaccccaaguacgacugcaagaucaugaccuccaagaccgacgugagcuccagcgugaucaccucccugggggccaucgucagcugcuacggcaagacgaagugcaccgccagcaacaagaaccgggggaucaucaagaccuucuccaacggcugcgacuacgugagcaacaagggcguggacaccguguccgucgggaacacccuguacuacgugaacaagcaggagggcaagagccucuacgugaagggggagcccaucaucaacuucuacgacccgcuggucuuccccuccgacgaguucgacgcgagcaucucccaggugaacgagaagaucaaccagagccuggccuucauccgcaaguccgacgagcugcuccacaacgugaacgccggcaagagcacgaccaacaucaugaucaccaccaucaucaucgucaucaucgugauccugcugucccucaucgccguggggcugcugcucuacugcaaggcccggagcacgcccgucacccuguccaaggaccagcugagcggcaucaacaacaucgcguucuccaacugaggacuaguggaagcauuuuccuggcugauuaaaagaaauuacucagcuauggucaucuguuccuguuagaaggcuaugcagcauauuauauacuaugcgcauguuaugaaaugcauaauaaaaaauuuuaaaaaaucuaaaagaucuaaaaaaaaaaaaaaaaaaaaaaaaaaaaaaaaaaaaaaaaaaaaaaaaaaaaaaaaaaaaaaaaugcaucccccccccccccccccccccccccccccccaaaggcucuuuucagagccaccagaauu

SEQ ID NO: 4012 - RNA, 2057 nt, Artificial Sequence
  mRNA product Design d-5 comprising derived and/or modified sequence from HRSV(A2)__F_DSCav1_mut0 (opt1)
gggagagggcgcuuggcuugcaaggacccugagcugcggcauugaagcacacccaacccaacucgacugaagucagccucacugaaccggaucugagaaucuucucucucugggcuugccagggcucuccgaaccuagcuagcauccucuucaauuccaacuagaaagcuuaccauggagcugcucauccugaaggccaacgccaucaccaccauccugacggcggugaccuucugcuucgccagcggccagaacaucaccgaggaguucuaccaguccacgugcagcgccgucuccaagggguaccucagcgcccugcgcaccggcugguacaccuccgugaucaccaucgagcugagcaacaucaaggagaacaagugcaacgggaccgacgccaaggugaagcucaucaagcaggagcuggacaaguacaagaacgcggucacggagcugcagcuccugaugcaguccacccccgccaccggcagcggguccgccaucgccagcggcguggcggugugcaagguccugcaccucgagggcgaggugaacaagaucaaguccgcccugcugagcaccaacaaggccguggucucccucagcaacgggguguccgugcugacguucaagguccuggaccucaagaacuacaucgacaagcagcugcugccgauccucaacaagcagagcugcuccaucagcaacaucgagaccgugaucgaguuccagcagaagaacaaccggcugcuggagaucacccgcgaguucuccgugaacgccggcgucaccacgcccgugagcaccuacaugcucaccaacagcgagcugcugucccucaucaacgacaugcccaucaccaacgaccagaagaagcugaugagcaacaacgugcagaucguccggcagcaguccuacagcaucaugugcaucaucaaggaggaggugcuggccuacgugguccagcucccccuguacggggugaucgacacgccgugcuggaagcugcacaccagcccccucugcaccaccaacacgaaggagggcuccaacaucugccugacccgcaccgaccgggggugguacugcgacaacgcgggcuccgugagcuucuucccccaggccgagaccugcaagguccaguccaaccgcguguucugcgacacgaugaacagccggacccuccccuccgaggucaaccugugcaacguggacaucuucaacccgaaguacgacugcaagaucaugaccagcaagaccgacguguccagcuccgucaucacgagccugggcgccaucguguccugcuacgggaagaccaagugcaccgccagcaacaagaaccggggcaucaucaagaccuucuccaacgggugcgacuacgugagcaacaagggcgucgacacggugagcgugggcaacacccucuacuacgucaacaagcaggaggggaagucccuguacgugaagggcgagcccaucaucaacuucuacgacccccugguguuccccagcgacgaguucgacgccuccaucagccaggucaacgagaagaucaaccagucccucgcguucauccgcaagagcgacgagcugcugcacaacgugaacgccgggaaguccaccaccaacaucaugaucaccacgaucaucaucgugaucaucgucauccuccugagccugaucgccgugggccuccugcuguacugcaaggcccgguccaccccggugacccugagcaaggaccagcucuccgggaucaacaacaucgccuucagcaacugaggacuaguggaagcauuuuccuggcugauuaaaagaaauuacucagcuauggucaucuguuccuguuagaaggcuaugcagcauauuauauacuaugcgcauguuaugaaaugcauaauaaaaaauuuuaaaaaaucuaaaagaucuaaaaaaaaaaaaaaaaaaaaaaaaaaaaaaaaaaaaaaaaaaaaaaaaaaaaaaaaaaaaaaaaugcaucccccccccccccccccccccccccccccccaaaggcucuuuucagagccaccagaauu

SEQ ID NO: 4013 - RNA, 2057 nt, Artificial Sequence
  mRNA product Design d-5 comprising derived and/or modified sequence from HRSV(A2)__F_DSCav1_mut0 (opt2)
gggagagggcgcuuggcuugcaaggacccugagcugcggcauugaagcacacccaacccaacucgacugaagucagccucacugaaccggaucugagaaucuucucucucugggcuugccagggcucuccgaaccuagcuagcauccucuucaauuccaacuagaaagcuuaccauggagcuccucauccucaaggccaacgccaucaccaccauccucaccgccgucaccuucugcuucgccuccggccagaacaucaccgaggaguucuaccaguccaccugcuccgccgucuccaagggcuaccucuccgcccuccgcaccggcugguacaccuccgucaucaccaucgagcucuccaacaucaaggagaacaagugcaacggcaccgacgccaaggucaagcucaucaagcaggagcucgacaaguacaagaacgccgucaccgagcuccagcuccucaugcaguccacccccgccaccggcuccggcuccgccaucgccuccggcgucgccgucugcaagguccuccaccucgagggcgaggucaacaagaucaaguccgcccuccucuccaccaacaaggccgucgucucccucuccaacggcgucuccguccucaccuucaagguccucgaccucaagaacuacaucgacaagcagcuccuccccauccucaacaagcaguccugcuccaucuccaacaucgagaccgucaucgaguuccagcagaagaacaaccgccuccucgagaucacccgcgaguucuccgucaacgccggcgucaccacccccgucuccaccuacaugcucaccaacuccgagcuccucucccucaucaacgacaugcccaucaccaacgaccagaagaagcucauguccaacaacguccagaucguccgccagcaguccuacuccaucaugugcaucaucaaggaggagguccucgccuacgucguccagcucccccucuacggcgucaucgacacccccugcuggaagcuccacaccuccccccucugcaccaccaacaccaaggagggcuccaacaucugccucacccgcaccgaccgcggcugguacugcgacaacgccggcuccgucuccuucuucccccaggccgagaccugcaagguccaguccaaccgcgucuucugcgacaccaugaacucccgcacccuccccuccgaggucaaccucugcaacgucgacaucuucaaccccaaguacgacugcaagaucaugaccuccaagaccgacgucuccuccuccgucaucaccucccucggcgccaucgucuccugcuacggcaagaccaagugcaccgccuccaacaagaaccgcggcaucaucaagaccuucuccaacggcugcgacuacgucuccaacaagggcgucgacaccgucuccgucggcaacacccucuacuacgucaacaagcaggagggcaagucccucuacgucaagggcgagcccaucaucaacuucuacgacccccucgucuuccccuccgacgaguucgacgccuccaucucccaggucaacgagaagaucaaccagucccucgccuucauccgcaaguccgacgagcuccuccacaacgucaacgccggcaaguccaccaccaacaucaugaucaccaccaucaucaucgucaucaucgucauccuccucucccucaucgccgucggccuccuccucuacugcaaggcccgcuccacccccgucacccucuccaaggaccagcucuccggcaucaacaacaucgccuucuccaacugaggacuaguggaagcauuuuccuggcugauuaaaagaaauuacucagcuauggucaucuguuccuguuagaaggcuaugcagcauauuauauacuaugcgcauguuaugaaaugcauaauaaaaaauuuuaaaaaaucuaaaagaucuaaaaaaaaaaaaaaaaaaaaaaaaaaaaaaaaaaaaaaaaaaaaaaaaaaaaaaaaaaaaaaaaugcaucccccccccccccccccccccccccccccccaaaggcucuuuucagagccaccagaauu

SEQ ID NO: 4014 - RNA, 2057 nt, Artificial Sequence
  mRNA product Design d-5 comprising derived and/or modified sequence from HRSV(A2)__F_DSCav1_mut0 (opt3)
gggagagggcgcuuggcuugcaaggacccugagcugcggcauugaagcacacccaacccaacucgacugaagucagccucacugaaccggaucugagaaucuucucucucugggcuugccagggcucuccgaaccuagcuagcauccucuucaauuccaacuagaaagcuuaccauggagcugcucauccuuaaggccaacgcuauuaccacaauacugacugcagugacguucugcuuugccagcggccagaauaucaccgaagaguucuaccaauccacauguucugcggucucaaaaggguauuugagugcuuuaagaacuggaugguacaccagcguuauuacaaucgaacuguccaacauuaaggagaauaaaugcaacgguaccgacgccaaggugaaacuaaucaagcaggaacucgauaaguauaaaaaugcaguaacugagcugcagcuucugaugcagucuacacccgccaccggcucggggucagcuauagcaagcggaguggccgucuguaagguguugcaccucgagggcgaaguuaacaaaaucaagagugcucugcuguccacgaauaaagccguggucucucucagcaacgguguguccguauuaacuuuuaagguucuggaccuuaagaauuacauugauaaacaauugcugccuauccuaaacaagcagucaugcaguauuagcaauaucgagaccgugauagaguuccagcagaaaaacaauaggcuccuggaaauuacacgggaguuuucugucaacgcgggggugacuaccccaguguccacauauaugcuuaccaauucagaacuguugagccucaucaacgacaugccgauuacgaacgaucaaaagaaacugaugaguaauaacguccagaucguucgccagcagucuuacuccaucauguguauuauaaaggaggaaguguuagcauauguagugcaacugccccucuacggagucaucgacacuccuugcuggaaacuucauacaagcccacuguguaccacuaauacaaaggagggcucgaacauuugcuugacccgaacggaucguggcugguacugugacaaugccgggucuguguccuucuuuccccaggcugaaaccugcaagguucagucaaacagaguguucugugauacaaugaauaguagaacucugccuagcgaggucaaccucugcaauguggacaucuuuaacccaaaauaugauugcaagauaaugaccuccaaaacagacguaucuagcucaguuauuaccagucugggagccaucguguccuguuacgguaagacuaaaugcacagcaagcaauaagaacaggggcaucauuaagaccuucucuaaugggugugauuaugucucaaacaaaggaguggacacugucagugugggcaauacgcuuuacuauguuaacaagcaagaggguaaaagccuguacgugaagggggaacccaucauuaacuuuuaugacccuuugguauucccauccgaugaguuugacgcuucuauaucgcaggucaaugagaaaaucaaccagagccucgccuucauucggaaguccgaugaacuguuacacaaugugaacgcgggaaagucaacaaccaauaucaugaucacuaccauuauaaucguuauuaucgugauucugcuaagucucaucgccgucggccugcuuuuguacugcaaagcacgcucuacaccggugacccugagcaaggaccagcucuccggcauaaacaauaucgcuuucucaaacugaggacuaguggaagcauuuuccuggcugauuaaaagaaauuacucagcuauggucaucuguuccuguuagaaggcuaugcagcauauuauauacuaugcgcauguuaugaaaugcauaauaaaaaauuuuaaaaaaucuaaaagaucuaaaaaaaaaaaaaaaaaaaaaaaaaaaaaaaaaaaaaaaaaaaaaaaaaaaaaaaaaaaaaaaaugcaucccccccccccccccccccccccccccccccaaaggcucuuuucagagccaccagaauu

SEQ ID NO: 4015 - RNA, 2057 nt, Artificial Sequence
  mRNA product Design d-5 comprising derived and/or modified sequence from HRSV(A2)__F_DSCav1_mut0 (opt4)
gggagagggcgcuuggcuugcaaggacccugagcugcggcauugaagcacacccaacccaacucgacugaagucagccucacugaaccggaucugagaaucuucucucucugggcuugccagggcucuccgaaccuagcuagcauccucuucaauuccaacuagaaagcuuaccauggagcugcugauccugaaggccaacgccaucaccaccauccugaccgccgugaccuucugcuucgccagcggccagaacaucaccgaggaguucuaccagagcaccugcagcgccgugagcaagggcuaccugagcgcccugagaaccggcugguacaccagcgugaucaccaucgagcugagcaacaucaaggagaacaagugcaacggcaccgacgccaaggugaagcugaucaagcaggagcuggacaaguacaagaacgccgugaccgagcugcagcugcugaugcagagcacccccgccaccggcagcggcagcgccaucgccagcggcguggccgugugcaaggugcugcaccuggagggcgaggugaacaagaucaagagcgcccugcugagcaccaacaaggccguggugagccugagcaacggcgugagcgugcugaccuucaaggugcuggaccugaagaacuacaucgacaagcagcugcugcccauccugaacaagcagagcugcagcaucagcaacaucgagaccgugaucgaguuccagcagaagaacaacagacugcuggagaucaccagagaguucagcgugaacgccggcgugaccacccccgugagcaccuacaugcugaccaacagcgagcugcugagccugaucaacgacaugcccaucaccaacgaccagaagaagcugaugagcaacaacgugcagaucgugagacagcagagcuacagcaucaugugcaucaucaaggaggaggugcuggccuacguggugcagcugccccuguacggcgugaucgacacccccugcuggaagcugcacaccagcccccugugcaccaccaacaccaaggagggcagcaacaucugccugaccagaaccgacagaggcugguacugcgacaacgccggcagcgugagcuucuucccccaggccgagaccugcaaggugcagagcaacagaguguucugcgacaccaugaacagcagaacccugcccagcgaggugaaccugugcaacguggacaucuucaaccccaaguacgacugcaagaucaugaccagcaagaccgacgugagcagcagcgugaucaccagccugggcgccaucgugagcugcuacggcaagaccaagugcaccgccagcaacaagaacagaggcaucaucaagaccuucagcaacggcugcgacuacgugagcaacaagggcguggacaccgugagcgugggcaacacccuguacuacgugaacaagcaggagggcaagagccuguacgugaagggcgagcccaucaucaacuucuacgacccccugguguuccccagcgacgaguucgacgccagcaucagccaggugaacgagaagaucaaccagagccuggccuucaucagaaagagcgacgagcugcugcacaacgugaacgccggcaagagcaccaccaacaucaugaucaccaccaucaucaucgugaucaucgugauccugcugagccugaucgccgugggccugcugcuguacugcaaggccagaagcacccccgugacccugagcaaggaccagcugagcggcaucaacaacaucgccuucagcaacugaggacuaguggaagcauuuuccuggcugauuaaaagaaauuacucagcuauggucaucuguuccuguuagaaggcuaugcagcauauuauauacuaugcgcauguuaugaaaugcauaauaaaaaauuuuaaaaaaucuaaaagaucuaaaaaaaaaaaaaaaaaaaaaaaaaaaaaaaaaaaaaaaaaaaaaaaaaaaaaaaaaaaaaaaaugcaucccccccccccccccccccccccccccccccaaaggcucuuuucagagccaccagaauu

SEQ ID NO: 4016 - RNA, 2057 nt, Artificial Sequence
  mRNA product Design d-5 comprising derived and/or modified sequence from HRSV(A2)__F_DSCav1_mut0 (opt5)
gggagagggcgcuuggcuugcaaggacccugagcugcggcauugaagcacacccaacccaacucgacugaagucagccucacugaaccggaucugagaaucuucucucucugggcuugccagggcucuccgaaccuagcuagcauccucuucaauuccaacuagaaagcuuaccauggagcugcucauccugaaggccaacgcuauuaccacaauccuuacggccgugaccuucugcuuugcgagcggccagaauauuacagaagaguucuaccaauccaccuguucugcugucagcaaaggguaucuguccgcccucagaacaggaugguacaccucuguuaucacaauugaacugagcaacaucaaggagaauaaaugcaacggcaccgacgccaaggugaaacuuaucaagcaggaacuggauaaguauaaaaaugcugugacggagcuccagcugcugaugcaguccacccccgccacagggucuggaagcgcuauugccuccggcgucgcgguguguaagguucuccaccuggagggggaagugaacaaaaucaagagcgcccuucugucuaccaauaaagcugucgugucccucagcaacggaguuucugugcugacauuuaagguccuugaccugaagaauuacauugauaaacaacuccugccuauccugaacaagcaguccugcagcauuucuaauaucgagaccgugauugaguuccagcagaaaaacaaucggcuccuggaaaucacgcgcgaguuuuccgugaacgccggcgucacaaccccgguuagcacauauaugcuuaccaauuccgaacugcucucucugaucaacgacaugcccauuaccaacgaucaaaagaaacuuaugagcaauaacgugcagaucgugagacagcaguccuacagcauuauguguaucauuaaggaggaaguccuggcuuaugugguucaacucccucuguacggcgugaucgacacacccugcuggaaacugcauacgucuccucucuguaccacaaauaccaaggagggguccaacaucugccugacacggaccgaucgcggaugguacugugacaaugccggcagcgucucuuucuuuccccaggcggaaacgugcaaggugcagagcaacagaguuuucugugauacaaugaacuccagaacccugccuucugaggugaaucucugcaaugucgacauuuuuaacccgaaauaugauugcaagaucaugaccagcaaaacagacguguccagcucugucauuaccucccugggggccaucgugagcuguuacggaaagacaaaaugcacggcuucuaauaagaaccggggcauuaucaagaccuucuccaaugggugugauuauguuagcaacaaaggaguggacacagucuccgugggcaauacccuuuacuauguuaacaagcaagagggcaaaucucuguacgugaagggggaacccaucauuaacuuuuaugacccucucgucuuccccagcgaugaguuugacgccuccaucucucaggugaaugagaaaauuaaccagagccuggcuuucauccgcaaguccgaugaacugcuccacaaugugaacgccggaaagagcacaaccaauauuaugaucacgaccauuaucaucguuauuaucgucauucugcuuucucugaucgccgugggccuccugcuguacugcaaagcuagauccacaccugugacccuuagcaaggaccagcucucugggauuaacaauaucgcguucuccaacugaggacuaguggaagcauuuuccuggcugauuaaaagaaauuacucagcuauggucaucuguuccuguuagaaggcuaugcagcauauuauauacuaugcgcauguuaugaaaugcauaauaaaaaauuuuaaaaaaucuaaaagaucuaaaaaaaaaaaaaaaaaaaaaaaaaaaaaaaaaaaaaaaaaaaaaaaaaaaaaaaaaaaaaaaaugcaucccccccccccccccccccccccccccccccaaaggcucuuuucagagccaccagaauu

SEQ ID NO: 4017 - RNA, 2057 nt, Artificial Sequence
  mRNA product Design d-5 comprising derived and/or modified sequence from HRSV(A2)__F_DSCav1_mut0 (opt6)
gggagagggcgcuuggcuugcaaggacccugagcugcggcauugaagcacacccaacccaacucgacugaagucagccucacugaaccggaucugagaaucuucucucucugggcuugccagggcucuccgaaccuagcuagcauccucuucaauuccaacuagaaagcuuaccauggaacuacuaauacuaaaagccaaugcaauaacaaccauacuaaccgccguaacauuuuguuucgcaucaggucaaaacauaaccgaagaauuuuaucaaucaacaugcucagcaguaucaaaaggauacuuauccgcucuaagaacaggaugguacacaaguguaauuacaauagagcucucaaacauaaaagaaaacaaaugcaauggaacugacgcaaaaguuaaacuuauaaaacaagaacuagauaaauauaaaaaugcaguaaccgaauuacaacuccuaaugcaauccacaccugcuaccgguuccggaucagccauagcaucuggaguagccguaugcaaaguccuccaccuagaaggagaaguaaauaaaaucaaaucagcacuauuaucuaccaauaaagcaguugucucacuauccaauggcguaucaguacuaacauucaaaguauuagaccuuaaaaacuacauagacaaacaacuauuaccaauucugaacaaacaauccuguucaauaucaaacaucgaaacgguaauagaauuucaacaaaaaaauaacagauuacuugaaauaacaagagaauuuucaguaaaugcaggaguuacaacacccgucuccaccuacaugcucacaaauucagaauuauuaucacuuauaaacgacaugccaauaacuaacgaccaaaaaaaacuaaugucaaacaauguccaaauaguccgacaacaauccuacucaauaaugugcauuauaaaagaagaaguccuagccuacguuguccaacuacccuuauauggaguaauagauaccccaugcuggaaacuucauaccuccccccuaugcacaacaaacacaaaagaaggcucaaacaucugcuuaacacguacagaccgagguugguacugugauaacgcaggauccguaucauuuuucccacaagcagaaacaugcaaaguacaaucaaaccgcguuuuuugugacaccaugaacagcagaacccucccuucagaaguaaaccuaugcaacgucgauauauuuaacccaaaauacgauugcaaaauaaugacaucaaaaaccgaugucucaucuucaguaauaaccucucuaggagcaauagucucauguuacggaaaaacaaaaugcacagcaaguaauaaaaauagaggaauaauaaaaacauucucuaauggcugcgacuacguauccaauaaaggcguugacacaguauccguaggcaacacacucuacuauguuaacaaacaagaaggaaaaaguuuauacguuaaaggagaaccaauuauaaacuuuuacgacccacucguauucccaucugaugaauuugacgcaucaaucucacaaguaaaugaaaaaaucaaucagucccuugccuuuauaagaaaaucagaugaacuuuuacacaacguuaacgccggaaaaucaacaaccaauauaaugaucacaaccauaauaauaguuauaauuguaauuuuauuauccuuaauagccgucggacuacuacuauacugcaaagcaagaucuacacccguaacccuaucaaaagaccaacuaaguggaauaaauaacauugcauucucaaauuaaggacuaguggaagcauuuuccuggcugauuaaaagaaauuacucagcuauggucaucuguuccuguuagaaggcuaugcagcauauuauauacuaugcgcauguuaugaaaugcauaauaaaaaauuuuaaaaaaucuaaaagaucuaaaaaaaaaaaaaaaaaaaaaaaaaaaaaaaaaaaaaaaaaaaaaaaaaaaaaaaaaaaaaaaaugcaucccccccccccccccccccccccccccccccaaaggcucuuuucagagccaccagaauu

SEQ ID NO: 4018 - RNA, 2057 nt, Artificial Sequence
  mRNA product Design d-5 comprising derived and/or modified sequence from HRSV(A2)__F_DSCav1_mut0 (opt11)
gggagagggcgcuuggcuugcaaggacccugagcugcggcauugaagcacacccaacccaacucgacugaagucagccucacugaaccggaucugagaaucuucucucucugggcuugccagggcucuccgaaccuagcuagcauccucuucaauuccaacuagaaagcuuaccauggaacuccuaauacuaaaggcaaacgcaaucacuacaauucuaaccgccgugacauucugcuucgccuccggacaaaacaucaccgaagaauuuuaccaauccacaugcucggccgucaguaaaggcuaccucucggcucuccgaaccggcugguacaccuccgucaucaccaucgaacucuccaacaucaaagaaaacaaaugcaacggcaccgacgccaaagucaaacuaaucaaacaagaacucgacaaauacaaaaacgccgucacagaacuccaacuacuaaugcaaucaacacccgcuacaggaagcggcuccgccaucgccagcggcguagcugucugcaaaguccuccaccucgaaggugaagucaacaaaaucaaaucagcccuacucagcacaaacaaagccguuguaagccuauccaacggcgucuccguacuaacauucaaaguccuugaccucaagaacuacaucgacaaacaacuucucccaauccuaaacaaacaaagcugcucaauuuccaacaucgaaacaguaaucgaauuucaacaaaaaaacaaccgacuccucgaaaucacccgcgaauuuuccguuaacgccggcguuacaacccccgucuccaccuacaugcucaccaauuccgaacuacuaucacucauaaacgacaugccuaucacaaacgaccaaaaaaaacuaaugucaaacaauguccaaaucguccgccagcaaagcuauuccaucaugugcaucaucaaagaggaaguccucgccuacguaguccaacugccccucuacggcgucauugauacccccugcuggaaacuccacaccuccccccucugcaccacaaacaccaaagaagguuccaacaucugccuaacacgaaccgacagaggcugguacugcgacaacgccggcagcgucuccuucuucccccaagcagaaaccuguaaaguccagucuaaccgcgucuucugcgacacaaugaacucaagaacccuaccuuccgaaguaaaccucugcaacguagacaucuucaacccuaaauacgacugcaaaaucaugacuucaaaaacagacguaagcucuuccguaaucacuucccucggcgccaucguauccugcuacgguaaaaccaaaugcaccgccuccaacaaaaaccgagggaucauaaaaaccuucuccaacggcugcgacuacguaucuaacaaaggcgucgacaccgucuccgucggcaacacccucuauuacguaaacaaacaagagggcaaaucacuauacgucaaaggcgagccaaucauaaacuucuaugacccacucgucuucccuucagacgaauuugaugccagcaucagccaagucaacgaaaaaaucaaccaaucacucgccuucauccgcaaaagcgacgaacuccuucacaacgucaacgcaggcaaaucaaccaccaacaucaugaucaccaccaucaucaucgucaucaucguuauccuacucagccucaucgcaguuggucuucuccuuuacugcaaagcccgcuccacccccgucacccucaguaaagaccaacucagcggaaucaacaacauagcauucuccaacuaaggacuaguggaagcauuuuccuggcugauuaaaagaaauuacucagcuauggucaucuguuccuguuagaaggcuaugcagcauauuauauacuaugcgcauguuaugaaaugcauaauaaaaaauuuuaaaaaaucuaaaagaucuaaaaaaaaaaaaaaaaaaaaaaaaaaaaaaaaaaaaaaaaaaaaaaaaaaaaaaaaaaaaaaaaugcaucccccccccccccccccccccccccccccccaaaggcucuuuucagagccaccagaauu

SEQ ID NO: 4019 - RNA, 1937 nt, Artificial Sequence
  mRNA product Design e-1 comprising derived and/or modified sequence from HRSV(A2)__F_DSCav1_mut0 (opt1)
gggagaauauaagcguuggcggagcgucgguuguagcacucugcgcgcccgcucuucugcugcuguuugucuacuuccuccugcuuccccgccgccgccgccgccaucaagcuuaccauggagcugcucauccugaaggccaacgccaucaccaccauccugacggcggugaccuucugcuucgccagcggccagaacaucaccgaggaguucuaccaguccacgugcagcgccgucuccaagggguaccucagcgcccugcggaccggcugguacaccuccgugaucaccaucgagcugagcaacaucaaggagaacaagugcaacgggaccgacgccaaggugaagcucaucaagcaggagcuggacaaguacaagaacgcggucacggagcugcagcuccugaugcaguccaccccggcaaccggcuccggcuccgccaucgcgagcggcgucgccgugugcaaggugcugcaccucgagggggaggucaacaagaucaagagcgcccugcuguccaccaacaaggccguggugagccucuccaacggcgucagcgugcugaccuucaaggugcuggaccucaagaacuacaucgacaagcagcugcugcccauccugaacaagcagagcugcuccaucagcaacaucgagacggugaucgaguuccagcagaagaacaaccggcuccuggagaucacccgcgaguucagcgugaacgccggggucaccacccccguguccacguacaugcugaccaacagcgagcuccugucccugaucaacgacaugccgaucaccaacgaccagaagaagcucaugagcaacaacgugcagaucguccggcagcaguccuacagcaucaugugcaucaucaaggaggaggugcuggcguacgugguccagcugccccucuacggcgugaucgacacccccugcuggaagcugcacacgagcccccugugcaccaccaacaccaaggagggguccaacaucugccucacgcgcaccgaccggggcugguacugcgacaacgccggcagcgucuccuucuucccgcaggccgagaccugcaaggugcagagcaaccgcguguucugcgacaccaugaacucccggacgcugcccagcgagguaaaccucugcaacgucgacaucuucaaccccaaguacgacugcaagaucaugaccuccaagaccgacgugagcuccagcgugaucaccucccugggggccaucgucagcugcuacggcaagacgaagugcaccgccagcaacaagaaccgggggaucaucaagaccuucuccaacggcugcgacuacgugagcaacaagggcguggacaccguguccgucgggaacacccuguacuacgugaacaagcaggagggcaagagccucuacgugaagggggagcccaucaucaacuucuacgacccgcuggucuuccccuccgacgaguucgacgcgagcaucucccaggugaacgagaagaucaaccagagccuggccuucauccgcaaguccgacgagcugcuccacaacgugaacgccggcaagagcacgaccaacaucaugaucaccaccaucaucaucgucaucaucgugauccugcugucccucaucgccguggggcugcugcucuacugcaaggcccggagcacgcccgucacccuguccaaggaccagcugagcggcaucaacaacaucgcguucuccaacugaggacuaguguccaccugucccuccugggcugcuggauugucucguuuuccugccaaauaaacaggaucagcgcuuuacagaucuaaaaaaaaaaaaaaaaaaaaaaaaaaaaaaaaaaaaaaaaaaaaaaaaaaaaaaaaaaaaaaaaugcaucccccccccccccccccccccccccccccccaaaggcucuuuucagagccaccagaauu

SEQ ID NO: 4020 - RNA, 1937 nt, Artificial Sequence
  mRNA product Design e-1 comprising derived and/or modified sequence from HRSV(A2)__F_DSCav1_mut0 (opt1)
gggagaauauaagcguuggcggagcgucgguuguagcacucugcgcgcccgcucuucugcugcuguuugucuacuuccuccugcuuccccgccgccgccgccgccaucaagcuuaccauggagcugcucauccugaaggccaacgccaucaccaccauccugacggcggugaccuucugcuucgccagcggccagaacaucaccgaggaguucuaccaguccacgugcagcgccgucuccaagggguaccucagcgcccugcgcaccggcugguacaccuccgugaucaccaucgagcugagcaacaucaaggagaacaagugcaacgggaccgacgccaaggugaagcucaucaagcaggagcuggacaaguacaagaacgcggucacggagcugcagcuccugaugcaguccacccccgccaccggcagcggguccgccaucgccagcggcguggcggugugcaagguccugcaccucgagggcgaggugaacaagaucaaguccgcccugcugagcaccaacaaggccguggucucccucagcaacgggguguccgugcugacguucaagguccuggaccucaagaacuacaucgacaagcagcugcugccgauccucaacaagcagagcugcuccaucagcaacaucgagaccgugaucgaguuccagcagaagaacaaccggcugcuggagaucacccgcgaguucuccgugaacgccggcgucaccacgcccgugagcaccuacaugcucaccaacagcgagcugcugucccucaucaacgacaugcccaucaccaacgaccagaagaagcugaugagcaacaacgugcagaucguccggcagcaguccuacagcaucaugugcaucaucaaggaggaggugcuggccuacgugguccagcucccccuguacggggugaucgacacgccgugcuggaagcugcacaccagcccccucugcaccaccaacacgaaggagggcuccaacaucugccugacccgcaccgaccgggggugguacugcgacaacgcgggcuccgugagcuucuucccccaggccgagaccugcaagguccaguccaaccgcguguucugcgacacgaugaacagccggacccuccccuccgaggucaaccugugcaacguggacaucuucaacccgaaguacgacugcaagaucaugaccagcaagaccgacguguccagcuccgucaucacgagccugggcgccaucguguccugcuacgggaagaccaagugcaccgccagcaacaagaaccggggcaucaucaagaccuucuccaacgggugcgacuacgugagcaacaagggcgucgacacggugagcgugggcaacacccucuacuacgucaacaagcaggaggggaagucccuguacgugaagggcgagcccaucaucaacuucuacgacccccugguguuccccagcgacgaguucgacgccuccaucagccaggucaacgagaagaucaaccagucccucgcguucauccgcaagagcgacgagcugcugcacaacgugaacgccgggaaguccaccaccaacaucaugaucaccacgaucaucaucgugaucaucgucauccuccugagccugaucgccgugggccuccugcuguacugcaaggcccgguccaccccggugacccugagcaaggaccagcucuccgggaucaacaacaucgccuucagcaacugaggacuaguguccaccugucccuccugggcugcuggauugucucguuuuccugccaaauaaacaggaucagcgcuuuacagaucuaaaaaaaaaaaaaaaaaaaaaaaaaaaaaaaaaaaaaaaaaaaaaaaaaaaaaaaaaaaaaaaaugcaucccccccccccccccccccccccccccccccaaaggcucuuuucagagccaccagaauu

SEQ ID NO: 4021 - RNA, 1937 nt, Artificial Sequence
  mRNA product Design e-1 comprising derived and/or modified sequence from HRSV(A2)__F_DSCav1_mut0 (opt2)
gggagaauauaagcguuggcggagcgucgguuguagcacucugcgcgcccgcucuucugcugcuguuugucuacuuccuccugcuuccccgccgccgccgccgccaucaagcuuaccauggagcuccucauccucaaggccaacgccaucaccaccauccucaccgccgucaccuucugcuucgccuccggccagaacaucaccgaggaguucuaccaguccaccugcuccgccgucuccaagggcuaccucuccgcccuccgcaccggcugguacaccuccgucaucaccaucgagcucuccaacaucaaggagaacaagugcaacggcaccgacgccaaggucaagcucaucaagcaggagcucgacaaguacaagaacgccgucaccgagcuccagcuccucaugcaguccacccccgccaccggcuccggcuccgccaucgccuccggcgucgccgucugcaagguccuccaccucgagggcgaggucaacaagaucaaguccgcccuccucuccaccaacaaggccgucgucucccucuccaacggcgucuccguccucaccuucaagguccucgaccucaagaacuacaucgacaagcagcuccuccccauccucaacaagcaguccugcuccaucuccaacaucgagaccgucaucgaguuccagcagaagaacaaccgccuccucgagaucacccgcgaguucuccgucaacgccggcgucaccacccccgucuccaccuacaugcucaccaacuccgagcuccucucccucaucaacgacaugcccaucaccaacgaccagaagaagcucauguccaacaacguccagaucguccgccagcaguccuacuccaucaugugcaucaucaaggaggagguccucgccuacgucguccagcucccccucuacggcgucaucgacacccccugcuggaagcuccacaccuccccccucugcaccaccaacaccaaggagggcuccaacaucugccucacccgcaccgaccgcggcugguacugcgacaacgccggcuccgucuccuucuucccccaggccgagaccugcaagguccaguccaaccgcgucuucugcgacaccaugaacucccgcacccuccccuccgaggucaaccucugcaacgucgacaucuucaaccccaaguacgacugcaagaucaugaccuccaagaccgacgucuccuccuccgucaucaccucccucggcgccaucgucuccugcuacggcaagaccaagugcaccgccuccaacaagaaccgcggcaucaucaagaccuucuccaacggcugcgacuacgucuccaacaagggcgucgacaccgucuccgucggcaacacccucuacuacgucaacaagcaggagggcaagucccucuacgucaagggcgagcccaucaucaacuucuacgacccccucgucuuccccuccgacgaguucgacgccuccaucucccaggucaacgagaagaucaaccagucccucgccuucauccgcaaguccgacgagcuccuccacaacgucaacgccggcaaguccaccaccaacaucaugaucaccaccaucaucaucgucaucaucgucauccuccucucccucaucgccgucggccuccuccucuacugcaaggcccgcuccacccccgucacccucuccaaggaccagcucuccggcaucaacaacaucgccuucuccaacugaggacuaguguccaccugucccuccugggcugcuggauugucucguuuuccugccaaauaaacaggaucagcgcuuuacagaucuaaaaaaaaaaaaaaaaaaaaaaaaaaaaaaaaaaaaaaaaaaaaaaaaaaaaaaaaaaaaaaaaugcaucccccccccccccccccccccccccccccccaaaggcucuuuucagagccaccagaauu

SEQ ID NO: 4022 - RNA, 1937 nt, Artificial Sequence
  mRNA product Design e-1 comprising derived and/or modified sequence from HRSV(A2)__F_DSCav1_mut0 (opt3)
gggagaauauaagcguuggcggagcgucgguuguagcacucugcgcgcccgcucuucugcugcuguuugucuacuuccuccugcuuccccgccgccgccgccgccaucaagcuuaccauggagcugcucauccuuaaggccaacgcuauuaccacaauacugacugcagugacguucugcuuugccagcggccagaauaucaccgaagaguucuaccaauccacauguucugcggucucaaaaggguauuugagugcuuuaagaacuggaugguacaccagcguuauuacaaucgaacuguccaacauuaaggagaauaaaugcaacgguaccgacgccaaggugaaacuaaucaagcaggaacucgauaaguauaaaaaugcaguaacugagcugcagcuucugaugcagucuacacccgccaccggcucggggucagcuauagcaagcggaguggccgucuguaagguguugcaccucgagggcgaaguuaacaaaaucaagagugcucugcuguccacgaauaaagccguggucucucucagcaacgguguguccguauuaacuuuuaagguucuggaccuuaagaauuacauugauaaacaauugcugccuauccuaaacaagcagucaugcaguauuagcaauaucgagaccgugauagaguuccagcagaaaaacaauaggcuccuggaaauuacacgggaguuuucugucaacgcgggggugacuaccccaguguccacauauaugcuuaccaauucagaacuguugagccucaucaacgacaugccgauuacgaacgaucaaaagaaacugaugaguaauaacguccagaucguucgccagcagucuuacuccaucauguguauuauaaaggaggaaguguuagcauauguagugcaacugccccucuacggagucaucgacacuccuugcuggaaacuucauacaagcccacuguguaccacuaauacaaaggagggcucgaacauuugcuugacccgaacggaucguggcugguacugugacaaugccgggucuguguccuucuuuccccaggcugaaaccugcaagguucagucaaacagaguguucugugauacaaugaauaguagaacucugccuagcgaggucaaccucugcaauguggacaucuuuaacccaaaauaugauugcaagauaaugaccuccaaaacagacguaucuagcucaguuauuaccagucugggagccaucguguccuguuacgguaagacuaaaugcacagcaagcaauaagaacaggggcaucauuaagaccuucucuaaugggugugauuaugucucaaacaaaggaguggacacugucagugugggcaauacgcuuuacuauguuaacaagcaagaggguaaaagccuguacgugaagggggaacccaucauuaacuuuuaugacccuuugguauucccauccgaugaguuugacgcuucuauaucgcaggucaaugagaaaaucaaccagagccucgccuucauucggaaguccgaugaacuguuacacaaugugaacgcgggaaagucaacaaccaauaucaugaucacuaccauuauaaucguuauuaucgugauucugcuaagucucaucgccgucggccugcuuuuguacugcaaagcacgcucuacaccggugacccugagcaaggaccagcucuccggcauaaacaauaucgcuuucucaaacugaggacuaguguccaccugucccuccugggcugcuggauugucucguuuuccugccaaauaaacaggaucagcgcuuuacagaucuaaaaaaaaaaaaaaaaaaaaaaaaaaaaaaaaaaaaaaaaaaaaaaaaaaaaaaaaaaaaaaaaugcaucccccccccccccccccccccccccccccccaaaggcucuuuucagagccaccagaauu

SEQ ID NO: 4023 - RNA, 1937 nt, Artificial Sequence
  mRNA product Design e-1 comprising derived and/or modified sequence from HRSV(A2)__F_DSCav1_mut0 (opt4)
gggagaauauaagcguuggcggagcgucgguuguagcacucugcgcgcccgcucuucugcugcuguuugucuacuuccuccugcuuccccgccgccgccgccgccaucaagcuuaccauggagcugcugauccugaaggccaacgccaucaccaccauccugaccgccgugaccuucugcuucgccagcggccagaacaucaccgaggaguucuaccagagcaccugcagcgccgugagcaagggcuaccugagcgcccugagaaccggcugguacaccagcgugaucaccaucgagcugagcaacaucaaggagaacaagugcaacggcaccgacgccaaggugaagcugaucaagcaggagcuggacaaguacaagaacgccgugaccgagcugcagcugcugaugcagagcacccccgccaccggcagcggcagcgccaucgccagcggcguggccgugugcaaggugcugcaccuggagggcgaggugaacaagaucaagagcgcccugcugagcaccaacaaggccguggugagccugagcaacggcgugagcgugcugaccuucaaggugcuggaccugaagaacuacaucgacaagcagcugcugcccauccugaacaagcagagcugcagcaucagcaacaucgagaccgugaucgaguuccagcagaagaacaacagacugcuggagaucaccagagaguucagcgugaacgccggcgugaccacccccgugagcaccuacaugcugaccaacagcgagcugcugagccugaucaacgacaugcccaucaccaacgaccagaagaagcugaugagcaacaacgugcagaucgugagacagcagagcuacagcaucaugugcaucaucaaggaggaggugcuggccuacguggugcagcugccccuguacggcgugaucgacacccccugcuggaagcugcacaccagcccccugugcaccaccaacaccaaggagggcagcaacaucugccugaccagaaccgacagaggcugguacugcgacaacgccggcagcgugagcuucuucccccaggccgagaccugcaaggugcagagcaacagaguguucugcgacaccaugaacagcagaacccugcccagcgaggugaaccugugcaacguggacaucuucaaccccaaguacgacugcaagaucaugaccagcaagaccgacgugagcagcagcgugaucaccagccugggcgccaucgugagcugcuacggcaagaccaagugcaccgccagcaacaagaacagaggcaucaucaagaccuucagcaacggcugcgacuacgugagcaacaagggcguggacaccgugagcgugggcaacacccuguacuacgugaacaagcaggagggcaagagccuguacgugaagggcgagcccaucaucaacuucuacgacccccugguguuccccagcgacgaguucgacgccagcaucagccaggugaacgagaagaucaaccagagccuggccuucaucagaaagagcgacgagcugcugcacaacgugaacgccggcaagagcaccaccaacaucaugaucaccaccaucaucaucgugaucaucgugauccugcugagccugaucgccgugggccugcugcuguacugcaaggccagaagcacccccgugacccugagcaaggaccagcugagcggcaucaacaacaucgccuucagcaacugaggacuaguguccaccugucccuccugggcugcuggauugucucguuuuccugccaaauaaacaggaucagcgcuuuacagaucuaaaaaaaaaaaaaaaaaaaaaaaaaaaaaaaaaaaaaaaaaaaaaaaaaaaaaaaaaaaaaaaaugcaucccccccccccccccccccccccccccccccaaaggcucuuuucagagccaccagaauu

SEQ ID NO: 4024 - RNA, 1937 nt, Artificial Sequence
  mRNA product Design e-1 comprising derived and/or modified sequence from HRSV(A2)__F_DSCav1_mut0 (opt5)
gggagaauauaagcguuggcggagcgucgguuguagcacucugcgcgcccgcucuucugcugcuguuugucuacuuccuccugcuuccccgccgccgccgccgccaucaagcuuaccauggagcugcucauccugaaggccaacgcuauuaccacaauccuuacggccgugaccuucugcuuugcgagcggccagaauauuacagaagaguucuaccaauccaccuguucugcugucagcaaaggguaucuguccgcccucagaacaggaugguacaccucuguuaucacaauugaacugagcaacaucaaggagaauaaaugcaacggcaccgacgccaaggugaaacuuaucaagcaggaacuggauaaguauaaaaaugcugugacggagcuccagcugcugaugcaguccacccccgccacagggucuggaagcgcuauugccuccggcgucgcgguguguaagguucuccaccuggagggggaagugaacaaaaucaagagcgcccuucugucuaccaauaaagcugucgugucccucagcaacggaguuucugugcugacauuuaagguccuugaccugaagaauuacauugauaaacaacuccugccuauccugaacaagcaguccugcagcauuucuaauaucgagaccgugauugaguuccagcagaaaaacaaucggcuccuggaaaucacgcgcgaguuuuccgugaacgccggcgucacaaccccgguuagcacauauaugcuuaccaauuccgaacugcucucucugaucaacgacaugcccauuaccaacgaucaaaagaaacuuaugagcaauaacgugcagaucgugagacagcaguccuacagcauuauguguaucauuaaggaggaaguccuggcuuaugugguucaacucccucuguacggcgugaucgacacacccugcuggaaacugcauacgucuccucucuguaccacaaauaccaaggagggguccaacaucugccugacacggaccgaucgcggaugguacugugacaaugccggcagcgucucuuucuuuccccaggcggaaacgugcaaggugcagagcaacagaguuuucugugauacaaugaacuccagaacccugccuucugaggugaaucucugcaaugucgacauuuuuaacccgaaauaugauugcaagaucaugaccagcaaaacagacguguccagcucugucauuaccucccugggggccaucgugagcuguuacggaaagacaaaaugcacggcuucuaauaagaaccggggcauuaucaagaccuucuccaaugggugugauuauguuagcaacaaaggaguggacacagucuccgugggcaauacccuuuacuauguuaacaagcaagagggcaaaucucuguacgugaagggggaacccaucauuaacuuuuaugacccucucgucuuccccagcgaugaguuugacgccuccaucucucaggugaaugagaaaauuaaccagagccuggcuuucauccgcaaguccgaugaacugcuccacaaugugaacgccggaaagagcacaaccaauauuaugaucacgaccauuaucaucguuauuaucgucauucugcuuucucugaucgccgugggccuccugcuguacugcaaagcuagauccacaccugugacccuuagcaaggaccagcucucugggauuaacaauaucgcguucuccaacugaggacuaguguccaccugucccuccugggcugcuggauugucucguuuuccugccaaauaaacaggaucagcgcuuuacagaucuaaaaaaaaaaaaaaaaaaaaaaaaaaaaaaaaaaaaaaaaaaaaaaaaaaaaaaaaaaaaaaaaugcaucccccccccccccccccccccccccccccccaaaggcucuuuucagagccaccagaauu

SEQ ID NO: 4025 - RNA, 1937 nt, Artificial Sequence
  mRNA product Design e-1 comprising derived and/or modified sequence from HRSV(A2)__F_DSCav1_mut0 (opt6)
gggagaauauaagcguuggcggagcgucgguuguagcacucugcgcgcccgcucuucugcugcuguuugucuacuuccuccugcuuccccgccgccgccgccgccaucaagcuuaccauggaacuacuaauacuaaaagccaaugcaauaacaaccauacuaaccgccguaacauuuuguuucgcaucaggucaaaacauaaccgaagaauuuuaucaaucaacaugcucagcaguaucaaaaggauacuuauccgcucuaagaacaggaugguacacaaguguaauuacaauagagcucucaaacauaaaagaaaacaaaugcaauggaacugacgcaaaaguuaaacuuauaaaacaagaacuagauaaauauaaaaaugcaguaaccgaauuacaacuccuaaugcaauccacaccugcuaccgguuccggaucagccauagcaucuggaguagccguaugcaaaguccuccaccuagaaggagaaguaaauaaaaucaaaucagcacuauuaucuaccaauaaagcaguugucucacuauccaauggcguaucaguacuaacauucaaaguauuagaccuuaaaaacuacauagacaaacaacuauuaccaauucugaacaaacaauccuguucaauaucaaacaucgaaacgguaauagaauuucaacaaaaaaauaacagauuacuugaaauaacaagagaauuuucaguaaaugcaggaguuacaacacccgucuccaccuacaugcucacaaauucagaauuauuaucacuuauaaacgacaugccaauaacuaacgaccaaaaaaaacuaaugucaaacaauguccaaauaguccgacaacaauccuacucaauaaugugcauuauaaaagaagaaguccuagccuacguuguccaacuacccuuauauggaguaauagauaccccaugcuggaaacuucauaccuccccccuaugcacaacaaacacaaaagaaggcucaaacaucugcuuaacacguacagaccgagguugguacugugauaacgcaggauccguaucauuuuucccacaagcagaaacaugcaaaguacaaucaaaccgcguuuuuugugacaccaugaacagcagaacccucccuucagaaguaaaccuaugcaacgucgauauauuuaacccaaaauacgauugcaaaauaaugacaucaaaaaccgaugucucaucuucaguaauaaccucucuaggagcaauagucucauguuacggaaaaacaaaaugcacagcaaguaauaaaaauagaggaauaauaaaaacauucucuaauggcugcgacuacguauccaauaaaggcguugacacaguauccguaggcaacacacucuacuauguuaacaaacaagaaggaaaaaguuuauacguuaaaggagaaccaauuauaaacuuuuacgacccacucguauucccaucugaugaauuugacgcaucaaucucacaaguaaaugaaaaaaucaaucagucccuugccuuuauaagaaaaucagaugaacuuuuacacaacguuaacgccggaaaaucaacaaccaauauaaugaucacaaccauaauaauaguuauaauuguaauuuuauuauccuuaauagccgucggacuacuacuauacugcaaagcaagaucuacacccguaacccuaucaaaagaccaacuaaguggaauaaauaacauugcauucucaaauuaaggacuaguguccaccugucccuccugggcugcuggauugucucguuuuccugccaaauaaacaggaucagcgcuuuacagaucuaaaaaaaaaaaaaaaaaaaaaaaaaaaaaaaaaaaaaaaaaaaaaaaaaaaaaaaaaaaaaaaaugcaucccccccccccccccccccccccccccccccaaaggcucuuuucagagccaccagaauu

SEQ ID NO: 4026 - RNA, 1937 nt, Artificial Sequence
  mRNA product Design e-1 comprising derived and/or modified sequence from HRSV(A2)__F_DSCav1_mut0 (opt11)
gggagaauauaagcguuggcggagcgucgguuguagcacucugcgcgcccgcucuucugcugcuguuugucuacuuccuccugcuuccccgccgccgccgccgccaucaagcuuaccauggaacuccuaauacuaaaggcaaacgcaaucacuacaauucuaaccgccgugacauucugcuucgccuccggacaaaacaucaccgaagaauuuuaccaauccacaugcucggccgucaguaaaggcuaccucucggcucuccgaaccggcugguacaccuccgucaucaccaucgaacucuccaacaucaaagaaaacaaaugcaacggcaccgacgccaaagucaaacuaaucaaacaagaacucgacaaauacaaaaacgccgucacagaacuccaacuacuaaugcaaucaacacccgcuacaggaagcggcuccgccaucgccagcggcguagcugucugcaaaguccuccaccucgaaggugaagucaacaaaaucaaaucagcccuacucagcacaaacaaagccguuguaagccuauccaacggcgucuccguacuaacauucaaaguccuugaccucaagaacuacaucgacaaacaacuucucccaauccuaaacaaacaaagcugcucaauuuccaacaucgaaacaguaaucgaauuucaacaaaaaaacaaccgacuccucgaaaucacccgcgaauuuuccguuaacgccggcguuacaacccccgucuccaccuacaugcucaccaauuccgaacuacuaucacucauaaacgacaugccuaucacaaacgaccaaaaaaaacuaaugucaaacaauguccaaaucguccgccagcaaagcuauuccaucaugugcaucaucaaagaggaaguccucgccuacguaguccaacugccccucuacggcgucauugauacccccugcuggaaacuccacaccuccccccucugcaccacaaacaccaaagaagguuccaacaucugccuaacacgaaccgacagaggcugguacugcgacaacgccggcagcgucuccuucuucccccaagcagaaaccuguaaaguccagucuaaccgcgucuucugcgacacaaugaacucaagaacccuaccuuccgaaguaaaccucugcaacguagacaucuucaacccuaaauacgacugcaaaaucaugacuucaaaaacagacguaagcucuuccguaaucacuucccucggcgccaucguauccugcuacgguaaaaccaaaugcaccgccuccaacaaaaaccgagggaucauaaaaaccuucuccaacggcugcgacuacguaucuaacaaaggcgucgacaccgucuccgucggcaacacccucuauuacguaaacaaacaagagggcaaaucacuauacgucaaaggcgagccaaucauaaacuucuaugacccacucgucuucccuucagacgaauuugaugccagcaucagccaagucaacgaaaaaaucaaccaaucacucgccuucauccgcaaaagcgacgaacuccuucacaacgucaacgcaggcaaaucaaccaccaacaucaugaucaccaccaucaucaucgucaucaucguuauccuacucagccucaucgcaguuggucuucuccuuuacugcaaagcccgcuccacccccgucacccucaguaaagaccaacucagcggaaucaacaacauagcauucuccaacuaaggacuaguguccaccugucccuccugggcugcuggauugucucguuuuccugccaaauaaacaggaucagcgcuuuacagaucuaaaaaaaaaaaaaaaaaaaaaaaaaaaaaaaaaaaaaaaaaaaaaaaaaaaaaaaaaaaaaaaaugcaucccccccccccccccccccccccccccccccaaaggcucuuuucagagccaccagaauu

SEQ ID NO: 4027 - RNA, 1919 nt, Artificial Sequence
  mRNA product Design e-2 comprising derived and/or modified sequence from HRSV(A2)__F_DSCav1_mut0 (opt1)
gggagacccgugacccggaaguuguacggcuacgcgacuuucccucccacaaacccucgcgcccuuccuuuccuacuugggcccggcagaaagcuuaccauggagcugcucauccugaaggccaacgccaucaccaccauccugacggcggugaccuucugcuucgccagcggccagaacaucaccgaggaguucuaccaguccacgugcagcgccgucuccaagggguaccucagcgcccugcggaccggcugguacaccuccgugaucaccaucgagcugagcaacaucaaggagaacaagugcaacgggaccgacgccaaggugaagcucaucaagcaggagcuggacaaguacaagaacgcggucacggagcugcagcuccugaugcaguccaccccggcaaccggcuccggcuccgccaucgcgagcggcgucgccgugugcaaggugcugcaccucgagggggaggucaacaagaucaagagcgcccugcuguccaccaacaaggccguggugagccucuccaacggcgucagcgugcugaccuucaaggugcuggaccucaagaacuacaucgacaagcagcugcugcccauccugaacaagcagagcugcuccaucagcaacaucgagacggugaucgaguuccagcagaagaacaaccggcuccuggagaucacccgcgaguucagcgugaacgccggggucaccacccccguguccacguacaugcugaccaacagcgagcuccugucccugaucaacgacaugccgaucaccaacgaccagaagaagcucaugagcaacaacgugcagaucguccggcagcaguccuacagcaucaugugcaucaucaaggaggaggugcuggcguacgugguccagcugccccucuacggcgugaucgacacccccugcuggaagcugcacacgagcccccugugcaccaccaacaccaaggagggguccaacaucugccucacgcgcaccgaccggggcugguacugcgacaacgccggcagcgucuccuucuucccgcaggccgagaccugcaaggugcagagcaaccgcguguucugcgacaccaugaacucccggacgcugcccagcgagguaaaccucugcaacgucgacaucuucaaccccaaguacgacugcaagaucaugaccuccaagaccgacgugagcuccagcgugaucaccucccugggggccaucgucagcugcuacggcaagacgaagugcaccgccagcaacaagaaccgggggaucaucaagaccuucuccaacggcugcgacuacgugagcaacaagggcguggacaccguguccgucgggaacacccuguacuacgugaacaagcaggagggcaagagccucuacgugaagggggagcccaucaucaacuucuacgacccgcuggucuuccccuccgacgaguucgacgcgagcaucucccaggugaacgagaagaucaaccagagccuggccuucauccgcaaguccgacgagcugcuccacaacgugaacgccggcaagagcacgaccaacaucaugaucaccaccaucaucaucgucaucaucgugauccugcugucccucaucgccguggggcugcugcucuacugcaaggcccggagcacgcccgucacccuguccaaggaccagcugagcggcaucaacaacaucgcguucuccaacugaggacuaguguccaccugucccuccugggcugcuggauugucucguuuuccugccaaauaaacaggaucagcgcuuuacagaucuaaaaaaaaaaaaaaaaaaaaaaaaaaaaaaaaaaaaaaaaaaaaaaaaaaaaaaaaaaaaaaaaugcaucccccccccccccccccccccccccccccccaaaggcucuuuucagagccaccagaauu

SEQ ID NO: 4028 - RNA, 1919 nt, Artificial Sequence
  mRNA product Design e-2 comprising derived and/or modified sequence from HRSV(A2)__F_DSCav1_mut0 (opt1)
gggagacccgugacccggaaguuguacggcuacgcgacuuucccucccacaaacccucgcgcccuuccuuuccuacuugggcccggcagaaagcuuaccauggagcugcucauccugaaggccaacgccaucaccaccauccugacggcggugaccuucugcuucgccagcggccagaacaucaccgaggaguucuaccaguccacgugcagcgccgucuccaagggguaccucagcgcccugcgcaccggcugguacaccuccgugaucaccaucgagcugagcaacaucaaggagaacaagugcaacgggaccgacgccaaggugaagcucaucaagcaggagcuggacaaguacaagaacgcggucacggagcugcagcuccugaugcaguccacccccgccaccggcagcggguccgccaucgccagcggcguggcggugugcaagguccugcaccucgagggcgaggugaacaagaucaaguccgcccugcugagcaccaacaaggccguggucucccucagcaacgggguguccgugcugacguucaagguccuggaccucaagaacuacaucgacaagcagcugcugccgauccucaacaagcagagcugcuccaucagcaacaucgagaccgugaucgaguuccagcagaagaacaaccggcugcuggagaucacccgcgaguucuccgugaacgccggcgucaccacgcccgugagcaccuacaugcucaccaacagcgagcugcugucccucaucaacgacaugcccaucaccaacgaccagaagaagcugaugagcaacaacgugcagaucguccggcagcaguccuacagcaucaugugcaucaucaaggaggaggugcuggccuacgugguccagcucccccuguacggggugaucgacacgccgugcuggaagcugcacaccagcccccucugcaccaccaacacgaaggagggcuccaacaucugccugacccgcaccgaccgggggugguacugcgacaacgcgggcuccgugagcuucuucccccaggccgagaccugcaagguccaguccaaccgcguguucugcgacacgaugaacagccggacccuccccuccgaggucaaccugugcaacguggacaucuucaacccgaaguacgacugcaagaucaugaccagcaagaccgacguguccagcuccgucaucacgagccugggcgccaucguguccugcuacgggaagaccaagugcaccgccagcaacaagaaccggggcaucaucaagaccuucuccaacgggugcgacuacgugagcaacaagggcgucgacacggugagcgugggcaacacccucuacuacgucaacaagcaggaggggaagucccuguacgugaagggcgagcccaucaucaacuucuacgacccccugguguuccccagcgacgaguucgacgccuccaucagccaggucaacgagaagaucaaccagucccucgcguucauccgcaagagcgacgagcugcugcacaacgugaacgccgggaaguccaccaccaacaucaugaucaccacgaucaucaucgugaucaucgucauccuccugagccugaucgccgugggccuccugcuguacugcaaggcccgguccaccccggugacccugagcaaggaccagcucuccgggaucaacaacaucgccuucagcaacugaggacuaguguccaccugucccuccugggcugcuggauugucucguuuuccugccaaauaaacaggaucagcgcuuuacagaucuaaaaaaaaaaaaaaaaaaaaaaaaaaaaaaaaaaaaaaaaaaaaaaaaaaaaaaaaaaaaaaaaugcaucccccccccccccccccccccccccccccccaaaggcucuuuucagagccaccagaauu

SEQ ID NO: 4029 - RNA, 1919 nt, Artificial Sequence
  mRNA product Design e-2 comprising derived and/or modified sequence from HRSV(A2)__F_DSCav1_mut0 (opt2)
gggagacccgugacccggaaguuguacggcuacgcgacuuucccucccacaaacccucgcgcccuuccuuuccuacuugggcccggcagaaagcuuaccauggagcuccucauccucaaggccaacgccaucaccaccauccucaccgccgucaccuucugcuucgccuccggccagaacaucaccgaggaguucuaccaguccaccugcuccgccgucuccaagggcuaccucuccgcccuccgcaccggcugguacaccuccgucaucaccaucgagcucuccaacaucaaggagaacaagugcaacggcaccgacgccaaggucaagcucaucaagcaggagcucgacaaguacaagaacgccgucaccgagcuccagcuccucaugcaguccacccccgccaccggcuccggcuccgccaucgccuccggcgucgccgucugcaagguccuccaccucgagggcgaggucaacaagaucaaguccgcccuccucuccaccaacaaggccgucgucucccucuccaacggcgucuccguccucaccuucaagguccucgaccucaagaacuacaucgacaagcagcuccuccccauccucaacaagcaguccugcuccaucuccaacaucgagaccgucaucgaguuccagcagaagaacaaccgccuccucgagaucacccgcgaguucuccgucaacgccggcgucaccacccccgucuccaccuacaugcucaccaacuccgagcuccucucccucaucaacgacaugcccaucaccaacgaccagaagaagcucauguccaacaacguccagaucguccgccagcaguccuacuccaucaugugcaucaucaaggaggagguccucgccuacgucguccagcucccccucuacggcgucaucgacacccccugcuggaagcuccacaccuccccccucugcaccaccaacaccaaggagggcuccaacaucugccucacccgcaccgaccgcggcugguacugcgacaacgccggcuccgucuccuucuucccccaggccgagaccugcaagguccaguccaaccgcgucuucugcgacaccaugaacucccgcacccuccccuccgaggucaaccucugcaacgucgacaucuucaaccccaaguacgacugcaagaucaugaccuccaagaccgacgucuccuccuccgucaucaccucccucggcgccaucgucuccugcuacggcaagaccaagugcaccgccuccaacaagaaccgcggcaucaucaagaccuucuccaacggcugcgacuacgucuccaacaagggcgucgacaccgucuccgucggcaacacccucuacuacgucaacaagcaggagggcaagucccucuacgucaagggcgagcccaucaucaacuucuacgacccccucgucuuccccuccgacgaguucgacgccuccaucucccaggucaacgagaagaucaaccagucccucgccuucauccgcaaguccgacgagcuccuccacaacgucaacgccggcaaguccaccaccaacaucaugaucaccaccaucaucaucgucaucaucgucauccuccucucccucaucgccgucggccuccuccucuacugcaaggcccgcuccacccccgucacccucuccaaggaccagcucuccggcaucaacaacaucgccuucuccaacugaggacuaguguccaccugucccuccugggcugcuggauugucucguuuuccugccaaauaaacaggaucagcgcuuuacagaucuaaaaaaaaaaaaaaaaaaaaaaaaaaaaaaaaaaaaaaaaaaaaaaaaaaaaaaaaaaaaaaaaugcaucccccccccccccccccccccccccccccccaaaggcucuuuucagagccaccagaauu

SEQ ID NO: 4030 - RNA, 1919 nt, Artificial Sequence
  mRNA product Design e-2 comprising derived and/or modified sequence from HRSV(A2)__F_DSCav1_mut0 (opt3)
gggagacccgugacccggaaguuguacggcuacgcgacuuucccucccacaaacccucgcgcccuuccuuuccuacuugggcccggcagaaagcuuaccauggagcugcucauccuuaaggccaacgcuauuaccacaauacugacugcagugacguucugcuuugccagcggccagaauaucaccgaagaguucuaccaauccacauguucugcggucucaaaaggguauuugagugcuuuaagaacuggaugguacaccagcguuauuacaaucgaacuguccaacauuaaggagaauaaaugcaacgguaccgacgccaaggugaaacuaaucaagcaggaacucgauaaguauaaaaaugcaguaacugagcugcagcuucugaugcagucuacacccgccaccggcucggggucagcuauagcaagcggaguggccgucuguaagguguugcaccucgagggcgaaguuaacaaaaucaagagugcucugcuguccacgaauaaagccguggucucucucagcaacgguguguccguauuaacuuuuaagguucuggaccuuaagaauuacauugauaaacaauugcugccuauccuaaacaagcagucaugcaguauuagcaauaucgagaccgugauagaguuccagcagaaaaacaauaggcuccuggaaauuacacgggaguuuucugucaacgcgggggugacuaccccaguguccacauauaugcuuaccaauucagaacuguugagccucaucaacgacaugccgauuacgaacgaucaaaagaaacugaugaguaauaacguccagaucguucgccagcagucuuacuccaucauguguauuauaaaggaggaaguguuagcauauguagugcaacugccccucuacggagucaucgacacuccuugcuggaaacuucauacaagcccacuguguaccacuaauacaaaggagggcucgaacauuugcuugacccgaacggaucguggcugguacugugacaaugccgggucuguguccuucuuuccccaggcugaaaccugcaagguucagucaaacagaguguucugugauacaaugaauaguagaacucugccuagcgaggucaaccucugcaauguggacaucuuuaacccaaaauaugauugcaagauaaugaccuccaaaacagacguaucuagcucaguuauuaccagucugggagccaucguguccuguuacgguaagacuaaaugcacagcaagcaauaagaacaggggcaucauuaagaccuucucuaaugggugugauuaugucucaaacaaaggaguggacacugucagugugggcaauacgcuuuacuauguuaacaagcaagaggguaaaagccuguacgugaagggggaacccaucauuaacuuuuaugacccuuugguauucccauccgaugaguuugacgcuucuauaucgcaggucaaugagaaaaucaaccagagccucgccuucauucggaaguccgaugaacuguuacacaaugugaacgcgggaaagucaacaaccaauaucaugaucacuaccauuauaaucguuauuaucgugauucugcuaagucucaucgccgucggccugcuuuuguacugcaaagcacgcucuacaccggugacccugagcaaggaccagcucuccggcauaaacaauaucgcuuucucaaacugaggacuaguguccaccugucccuccugggcugcuggauugucucguuuuccugccaaauaaacaggaucagcgcuuuacagaucuaaaaaaaaaaaaaaaaaaaaaaaaaaaaaaaaaaaaaaaaaaaaaaaaaaaaaaaaaaaaaaaaugcaucccccccccccccccccccccccccccccccaaaggcucuuuucagagccaccagaauu

SEQ ID NO: 4031 - RNA, 1919 nt, Artificial Sequence
  mRNA product Design e-2 comprising derived and/or modified sequence from HRSV(A2)__F_DSCav1_mut0 (opt4)
gggagacccgugacccggaaguuguacggcuacgcgacuuucccucccacaaacccucgcgcccuuccuuuccuacuugggcccggcagaaagcuuaccauggagcugcugauccugaaggccaacgccaucaccaccauccugaccgccgugaccuucugcuucgccagcggccagaacaucaccgaggaguucuaccagagcaccugcagcgccgugagcaagggcuaccugagcgcccugagaaccggcugguacaccagcgugaucaccaucgagcugagcaacaucaaggagaacaagugcaacggcaccgacgccaaggugaagcugaucaagcaggagcuggacaaguacaagaacgccgugaccgagcugcagcugcugaugcagagcacccccgccaccggcagcggcagcgccaucgccagcggcguggccgugugcaaggugcugcaccuggagggcgaggugaacaagaucaagagcgcccugcugagcaccaacaaggccguggugagccugagcaacggcgugagcgugcugaccuucaaggugcuggaccugaagaacuacaucgacaagcagcugcugcccauccugaacaagcagagcugcagcaucagcaacaucgagaccgugaucgaguuccagcagaagaacaacagacugcuggagaucaccagagaguucagcgugaacgccggcgugaccacccccgugagcaccuacaugcugaccaacagcgagcugcugagccugaucaacgacaugcccaucaccaacgaccagaagaagcugaugagcaacaacgugcagaucgugagacagcagagcuacagcaucaugugcaucaucaaggaggaggugcuggccuacguggugcagcugccccuguacggcgugaucgacacccccugcuggaagcugcacaccagcccccugugcaccaccaacaccaaggagggcagcaacaucugccugaccagaaccgacagaggcugguacugcgacaacgccggcagcgugagcuucuucccccaggccgagaccugcaaggugcagagcaacagaguguucugcgacaccaugaacagcagaacccugcccagcgaggugaaccugugcaacguggacaucuucaaccccaaguacgacugcaagaucaugaccagcaagaccgacgugagcagcagcgugaucaccagccugggcgccaucgugagcugcuacggcaagaccaagugcaccgccagcaacaagaacagaggcaucaucaagaccuucagcaacggcugcgacuacgugagcaacaagggcguggacaccgugagcgugggcaacacccuguacuacgugaacaagcaggagggcaagagccuguacgugaagggcgagcccaucaucaacuucuacgacccccugguguuccccagcgacgaguucgacgccagcaucagccaggugaacgagaagaucaaccagagccuggccuucaucagaaagagcgacgagcugcugcacaacgugaacgccggcaagagcaccaccaacaucaugaucaccaccaucaucaucgugaucaucgugauccugcugagccugaucgccgugggccugcugcuguacugcaaggccagaagcacccccgugacccugagcaaggaccagcugagcggcaucaacaacaucgccuucagcaacugaggacuaguguccaccugucccuccugggcugcuggauugucucguuuuccugccaaauaaacaggaucagcgcuuuacagaucuaaaaaaaaaaaaaaaaaaaaaaaaaaaaaaaaaaaaaaaaaaaaaaaaaaaaaaaaaaaaaaaaugcaucccccccccccccccccccccccccccccccaaaggcucuuuucagagccaccagaauu

SEQ ID NO: 4032 - RNA, 1919 nt, Artificial Sequence
  mRNA product Design e-2 comprising derived and/or modified sequence from HRSV(A2)__F_DSCav1_mut0 (opt5)
gggagacccgugacccggaaguuguacggcuacgcgacuuucccucccacaaacccucgcgcccuuccuuuccuacuugggcccggcagaaagcuuaccauggagcugcucauccugaaggccaacgcuauuaccacaauccuuacggccgugaccuucugcuuugcgagcggccagaauauuacagaagaguucuaccaauccaccuguucugcugucagcaaaggguaucuguccgcccucagaacaggaugguacaccucuguuaucacaauugaacugagcaacaucaaggagaauaaaugcaacggcaccgacgccaaggugaaacuuaucaagcaggaacuggauaaguauaaaaaugcugugacggagcuccagcugcugaugcaguccacccccgccacagggucuggaagcgcuauugccuccggcgucgcgguguguaagguucuccaccuggagggggaagugaacaaaaucaagagcgcccuucugucuaccaauaaagcugucgugucccucagcaacggaguuucugugcugacauuuaagguccuugaccugaagaauuacauugauaaacaacuccugccuauccugaacaagcaguccugcagcauuucuaauaucgagaccgugauugaguuccagcagaaaaacaaucggcuccuggaaaucacgcgcgaguuuuccgugaacgccggcgucacaaccccgguuagcacauauaugcuuaccaauuccgaacugcucucucugaucaacgacaugcccauuaccaacgaucaaaagaaacuuaugagcaauaacgugcagaucgugagacagcaguccuacagcauuauguguaucauuaaggaggaaguccuggcuuaugugguucaacucccucuguacggcgugaucgacacacccugcuggaaacugcauacgucuccucucuguaccacaaauaccaaggagggguccaacaucugccugacacggaccgaucgcggaugguacugugacaaugccggcagcgucucuuucuuuccccaggcggaaacgugcaaggugcagagcaacagaguuuucugugauacaaugaacuccagaacccugccuucugaggugaaucucugcaaugucgacauuuuuaacccgaaauaugauugcaagaucaugaccagcaaaacagacguguccagcucugucauuaccucccugggggccaucgugagcuguuacggaaagacaaaaugcacggcuucuaauaagaaccggggcauuaucaagaccuucuccaaugggugugauuauguuagcaacaaaggaguggacacagucuccgugggcaauacccuuuacuauguuaacaagcaagagggcaaaucucuguacgugaagggggaacccaucauuaacuuuuaugacccucucgucuuccccagcgaugaguuugacgccuccaucucucaggugaaugagaaaauuaaccagagccuggcuuucauccgcaaguccgaugaacugcuccacaaugugaacgccggaaagagcacaaccaauauuaugaucacgaccauuaucaucguuauuaucgucauucugcuuucucugaucgccgugggccuccugcuguacugcaaagcuagauccacaccugugacccuuagcaaggaccagcucucugggauuaacaauaucgcguucuccaacugaggacuaguguccaccugucccuccugggcugcuggauugucucguuuuccugccaaauaaacaggaucagcgcuuuacagaucuaaaaaaaaaaaaaaaaaaaaaaaaaaaaaaaaaaaaaaaaaaaaaaaaaaaaaaaaaaaaaaaaugcaucccccccccccccccccccccccccccccccaaaggcucuuuucagagccaccagaauu

SEQ ID NO: 4033 - RNA, 1919 nt, Artificial Sequence
  mRNA product Design e-2 comprising derived and/or modified sequence from HRSV(A2)__F_DSCav1_mut0 (opt6)
gggagacccgugacccggaaguuguacggcuacgcgacuuucccucccacaaacccucgcgcccuuccuuuccuacuugggcccggcagaaagcuuaccauggaacuacuaauacuaaaagccaaugcaauaacaaccauacuaaccgccguaacauuuuguuucgcaucaggucaaaacauaaccgaagaauuuuaucaaucaacaugcucagcaguaucaaaaggauacuuauccgcucuaagaacaggaugguacacaaguguaauuacaauagagcucucaaacauaaaagaaaacaaaugcaauggaacugacgcaaaaguuaaacuuauaaaacaagaacuagauaaauauaaaaaugcaguaaccgaauuacaacuccuaaugcaauccacaccugcuaccgguuccggaucagccauagcaucuggaguagccguaugcaaaguccuccaccuagaaggagaaguaaauaaaaucaaaucagcacuauuaucuaccaauaaagcaguugucucacuauccaauggcguaucaguacuaacauucaaaguauuagaccuuaaaaacuacauagacaaacaacuauuaccaauucugaacaaacaauccuguucaauaucaaacaucgaaacgguaauagaauuucaacaaaaaaauaacagauuacuugaaauaacaagagaauuuucaguaaaugcaggaguuacaacacccgucuccaccuacaugcucacaaauucagaauuauuaucacuuauaaacgacaugccaauaacuaacgaccaaaaaaaacuaaugucaaacaauguccaaauaguccgacaacaauccuacucaauaaugugcauuauaaaagaagaaguccuagccuacguuguccaacuacccuuauauggaguaauagauaccccaugcuggaaacuucauaccuccccccuaugcacaacaaacacaaaagaaggcucaaacaucugcuuaacacguacagaccgagguugguacugugauaacgcaggauccguaucauuuuucccacaagcagaaacaugcaaaguacaaucaaaccgcguuuuuugugacaccaugaacagcagaacccucccuucagaaguaaaccuaugcaacgucgauauauuuaacccaaaauacgauugcaaaauaaugacaucaaaaaccgaugucucaucuucaguaauaaccucucuaggagcaauagucucauguuacggaaaaacaaaaugcacagcaaguaauaaaaauagaggaauaauaaaaacauucucuaauggcugcgacuacguauccaauaaaggcguugacacaguauccguaggcaacacacucuacuauguuaacaaacaagaaggaaaaaguuuauacguuaaaggagaaccaauuauaaacuuuuacgacccacucguauucccaucugaugaauuugacgcaucaaucucacaaguaaaugaaaaaaucaaucagucccuugccuuuauaagaaaaucagaugaacuuuuacacaacguuaacgccggaaaaucaacaaccaauauaaugaucacaaccauaauaauaguuauaauuguaauuuuauuauccuuaauagccgucggacuacuacuauacugcaaagcaagaucuacacccguaacccuaucaaaagaccaacuaaguggaauaaauaacauugcauucucaaauuaaggacuaguguccaccugucccuccugggcugcuggauugucucguuuuccugccaaauaaacaggaucagcgcuuuacagaucuaaaaaaaaaaaaaaaaaaaaaaaaaaaaaaaaaaaaaaaaaaaaaaaaaaaaaaaaaaaaaaaaugcaucccccccccccccccccccccccccccccccaaaggcucuuuucagagccaccagaauu

SEQ ID NO: 4034 - RNA, 1919 nt, Artificial Sequence
  mRNA product Design e-2 comprising derived and/or modified sequence from HRSV(A2)__F_DSCav1_mut0 (opt11)
gggagacccgugacccggaaguuguacggcuacgcgacuuucccucccacaaacccucgcgcccuuccuuuccuacuugggcccggcagaaagcuuaccauggaacuccuaauacuaaaggcaaacgcaaucacuacaauucuaaccgccgugacauucugcuucgccuccggacaaaacaucaccgaagaauuuuaccaauccacaugcucggccgucaguaaaggcuaccucucggcucuccgaaccggcugguacaccuccgucaucaccaucgaacucuccaacaucaaagaaaacaaaugcaacggcaccgacgccaaagucaaacuaaucaaacaagaacucgacaaauacaaaaacgccgucacagaacuccaacuacuaaugcaaucaacacccgcuacaggaagcggcuccgccaucgccagcggcguagcugucugcaaaguccuccaccucgaaggugaagucaacaaaaucaaaucagcccuacucagcacaaacaaagccguuguaagccuauccaacggcgucuccguacuaacauucaaaguccuugaccucaagaacuacaucgacaaacaacuucucccaauccuaaacaaacaaagcugcucaauuuccaacaucgaaacaguaaucgaauuucaacaaaaaaacaaccgacuccucgaaaucacccgcgaauuuuccguuaacgccggcguuacaacccccgucuccaccuacaugcucaccaauuccgaacuacuaucacucauaaacgacaugccuaucacaaacgaccaaaaaaaacuaaugucaaacaauguccaaaucguccgccagcaaagcuauuccaucaugugcaucaucaaagaggaaguccucgccuacguaguccaacugccccucuacggcgucauugauacccccugcuggaaacuccacaccuccccccucugcaccacaaacaccaaagaagguuccaacaucugccuaacacgaaccgacagaggcugguacugcgacaacgccggcagcgucuccuucuucccccaagcagaaaccuguaaaguccagucuaaccgcgucuucugcgacacaaugaacucaagaacccuaccuuccgaaguaaaccucugcaacguagacaucuucaacccuaaauacgacugcaaaaucaugacuucaaaaacagacguaagcucuuccguaaucacuucccucggcgccaucguauccugcuacgguaaaaccaaaugcaccgccuccaacaaaaaccgagggaucauaaaaaccuucuccaacggcugcgacuacguaucuaacaaaggcgucgacaccgucuccgucggcaacacccucuauuacguaaacaaacaagagggcaaaucacuauacgucaaaggcgagccaaucauaaacuucuaugacccacucgucuucccuucagacgaauuugaugccagcaucagccaagucaacgaaaaaaucaaccaaucacucgccuucauccgcaaaagcgacgaacuccuucacaacgucaacgcaggcaaaucaaccaccaacaucaugaucaccaccaucaucaucgucaucaucguuauccuacucagccucaucgcaguuggucuucuccuuuacugcaaagcccgcuccacccccgucacccucaguaaagaccaacucagcggaaucaacaacauagcauucuccaacuaaggacuaguguccaccugucccuccugggcugcuggauugucucguuuuccugccaaauaaacaggaucagcgcuuuacagaucuaaaaaaaaaaaaaaaaaaaaaaaaaaaaaaaaaaaaaaaaaaaaaaaaaaaaaaaaaaaaaaaaugcaucccccccccccccccccccccccccccccccaaaggcucuuuucagagccaccagaauu

SEQ ID NO: 4035 - RNA, 1889 nt, Artificial Sequence
  mRNA product Design e-3 comprising derived and/or modified sequence from HRSV(A2)__F_DSCav1_mut0 (opt1)
gggagacuuucccauucuguagcagaauuugguguugccuguggucuuggucccgcggagaagcuuaccauggagcugcucauccugaaggccaacgccaucaccaccauccugacggcggugaccuucugcuucgccagcggccagaacaucaccgaggaguucuaccaguccacgugcagcgccgucuccaagggguaccucagcgcccugcggaccggcugguacaccuccgugaucaccaucgagcugagcaacaucaaggagaacaagugcaacgggaccgacgccaaggugaagcucaucaagcaggagcuggacaaguacaagaacgcggucacggagcugcagcuccugaugcaguccaccccggcaaccggcuccggcuccgccaucgcgagcggcgucgccgugugcaaggugcugcaccucgagggggaggucaacaagaucaagagcgcccugcuguccaccaacaaggccguggugagccucuccaacggcgucagcgugcugaccuucaaggugcuggaccucaagaacuacaucgacaagcagcugcugcccauccugaacaagcagagcugcuccaucagcaacaucgagacggugaucgaguuccagcagaagaacaaccggcuccuggagaucacccgcgaguucagcgugaacgccggggucaccacccccguguccacguacaugcugaccaacagcgagcuccugucccugaucaacgacaugccgaucaccaacgaccagaagaagcucaugagcaacaacgugcagaucguccggcagcaguccuacagcaucaugugcaucaucaaggaggaggugcuggcguacgugguccagcugccccucuacggcgugaucgacacccccugcuggaagcugcacacgagcccccugugcaccaccaacaccaaggagggguccaacaucugccucacgcgcaccgaccggggcugguacugcgacaacgccggcagcgucuccuucuucccgcaggccgagaccugcaaggugcagagcaaccgcguguucugcgacaccaugaacucccggacgcugcccagcgagguaaaccucugcaacgucgacaucuucaaccccaaguacgacugcaagaucaugaccuccaagaccgacgugagcuccagcgugaucaccucccugggggccaucgucagcugcuacggcaagacgaagugcaccgccagcaacaagaaccgggggaucaucaagaccuucuccaacggcugcgacuacgugagcaacaagggcguggacaccguguccgucgggaacacccuguacuacgugaacaagcaggagggcaagagccucuacgugaagggggagcccaucaucaacuucuacgacccgcuggucuuccccuccgacgaguucgacgcgagcaucucccaggugaacgagaagaucaaccagagccuggccuucauccgcaaguccgacgagcugcuccacaacgugaacgccggcaagagcacgaccaacaucaugaucaccaccaucaucaucgucaucaucgugauccugcugucccucaucgccguggggcugcugcucuacugcaaggcccggagcacgcccgucacccuguccaaggaccagcugagcggcaucaacaacaucgcguucuccaacugaggacuaguguccaccugucccuccugggcugcuggauugucucguuuuccugccaaauaaacaggaucagcgcuuuacagaucuaaaaaaaaaaaaaaaaaaaaaaaaaaaaaaaaaaaaaaaaaaaaaaaaaaaaaaaaaaaaaaaaugcaucccccccccccccccccccccccccccccccaaaggcucuuuucagagccaccagaauu

SEQ ID NO: 4036 - RNA, 1889 nt, Artificial Sequence
  mRNA product Design e-3 comprising derived and/or modified sequence from HRSV(A2)__F_DSCav1_mut0 (opt1)
gggagacuuucccauucuguagcagaauuugguguugccuguggucuuggucccgcggagaagcuuaccauggagcugcucauccugaaggccaacgccaucaccaccauccugacggcggugaccuucugcuucgccagcggccagaacaucaccgaggaguucuaccaguccacgugcagcgccgucuccaagggguaccucagcgcccugcgcaccggcugguacaccuccgugaucaccaucgagcugagcaacaucaaggagaacaagugcaacgggaccgacgccaaggugaagcucaucaagcaggagcuggacaaguacaagaacgcggucacggagcugcagcuccugaugcaguccacccccgccaccggcagcggguccgccaucgccagcggcguggcggugugcaagguccugcaccucgagggcgaggugaacaagaucaaguccgcccugcugagcaccaacaaggccguggucucccucagcaacgggguguccgugcugacguucaagguccuggaccucaagaacuacaucgacaagcagcugcugccgauccucaacaagcagagcugcuccaucagcaacaucgagaccgugaucgaguuccagcagaagaacaaccggcugcuggagaucacccgcgaguucuccgugaacgccggcgucaccacgcccgugagcaccuacaugcucaccaacagcgagcugcugucccucaucaacgacaugcccaucaccaacgaccagaagaagcugaugagcaacaacgugcagaucguccggcagcaguccuacagcaucaugugcaucaucaaggaggaggugcuggccuacgugguccagcucccccuguacggggugaucgacacgccgugcuggaagcugcacaccagcccccucugcaccaccaacacgaaggagggcuccaacaucugccugacccgcaccgaccgggggugguacugcgacaacgcgggcuccgugagcuucuucccccaggccgagaccugcaagguccaguccaaccgcguguucugcgacacgaugaacagccggacccuccccuccgaggucaaccugugcaacguggacaucuucaacccgaaguacgacugcaagaucaugaccagcaagaccgacguguccagcuccgucaucacgagccugggcgccaucguguccugcuacgggaagaccaagugcaccgccagcaacaagaaccggggcaucaucaagaccuucuccaacgggugcgacuacgugagcaacaagggcgucgacacggugagcgugggcaacacccucuacuacgucaacaagcaggaggggaagucccuguacgugaagggcgagcccaucaucaacuucuacgacccccugguguuccccagcgacgaguucgacgccuccaucagccaggucaacgagaagaucaaccagucccucgcguucauccgcaagagcgacgagcugcugcacaacgugaacgccgggaaguccaccaccaacaucaugaucaccacgaucaucaucgugaucaucgucauccuccugagccugaucgccgugggccuccugcuguacugcaaggcccgguccaccccggugacccugagcaaggaccagcucuccgggaucaacaacaucgccuucagcaacugaggacuaguguccaccugucccuccugggcugcuggauugucucguuuuccugccaaauaaacaggaucagcgcuuuacagaucuaaaaaaaaaaaaaaaaaaaaaaaaaaaaaaaaaaaaaaaaaaaaaaaaaaaaaaaaaaaaaaaaugcaucccccccccccccccccccccccccccccccaaaggcucuuuucagagccaccagaauu

SEQ ID NO: 4037 - RNA, 1889 nt, Artificial Sequence
  mRNA product Design e-3 comprising derived and/or modified sequence from HRSV(A2)__F_DSCav1_mut0 (opt2)
gggagacuuucccauucuguagcagaauuugguguugccuguggucuuggucccgcggagaagcuuaccauggagcuccucauccucaaggccaacgccaucaccaccauccucaccgccgucaccuucugcuucgccuccggccagaacaucaccgaggaguucuaccaguccaccugcuccgccgucuccaagggcuaccucuccgcccuccgcaccggcugguacaccuccgucaucaccaucgagcucuccaacaucaaggagaacaagugcaacggcaccgacgccaaggucaagcucaucaagcaggagcucgacaaguacaagaacgccgucaccgagcuccagcuccucaugcaguccacccccgccaccggcuccggcuccgccaucgccuccggcgucgccgucugcaagguccuccaccucgagggcgaggucaacaagaucaaguccgcccuccucuccaccaacaaggccgucgucucccucuccaacggcgucuccguccucaccuucaagguccucgaccucaagaacuacaucgacaagcagcuccuccccauccucaacaagcaguccugcuccaucuccaacaucgagaccgucaucgaguuccagcagaagaacaaccgccuccucgagaucacccgcgaguucuccgucaacgccggcgucaccacccccgucuccaccuacaugcucaccaacuccgagcuccucucccucaucaacgacaugcccaucaccaacgaccagaagaagcucauguccaacaacguccagaucguccgccagcaguccuacuccaucaugugcaucaucaaggaggagguccucgccuacgucguccagcucccccucuacggcgucaucgacacccccugcuggaagcuccacaccuccccccucugcaccaccaacaccaaggagggcuccaacaucugccucacccgcaccgaccgcggcugguacugcgacaacgccggcuccgucuccuucuucccccaggccgagaccugcaagguccaguccaaccgcgucuucugcgacaccaugaacucccgcacccuccccuccgaggucaaccucugcaacgucgacaucuucaaccccaaguacgacugcaagaucaugaccuccaagaccgacgucuccuccuccgucaucaccucccucggcgccaucgucuccugcuacggcaagaccaagugcaccgccuccaacaagaaccgcggcaucaucaagaccuucuccaacggcugcgacuacgucuccaacaagggcgucgacaccgucuccgucggcaacacccucuacuacgucaacaagcaggagggcaagucccucuacgucaagggcgagcccaucaucaacuucuacgacccccucgucuuccccuccgacgaguucgacgccuccaucucccaggucaacgagaagaucaaccagucccucgccuucauccgcaaguccgacgagcuccuccacaacgucaacgccggcaaguccaccaccaacaucaugaucaccaccaucaucaucgucaucaucgucauccuccucucccucaucgccgucggccuccuccucuacugcaaggcccgcuccacccccgucacccucuccaaggaccagcucuccggcaucaacaacaucgccuucuccaacugaggacuaguguccaccugucccuccugggcugcuggauugucucguuuuccugccaaauaaacaggaucagcgcuuuacagaucuaaaaaaaaaaaaaaaaaaaaaaaaaaaaaaaaaaaaaaaaaaaaaaaaaaaaaaaaaaaaaaaaugcaucccccccccccccccccccccccccccccccaaaggcucuuuucagagccaccagaauu

SEQ ID NO: 4038 - RNA, 1889 nt, Artificial Sequence
  mRNA product Design e-3 comprising derived and/or modified sequence from HRSV(A2)__F_DSCav1_mut0 (opt3)
gggagacuuucccauucuguagcagaauuugguguugccuguggucuuggucccgcggagaagcuuaccauggagcugcucauccuuaaggccaacgcuauuaccacaauacugacugcagugacguucugcuuugccagcggccagaauaucaccgaagaguucuaccaauccacauguucugcggucucaaaaggguauuugagugcuuuaagaacuggaugguacaccagcguuauuacaaucgaacuguccaacauuaaggagaauaaaugcaacgguaccgacgccaaggugaaacuaaucaagcaggaacucgauaaguauaaaaaugcaguaacugagcugcagcuucugaugcagucuacacccgccaccggcucggggucagcuauagcaagcggaguggccgucuguaagguguugcaccucgagggcgaaguuaacaaaaucaagagugcucugcuguccacgaauaaagccguggucucucucagcaacgguguguccguauuaacuuuuaagguucuggaccuuaagaauuacauugauaaacaauugcugccuauccuaaacaagcagucaugcaguauuagcaauaucgagaccgugauagaguuccagcagaaaaacaauaggcuccuggaaauuacacgggaguuuucugucaacgcgggggugacuaccccaguguccacauauaugcuuaccaauucagaacuguugagccucaucaacgacaugccgauuacgaacgaucaaaagaaacugaugaguaauaacguccagaucguucgccagcagucuuacuccaucauguguauuauaaaggaggaaguguuagcauauguagugcaacugccccucuacggagucaucgacacuccuugcuggaaacuucauacaagcccacuguguaccacuaauacaaaggagggcucgaacauuugcuugacccgaacggaucguggcugguacugugacaaugccgggucuguguccuucuuuccccaggcugaaaccugcaagguucagucaaacagaguguucugugauacaaugaauaguagaacucugccuagcgaggucaaccucugcaauguggacaucuuuaacccaaaauaugauugcaagauaaugaccuccaaaacagacguaucuagcucaguuauuaccagucugggagccaucguguccuguuacgguaagacuaaaugcacagcaagcaauaagaacaggggcaucauuaagaccuucucuaaugggugugauuaugucucaaacaaaggaguggacacugucagugugggcaauacgcuuuacuauguuaacaagcaagaggguaaaagccuguacgugaagggggaacccaucauuaacuuuuaugacccuuugguauucccauccgaugaguuugacgcuucuauaucgcaggucaaugagaaaaucaaccagagccucgccuucauucggaaguccgaugaacuguuacacaaugugaacgcgggaaagucaacaaccaauaucaugaucacuaccauuauaaucguuauuaucgugauucugcuaagucucaucgccgucggccugcuuuuguacugcaaagcacgcucuacaccggugacccugagcaaggaccagcucuccggcauaaacaauaucgcuuucucaaacugaggacuaguguccaccugucccuccugggcugcuggauugucucguuuuccugccaaauaaacaggaucagcgcuuuacagaucuaaaaaaaaaaaaaaaaaaaaaaaaaaaaaaaaaaaaaaaaaaaaaaaaaaaaaaaaaaaaaaaaugcaucccccccccccccccccccccccccccccccaaaggcucuuuucagagccaccagaauu

SEQ ID NO: 4039 - RNA, 1889 nt, Artificial Sequence
  mRNA product Design e-3 comprising derived and/or modified sequence from HRSV(A2)__F_DSCav1_mut0 (opt4)
gggagacuuucccauucuguagcagaauuugguguugccuguggucuuggucccgcggagaagcuuaccauggagcugcugauccugaaggccaacgccaucaccaccauccugaccgccgugaccuucugcuucgccagcggccagaacaucaccgaggaguucuaccagagcaccugcagcgccgugagcaagggcuaccugagcgcccugagaaccggcugguacaccagcgugaucaccaucgagcugagcaacaucaaggagaacaagugcaacggcaccgacgccaaggugaagcugaucaagcaggagcuggacaaguacaagaacgccgugaccgagcugcagcugcugaugcagagcacccccgccaccggcagcggcagcgccaucgccagcggcguggccgugugcaaggugcugcaccuggagggcgaggugaacaagaucaagagcgcccugcugagcaccaacaaggccguggugagccugagcaacggcgugagcgugcugaccuucaaggugcuggaccugaagaacuacaucgacaagcagcugcugcccauccugaacaagcagagcugcagcaucagcaacaucgagaccgugaucgaguuccagcagaagaacaacagacugcuggagaucaccagagaguucagcgugaacgccggcgugaccacccccgugagcaccuacaugcugaccaacagcgagcugcugagccugaucaacgacaugcccaucaccaacgaccagaagaagcugaugagcaacaacgugcagaucgugagacagcagagcuacagcaucaugugcaucaucaaggaggaggugcuggccuacguggugcagcugccccuguacggcgugaucgacacccccugcuggaagcugcacaccagcccccugugcaccaccaacaccaaggagggcagcaacaucugccugaccagaaccgacagaggcugguacugcgacaacgccggcagcgugagcuucuucccccaggccgagaccugcaaggugcagagcaacagaguguucugcgacaccaugaacagcagaacccugcccagcgaggugaaccugugcaacguggacaucuucaaccccaaguacgacugcaagaucaugaccagcaagaccgacgugagcagcagcgugaucaccagccugggcgccaucgugagcugcuacggcaagaccaagugcaccgccagcaacaagaacagaggcaucaucaagaccuucagcaacggcugcgacuacgugagcaacaagggcguggacaccgugagcgugggcaacacccuguacuacgugaacaagcaggagggcaagagccuguacgugaagggcgagcccaucaucaacuucuacgacccccugguguuccccagcgacgaguucgacgccagcaucagccaggugaacgagaagaucaaccagagccuggccuucaucagaaagagcgacgagcugcugcacaacgugaacgccggcaagagcaccaccaacaucaugaucaccaccaucaucaucgugaucaucgugauccugcugagccugaucgccgugggccugcugcuguacugcaaggccagaagcacccccgugacccugagcaaggaccagcugagcggcaucaacaacaucgccuucagcaacugaggacuaguguccaccugucccuccugggcugcuggauugucucguuuuccugccaaauaaacaggaucagcgcuuuacagaucuaaaaaaaaaaaaaaaaaaaaaaaaaaaaaaaaaaaaaaaaaaaaaaaaaaaaaaaaaaaaaaaaugcaucccccccccccccccccccccccccccccccaaaggcucuuuucagagccaccagaauu

SEQ ID NO: 4040 - RNA, 1889 nt, Artificial Sequence
  mRNA product Design e-3 comprising derived and/or modified sequence from HRSV(A2)__F_DSCav1_mut0 (opt5)
gggagacuuucccauucuguagcagaauuugguguugccuguggucuuggucccgcggagaagcuuaccauggagcugcucauccugaaggccaacgcuauuaccacaauccuuacggccgugaccuucugcuuugcgagcggccagaauauuacagaagaguucuaccaauccaccuguucugcugucagcaaaggguaucuguccgcccucagaacaggaugguacaccucuguuaucacaauugaacugagcaacaucaaggagaauaaaugcaacggcaccgacgccaaggugaaacuuaucaagcaggaacuggauaaguauaaaaaugcugugacggagcuccagcugcugaugcaguccacccccgccacagggucuggaagcgcuauugccuccggcgucgcgguguguaagguucuccaccuggagggggaagugaacaaaaucaagagcgcccuucugucuaccaauaaagcugucgugucccucagcaacggaguuucugugcugacauuuaagguccuugaccugaagaauuacauugauaaacaacuccugccuauccugaacaagcaguccugcagcauuucuaauaucgagaccgugauugaguuccagcagaaaaacaaucggcuccuggaaaucacgcgcgaguuuuccgugaacgccggcgucacaaccccgguuagcacauauaugcuuaccaauuccgaacugcucucucugaucaacgacaugcccauuaccaacgaucaaaagaaacuuaugagcaauaacgugcagaucgugagacagcaguccuacagcauuauguguaucauuaaggaggaaguccuggcuuaugugguucaacucccucuguacggcgugaucgacacacccugcuggaaacugcauacgucuccucucuguaccacaaauaccaaggagggguccaacaucugccugacacggaccgaucgcggaugguacugugacaaugccggcagcgucucuuucuuuccccaggcggaaacgugcaaggugcagagcaacagaguuuucugugauacaaugaacuccagaacccugccuucugaggugaaucucugcaaugucgacauuuuuaacccgaaauaugauugcaagaucaugaccagcaaaacagacguguccagcucugucauuaccucccugggggccaucgugagcuguuacggaaagacaaaaugcacggcuucuaauaagaaccggggcauuaucaagaccuucuccaaugggugugauuauguuagcaacaaaggaguggacacagucuccgugggcaauacccuuuacuauguuaacaagcaagagggcaaaucucuguacgugaagggggaacccaucauuaacuuuuaugacccucucgucuuccccagcgaugaguuugacgccuccaucucucaggugaaugagaaaauuaaccagagccuggcuuucauccgcaaguccgaugaacugcuccacaaugugaacgccggaaagagcacaaccaauauuaugaucacgaccauuaucaucguuauuaucgucauucugcuuucucugaucgccgugggccuccugcuguacugcaaagcuagauccacaccugugacccuuagcaaggaccagcucucugggauuaacaauaucgcguucuccaacugaggacuaguguccaccugucccuccugggcugcuggauugucucguuuuccugccaaauaaacaggaucagcgcuuuacagaucuaaaaaaaaaaaaaaaaaaaaaaaaaaaaaaaaaaaaaaaaaaaaaaaaaaaaaaaaaaaaaaaaugcaucccccccccccccccccccccccccccccccaaaggcucuuuucagagccaccagaauu

SEQ ID NO: 4041 - RNA, 1889 nt, Artificial Sequence
  mRNA product Design e-3 comprising derived and/or modified sequence from HRSV(A2)__F_DSCav1_mut0 (opt6)
gggagacuuucccauucuguagcagaauuugguguugccuguggucuuggucccgcggagaagcuuaccauggaacuacuaauacuaaaagccaaugcaauaacaaccauacuaaccgccguaacauuuuguuucgcaucaggucaaaacauaaccgaagaauuuuaucaaucaacaugcucagcaguaucaaaaggauacuuauccgcucuaagaacaggaugguacacaaguguaauuacaauagagcucucaaacauaaaagaaaacaaaugcaauggaacugacgcaaaaguuaaacuuauaaaacaagaacuagauaaauauaaaaaugcaguaaccgaauuacaacuccuaaugcaauccacaccugcuaccgguuccggaucagccauagcaucuggaguagccguaugcaaaguccuccaccuagaaggagaaguaaauaaaaucaaaucagcacuauuaucuaccaauaaagcaguugucucacuauccaauggcguaucaguacuaacauucaaaguauuagaccuuaaaaacuacauagacaaacaacuauuaccaauucugaacaaacaauccuguucaauaucaaacaucgaaacgguaauagaauuucaacaaaaaaauaacagauuacuugaaauaacaagagaauuuucaguaaaugcaggaguuacaacacccgucuccaccuacaugcucacaaauucagaauuauuaucacuuauaaacgacaugccaauaacuaacgaccaaaaaaaacuaaugucaaacaauguccaaauaguccgacaacaauccuacucaauaaugugcauuauaaaagaagaaguccuagccuacguuguccaacuacccuuauauggaguaauagauaccccaugcuggaaacuucauaccuccccccuaugcacaacaaacacaaaagaaggcucaaacaucugcuuaacacguacagaccgagguugguacugugauaacgcaggauccguaucauuuuucccacaagcagaaacaugcaaaguacaaucaaaccgcguuuuuugugacaccaugaacagcagaacccucccuucagaaguaaaccuaugcaacgucgauauauuuaacccaaaauacgauugcaaaauaaugacaucaaaaaccgaugucucaucuucaguaauaaccucucuaggagcaauagucucauguuacggaaaaacaaaaugcacagcaaguaauaaaaauagaggaauaauaaaaacauucucuaauggcugcgacuacguauccaauaaaggcguugacacaguauccguaggcaacacacucuacuauguuaacaaacaagaaggaaaaaguuuauacguuaaaggagaaccaauuauaaacuuuuacgacccacucguauucccaucugaugaauuugacgcaucaaucucacaaguaaaugaaaaaaucaaucagucccuugccuuuauaagaaaaucagaugaacuuuuacacaacguuaacgccggaaaaucaacaaccaauauaaugaucacaaccauaauaauaguuauaauuguaauuuuauuauccuuaauagccgucggacuacuacuauacugcaaagcaagaucuacacccguaacccuaucaaaagaccaacuaaguggaauaaauaacauugcauucucaaauuaaggacuaguguccaccugucccuccugggcugcuggauugucucguuuuccugccaaauaaacaggaucagcgcuuuacagaucuaaaaaaaaaaaaaaaaaaaaaaaaaaaaaaaaaaaaaaaaaaaaaaaaaaaaaaaaaaaaaaaaugcaucccccccccccccccccccccccccccccccaaaggcucuuuucagagccaccagaauu

SEQ ID NO: 4042 - RNA, 1889 nt, Artificial Sequence
  mRNA product Design e-3 comprising derived and/or modified sequence from HRSV(A2)__F_DSCav1_mut0 (opt11)
gggagacuuucccauucuguagcagaauuugguguugccuguggucuuggucccgcggagaagcuuaccauggaacuccuaauacuaaaggcaaacgcaaucacuacaauucuaaccgccgugacauucugcuucgccuccggacaaaacaucaccgaagaauuuuaccaauccacaugcucggccgucaguaaaggcuaccucucggcucuccgaaccggcugguacaccuccgucaucaccaucgaacucuccaacaucaaagaaaacaaaugcaacggcaccgacgccaaagucaaacuaaucaaacaagaacucgacaaauacaaaaacgccgucacagaacuccaacuacuaaugcaaucaacacccgcuacaggaagcggcuccgccaucgccagcggcguagcugucugcaaaguccuccaccucgaaggugaagucaacaaaaucaaaucagcccuacucagcacaaacaaagccguuguaagccuauccaacggcgucuccguacuaacauucaaaguccuugaccucaagaacuacaucgacaaacaacuucucccaauccuaaacaaacaaagcugcucaauuuccaacaucgaaacaguaaucgaauuucaacaaaaaaacaaccgacuccucgaaaucacccgcgaauuuuccguuaacgccggcguuacaacccccgucuccaccuacaugcucaccaauuccgaacuacuaucacucauaaacgacaugccuaucacaaacgaccaaaaaaaacuaaugucaaacaauguccaaaucguccgccagcaaagcuauuccaucaugugcaucaucaaagaggaaguccucgccuacguaguccaacugccccucuacggcgucauugauacccccugcuggaaacuccacaccuccccccucugcaccacaaacaccaaagaagguuccaacaucugccuaacacgaaccgacagaggcugguacugcgacaacgccggcagcgucuccuucuucccccaagcagaaaccuguaaaguccagucuaaccgcgucuucugcgacacaaugaacucaagaacccuaccuuccgaaguaaaccucugcaacguagacaucuucaacccuaaauacgacugcaaaaucaugacuucaaaaacagacguaagcucuuccguaaucacuucccucggcgccaucguauccugcuacgguaaaaccaaaugcaccgccuccaacaaaaaccgagggaucauaaaaaccuucuccaacggcugcgacuacguaucuaacaaaggcgucgacaccgucuccgucggcaacacccucuauuacguaaacaaacaagagggcaaaucacuauacgucaaaggcgagccaaucauaaacuucuaugacccacucgucuucccuucagacgaauuugaugccagcaucagccaagucaacgaaaaaaucaaccaaucacucgccuucauccgcaaaagcgacgaacuccuucacaacgucaacgcaggcaaaucaaccaccaacaucaugaucaccaccaucaucaucgucaucaucguuauccuacucagccucaucgcaguuggucuucuccuuuacugcaaagcccgcuccacccccgucacccucaguaaagaccaacucagcggaaucaacaacauagcauucuccaacuaaggacuaguguccaccugucccuccugggcugcuggauugucucguuuuccugccaaauaaacaggaucagcgcuuuacagaucuaaaaaaaaaaaaaaaaaaaaaaaaaaaaaaaaaaaaaaaaaaaaaaaaaaaaaaaaaaaaaaaaugcaucccccccccccccccccccccccccccccccaaaggcucuuuucagagccaccagaauu

SEQ ID NO: 4043 - RNA, 1943 nt, Artificial Sequence
  mRNA product Design e-4 comprising derived and/or modified sequence from HRSV(A2)__F_DSCav1_mut0 (opt1)
gggagacuccugucgggcggaaguaggaggaguagaguuuaaaaacaguacucuuuuuccgguucgggacguaguugaagcaacgacaagccggauaaccgcucuugagacaggaagcuuaccauggagcugcucauccugaaggccaacgccaucaccaccauccugacggcggugaccuucugcuucgccagcggccagaacaucaccgaggaguucuaccaguccacgugcagcgccgucuccaagggguaccucagcgcccugcggaccggcugguacaccuccgugaucaccaucgagcugagcaacaucaaggagaacaagugcaacgggaccgacgccaaggugaagcucaucaagcaggagcuggacaaguacaagaacgcggucacggagcugcagcuccugaugcaguccaccccggcaaccggcuccggcuccgccaucgcgagcggcgucgccgugugcaaggugcugcaccucgagggggaggucaacaagaucaagagcgcccugcuguccaccaacaaggccguggugagccucuccaacggcgucagcgugcugaccuucaaggugcuggaccucaagaacuacaucgacaagcagcugcugcccauccugaacaagcagagcugcuccaucagcaacaucgagacggugaucgaguuccagcagaagaacaaccggcuccuggagaucacccgcgaguucagcgugaacgccggggucaccacccccguguccacguacaugcugaccaacagcgagcuccugucccugaucaacgacaugccgaucaccaacgaccagaagaagcucaugagcaacaacgugcagaucguccggcagcaguccuacagcaucaugugcaucaucaaggaggaggugcuggcguacgugguccagcugccccucuacggcgugaucgacacccccugcuggaagcugcacacgagcccccugugcaccaccaacaccaaggagggguccaacaucugccucacgcgcaccgaccggggcugguacugcgacaacgccggcagcgucuccuucuucccgcaggccgagaccugcaaggugcagagcaaccgcguguucugcgacaccaugaacucccggacgcugcccagcgagguaaaccucugcaacgucgacaucuucaaccccaaguacgacugcaagaucaugaccuccaagaccgacgugagcuccagcgugaucaccucccugggggccaucgucagcugcuacggcaagacgaagugcaccgccagcaacaagaaccgggggaucaucaagaccuucuccaacggcugcgacuacgugagcaacaagggcguggacaccguguccgucgggaacacccuguacuacgugaacaagcaggagggcaagagccucuacgugaagggggagcccaucaucaacuucuacgacccgcuggucuuccccuccgacgaguucgacgcgagcaucucccaggugaacgagaagaucaaccagagccuggccuucauccgcaaguccgacgagcugcuccacaacgugaacgccggcaagagcacgaccaacaucaugaucaccaccaucaucaucgucaucaucgugauccugcugucccucaucgccguggggcugcugcucuacugcaaggcccggagcacgcccgucacccuguccaaggaccagcugagcggcaucaacaacaucgcguucuccaacugaggacuaguguccaccugucccuccugggcugcuggauugucucguuuuccugccaaauaaacaggaucagcgcuuuacagaucuaaaaaaaaaaaaaaaaaaaaaaaaaaaaaaaaaaaaaaaaaaaaaaaaaaaaaaaaaaaaaaaaugcaucccccccccccccccccccccccccccccccaaaggcucuuuucagagccaccagaauu

SEQ ID NO: 4044 - RNA, 1943 nt, Artificial Sequence
  mRNA product Design e-4 comprising derived and/or modified sequence from HRSV(A2)__F_DSCav1_mut0 (opt1)
gggagacuccugucgggcggaaguaggaggaguagaguuuaaaaacaguacucuuuuuccgguucgggacguaguugaagcaacgacaagccggauaaccgcucuugagacaggaagcuuaccauggagcugcucauccugaaggccaacgccaucaccaccauccugacggcggugaccuucugcuucgccagcggccagaacaucaccgaggaguucuaccaguccacgugcagcgccgucuccaagggguaccucagcgcccugcgcaccggcugguacaccuccgugaucaccaucgagcugagcaacaucaaggagaacaagugcaacgggaccgacgccaaggugaagcucaucaagcaggagcuggacaaguacaagaacgcggucacggagcugcagcuccugaugcaguccacccccgccaccggcagcggguccgccaucgccagcggcguggcggugugcaagguccugcaccucgagggcgaggugaacaagaucaaguccgcccugcugagcaccaacaaggccguggucucccucagcaacgggguguccgugcugacguucaagguccuggaccucaagaacuacaucgacaagcagcugcugccgauccucaacaagcagagcugcuccaucagcaacaucgagaccgugaucgaguuccagcagaagaacaaccggcugcuggagaucacccgcgaguucuccgugaacgccggcgucaccacgcccgugagcaccuacaugcucaccaacagcgagcugcugucccucaucaacgacaugcccaucaccaacgaccagaagaagcugaugagcaacaacgugcagaucguccggcagcaguccuacagcaucaugugcaucaucaaggaggaggugcuggccuacgugguccagcucccccuguacggggugaucgacacgccgugcuggaagcugcacaccagcccccucugcaccaccaacacgaaggagggcuccaacaucugccugacccgcaccgaccgggggugguacugcgacaacgcgggcuccgugagcuucuucccccaggccgagaccugcaagguccaguccaaccgcguguucugcgacacgaugaacagccggacccuccccuccgaggucaaccugugcaacguggacaucuucaacccgaaguacgacugcaagaucaugaccagcaagaccgacguguccagcuccgucaucacgagccugggcgccaucguguccugcuacgggaagaccaagugcaccgccagcaacaagaaccggggcaucaucaagaccuucuccaacgggugcgacuacgugagcaacaagggcgucgacacggugagcgugggcaacacccucuacuacgucaacaagcaggaggggaagucccuguacgugaagggcgagcccaucaucaacuucuacgacccccugguguuccccagcgacgaguucgacgccuccaucagccaggucaacgagaagaucaaccagucccucgcguucauccgcaagagcgacgagcugcugcacaacgugaacgccgggaaguccaccaccaacaucaugaucaccacgaucaucaucgugaucaucgucauccuccugagccugaucgccgugggccuccugcuguacugcaaggcccgguccaccccggugacccugagcaaggaccagcucuccgggaucaacaacaucgccuucagcaacugaggacuaguguccaccugucccuccugggcugcuggauugucucguuuuccugccaaauaaacaggaucagcgcuuuacagaucuaaaaaaaaaaaaaaaaaaaaaaaaaaaaaaaaaaaaaaaaaaaaaaaaaaaaaaaaaaaaaaaaugcaucccccccccccccccccccccccccccccccaaaggcucuuuucagagccaccagaauu

SEQ ID NO: 4045 - RNA, 1943 nt, Artificial Sequence
  mRNA product Design e-4 comprising derived and/or modified sequence from HRSV(A2)__F_DSCav1_mut0 (opt2)
gggagacuccugucgggcggaaguaggaggaguagaguuuaaaaacaguacucuuuuuccgguucgggacguaguugaagcaacgacaagccggauaaccgcucuugagacaggaagcuuaccauggagcuccucauccucaaggccaacgccaucaccaccauccucaccgccgucaccuucugcuucgccuccggccagaacaucaccgaggaguucuaccaguccaccugcuccgccgucuccaagggcuaccucuccgcccuccgcaccggcugguacaccuccgucaucaccaucgagcucuccaacaucaaggagaacaagugcaacggcaccgacgccaaggucaagcucaucaagcaggagcucgacaaguacaagaacgccgucaccgagcuccagcuccucaugcaguccacccccgccaccggcuccggcuccgccaucgccuccggcgucgccgucugcaagguccuccaccucgagggcgaggucaacaagaucaaguccgcccuccucuccaccaacaaggccgucgucucccucuccaacggcgucuccguccucaccuucaagguccucgaccucaagaacuacaucgacaagcagcuccuccccauccucaacaagcaguccugcuccaucuccaacaucgagaccgucaucgaguuccagcagaagaacaaccgccuccucgagaucacccgcgaguucuccgucaacgccggcgucaccacccccgucuccaccuacaugcucaccaacuccgagcuccucucccucaucaacgacaugcccaucaccaacgaccagaagaagcucauguccaacaacguccagaucguccgccagcaguccuacuccaucaugugcaucaucaaggaggagguccucgccuacgucguccagcucccccucuacggcgucaucgacacccccugcuggaagcuccacaccuccccccucugcaccaccaacaccaaggagggcuccaacaucugccucacccgcaccgaccgcggcugguacugcgacaacgccggcuccgucuccuucuucccccaggccgagaccugcaagguccaguccaaccgcgucuucugcgacaccaugaacucccgcacccuccccuccgaggucaaccucugcaacgucgacaucuucaaccccaaguacgacugcaagaucaugaccuccaagaccgacgucuccuccuccgucaucaccucccucggcgccaucgucuccugcuacggcaagaccaagugcaccgccuccaacaagaaccgcggcaucaucaagaccuucuccaacggcugcgacuacgucuccaacaagggcgucgacaccgucuccgucggcaacacccucuacuacgucaacaagcaggagggcaagucccucuacgucaagggcgagcccaucaucaacuucuacgacccccucgucuuccccuccgacgaguucgacgccuccaucucccaggucaacgagaagaucaaccagucccucgccuucauccgcaaguccgacgagcuccuccacaacgucaacgccggcaaguccaccaccaacaucaugaucaccaccaucaucaucgucaucaucgucauccuccucucccucaucgccgucggccuccuccucuacugcaaggcccgcuccacccccgucacccucuccaaggaccagcucuccggcaucaacaacaucgccuucuccaacugaggacuaguguccaccugucccuccugggcugcuggauugucucguuuuccugccaaauaaacaggaucagcgcuuuacagaucuaaaaaaaaaaaaaaaaaaaaaaaaaaaaaaaaaaaaaaaaaaaaaaaaaaaaaaaaaaaaaaaaugcaucccccccccccccccccccccccccccccccaaaggcucuuuucagagccaccagaauu

SEQ ID NO: 4046 - RNA, 1943 nt, Artificial Sequence
  mRNA product Design e-4 comprising derived and/or modified sequence from HRSV(A2)__F_DSCav1_mut0 (opt3)
gggagacuccugucgggcggaaguaggaggaguagaguuuaaaaacaguacucuuuuuccgguucgggacguaguugaagcaacgacaagccggauaaccgcucuugagacaggaagcuuaccauggagcugcucauccuuaaggccaacgcuauuaccacaauacugacugcagugacguucugcuuugccagcggccagaauaucaccgaagaguucuaccaauccacauguucugcggucucaaaaggguauuugagugcuuuaagaacuggaugguacaccagcguuauuacaaucgaacuguccaacauuaaggagaauaaaugcaacgguaccgacgccaaggugaaacuaaucaagcaggaacucgauaaguauaaaaaugcaguaacugagcugcagcuucugaugcagucuacacccgccaccggcucggggucagcuauagcaagcggaguggccgucuguaagguguugcaccucgagggcgaaguuaacaaaaucaagagugcucugcuguccacgaauaaagccguggucucucucagcaacgguguguccguauuaacuuuuaagguucuggaccuuaagaauuacauugauaaacaauugcugccuauccuaaacaagcagucaugcaguauuagcaauaucgagaccgugauagaguuccagcagaaaaacaauaggcuccuggaaauuacacgggaguuuucugucaacgcgggggugacuaccccaguguccacauauaugcuuaccaauucagaacuguugagccucaucaacgacaugccgauuacgaacgaucaaaagaaacugaugaguaauaacguccagaucguucgccagcagucuuacuccaucauguguauuauaaaggaggaaguguuagcauauguagugcaacugccccucuacggagucaucgacacuccuugcuggaaacuucauacaagcccacuguguaccacuaauacaaaggagggcucgaacauuugcuugacccgaacggaucguggcugguacugugacaaugccgggucuguguccuucuuuccccaggcugaaaccugcaagguucagucaaacagaguguucugugauacaaugaauaguagaacucugccuagcgaggucaaccucugcaauguggacaucuuuaacccaaaauaugauugcaagauaaugaccuccaaaacagacguaucuagcucaguuauuaccagucugggagccaucguguccuguuacgguaagacuaaaugcacagcaagcaauaagaacaggggcaucauuaagaccuucucuaaugggugugauuaugucucaaacaaaggaguggacacugucagugugggcaauacgcuuuacuauguuaacaagcaagaggguaaaagccuguacgugaagggggaacccaucauuaacuuuuaugacccuuugguauucccauccgaugaguuugacgcuucuauaucgcaggucaaugagaaaaucaaccagagccucgccuucauucggaaguccgaugaacuguuacacaaugugaacgcgggaaagucaacaaccaauaucaugaucacuaccauuauaaucguuauuaucgugauucugcuaagucucaucgccgucggccugcuuuuguacugcaaagcacgcucuacaccggugacccugagcaaggaccagcucuccggcauaaacaauaucgcuuucucaaacugaggacuaguguccaccugucccuccugggcugcuggauugucucguuuuccugccaaauaaacaggaucagcgcuuuacagaucuaaaaaaaaaaaaaaaaaaaaaaaaaaaaaaaaaaaaaaaaaaaaaaaaaaaaaaaaaaaaaaaaugcaucccccccccccccccccccccccccccccccaaaggcucuuuucagagccaccagaauu

SEQ ID NO: 4047 - RNA, 1943 nt, Artificial Sequence
  mRNA product Design e-4 comprising derived and/or modified sequence from HRSV(A2)__F_DSCav1_mut0 (opt4)
gggagacuccugucgggcggaaguaggaggaguagaguuuaaaaacaguacucuuuuuccgguucgggacguaguugaagcaacgacaagccggauaaccgcucuugagacaggaagcuuaccauggagcugcugauccugaaggccaacgccaucaccaccauccugaccgccgugaccuucugcuucgccagcggccagaacaucaccgaggaguucuaccagagcaccugcagcgccgugagcaagggcuaccugagcgcccugagaaccggcugguacaccagcgugaucaccaucgagcugagcaacaucaaggagaacaagugcaacggcaccgacgccaaggugaagcugaucaagcaggagcuggacaaguacaagaacgccgugaccgagcugcagcugcugaugcagagcacccccgccaccggcagcggcagcgccaucgccagcggcguggccgugugcaaggugcugcaccuggagggcgaggugaacaagaucaagagcgcccugcugagcaccaacaaggccguggugagccugagcaacggcgugagcgugcugaccuucaaggugcuggaccugaagaacuacaucgacaagcagcugcugcccauccugaacaagcagagcugcagcaucagcaacaucgagaccgugaucgaguuccagcagaagaacaacagacugcuggagaucaccagagaguucagcgugaacgccggcgugaccacccccgugagcaccuacaugcugaccaacagcgagcugcugagccugaucaacgacaugcccaucaccaacgaccagaagaagcugaugagcaacaacgugcagaucgugagacagcagagcuacagcaucaugugcaucaucaaggaggaggugcuggccuacguggugcagcugccccuguacggcgugaucgacacccccugcuggaagcugcacaccagcccccugugcaccaccaacaccaaggagggcagcaacaucugccugaccagaaccgacagaggcugguacugcgacaacgccggcagcgugagcuucuucccccaggccgagaccugcaaggugcagagcaacagaguguucugcgacaccaugaacagcagaacccugcccagcgaggugaaccugugcaacguggacaucuucaaccccaaguacgacugcaagaucaugaccagcaagaccgacgugagcagcagcgugaucaccagccugggcgccaucgugagcugcuacggcaagaccaagugcaccgccagcaacaagaacagaggcaucaucaagaccuucagcaacggcugcgacuacgugagcaacaagggcguggacaccgugagcgugggcaacacccuguacuacgugaacaagcaggagggcaagagccuguacgugaagggcgagcccaucaucaacuucuacgacccccugguguuccccagcgacgaguucgacgccagcaucagccaggugaacgagaagaucaaccagagccuggccuucaucagaaagagcgacgagcugcugcacaacgugaacgccggcaagagcaccaccaacaucaugaucaccaccaucaucaucgugaucaucgugauccugcugagccugaucgccgugggccugcugcuguacugcaaggccagaagcacccccgugacccugagcaaggaccagcugagcggcaucaacaacaucgccuucagcaacugaggacuaguguccaccugucccuccugggcugcuggauugucucguuuuccugccaaauaaacaggaucagcgcuuuacagaucuaaaaaaaaaaaaaaaaaaaaaaaaaaaaaaaaaaaaaaaaaaaaaaaaaaaaaaaaaaaaaaaaugcaucccccccccccccccccccccccccccccccaaaggcucuuuucagagccaccagaauu

SEQ ID NO: 4048 - RNA, 1943 nt, Artificial Sequence
  mRNA product Design e-4 comprising derived and/or modified sequence from HRSV(A2)__F_DSCav1_mut0 (opt5)
gggagacuccugucgggcggaaguaggaggaguagaguuuaaaaacaguacucuuuuuccgguucgggacguaguugaagcaacgacaagccggauaaccgcucuugagacaggaagcuuaccauggagcugcucauccugaaggccaacgcuauuaccacaauccuuacggccgugaccuucugcuuugcgagcggccagaauauuacagaagaguucuaccaauccaccuguucugcugucagcaaaggguaucuguccgcccucagaacaggaugguacaccucuguuaucacaauugaacugagcaacaucaaggagaauaaaugcaacggcaccgacgccaaggugaaacuuaucaagcaggaacuggauaaguauaaaaaugcugugacggagcuccagcugcugaugcaguccacccccgccacagggucuggaagcgcuauugccuccggcgucgcgguguguaagguucuccaccuggagggggaagugaacaaaaucaagagcgcccuucugucuaccaauaaagcugucgugucccucagcaacggaguuucugugcugacauuuaagguccuugaccugaagaauuacauugauaaacaacuccugccuauccugaacaagcaguccugcagcauuucuaauaucgagaccgugauugaguuccagcagaaaaacaaucggcuccuggaaaucacgcgcgaguuuuccgugaacgccggcgucacaaccccgguuagcacauauaugcuuaccaauuccgaacugcucucucugaucaacgacaugcccauuaccaacgaucaaaagaaacuuaugagcaauaacgugcagaucgugagacagcaguccuacagcauuauguguaucauuaaggaggaaguccuggcuuaugugguucaacucccucuguacggcgugaucgacacacccugcuggaaacugcauacgucuccucucuguaccacaaauaccaaggagggguccaacaucugccugacacggaccgaucgcggaugguacugugacaaugccggcagcgucucuuucuuuccccaggcggaaacgugcaaggugcagagcaacagaguuuucugugauacaaugaacuccagaacccugccuucugaggugaaucucugcaaugucgacauuuuuaacccgaaauaugauugcaagaucaugaccagcaaaacagacguguccagcucugucauuaccucccugggggccaucgugagcuguuacggaaagacaaaaugcacggcuucuaauaagaaccggggcauuaucaagaccuucuccaaugggugugauuauguuagcaacaaaggaguggacacagucuccgugggcaauacccuuuacuauguuaacaagcaagagggcaaaucucuguacgugaagggggaacccaucauuaacuuuuaugacccucucgucuuccccagcgaugaguuugacgccuccaucucucaggugaaugagaaaauuaaccagagccuggcuuucauccgcaaguccgaugaacugcuccacaaugugaacgccggaaagagcacaaccaauauuaugaucacgaccauuaucaucguuauuaucgucauucugcuuucucugaucgccgugggccuccugcuguacugcaaagcuagauccacaccugugacccuuagcaaggaccagcucucugggauuaacaauaucgcguucuccaacugaggacuaguguccaccugucccuccugggcugcuggauugucucguuuuccugccaaauaaacaggaucagcgcuuuacagaucuaaaaaaaaaaaaaaaaaaaaaaaaaaaaaaaaaaaaaaaaaaaaaaaaaaaaaaaaaaaaaaaaugcaucccccccccccccccccccccccccccccccaaaggcucuuuucagagccaccagaauu

SEQ ID NO: 4049 - RNA, 1943 nt, Artificial Sequence
  mRNA product Design e-4 comprising derived and/or modified sequence from HRSV(A2)__F_DSCav1_mut0 (opt6)
gggagacuccugucgggcggaaguaggaggaguagaguuuaaaaacaguacucuuuuuccgguucgggacguaguugaagcaacgacaagccggauaaccgcucuugagacaggaagcuuaccauggaacuacuaauacuaaaagccaaugcaauaacaaccauacuaaccgccguaacauuuuguuucgcaucaggucaaaacauaaccgaagaauuuuaucaaucaacaugcucagcaguaucaaaaggauacuuauccgcucuaagaacaggaugguacacaaguguaauuacaauagagcucucaaacauaaaagaaaacaaaugcaauggaacugacgcaaaaguuaaacuuauaaaacaagaacuagauaaauauaaaaaugcaguaaccgaauuacaacuccuaaugcaauccacaccugcuaccgguuccggaucagccauagcaucuggaguagccguaugcaaaguccuccaccuagaaggagaaguaaauaaaaucaaaucagcacuauuaucuaccaauaaagcaguugucucacuauccaauggcguaucaguacuaacauucaaaguauuagaccuuaaaaacuacauagacaaacaacuauuaccaauucugaacaaacaauccuguucaauaucaaacaucgaaacgguaauagaauuucaacaaaaaaauaacagauuacuugaaauaacaagagaauuuucaguaaaugcaggaguuacaacacccgucuccaccuacaugcucacaaauucagaauuauuaucacuuauaaacgacaugccaauaacuaacgaccaaaaaaaacuaaugucaaacaauguccaaauaguccgacaacaauccuacucaauaaugugcauuauaaaagaagaaguccuagccuacguuguccaacuacccuuauauggaguaauagauaccccaugcuggaaacuucauaccuccccccuaugcacaacaaacacaaaagaaggcucaaacaucugcuuaacacguacagaccgagguugguacugugauaacgcaggauccguaucauuuuucccacaagcagaaacaugcaaaguacaaucaaaccgcguuuuuugugacaccaugaacagcagaacccucccuucagaaguaaaccuaugcaacgucgauauauuuaacccaaaauacgauugcaaaauaaugacaucaaaaaccgaugucucaucuucaguaauaaccucucuaggagcaauagucucauguuacggaaaaacaaaaugcacagcaaguaauaaaaauagaggaauaauaaaaacauucucuaauggcugcgacuacguauccaauaaaggcguugacacaguauccguaggcaacacacucuacuauguuaacaaacaagaaggaaaaaguuuauacguuaaaggagaaccaauuauaaacuuuuacgacccacucguauucccaucugaugaauuugacgcaucaaucucacaaguaaaugaaaaaaucaaucagucccuugccuuuauaagaaaaucagaugaacuuuuacacaacguuaacgccggaaaaucaacaaccaauauaaugaucacaaccauaauaauaguuauaauuguaauuuuauuauccuuaauagccgucggacuacuacuauacugcaaagcaagaucuacacccguaacccuaucaaaagaccaacuaaguggaauaaauaacauugcauucucaaauuaaggacuaguguccaccugucccuccugggcugcuggauugucucguuuuccugccaaauaaacaggaucagcgcuuuacagaucuaaaaaaaaaaaaaaaaaaaaaaaaaaaaaaaaaaaaaaaaaaaaaaaaaaaaaaaaaaaaaaaaugcaucccccccccccccccccccccccccccccccaaaggcucuuuucagagccaccagaauu

SEQ ID NO: 4050 - RNA, 1943 nt, Artificial Sequence
  mRNA product Design e-4 comprising derived and/or modified sequence from HRSV(A2)__F_DSCav1_mut0 (opt11)
gggagacuccugucgggcggaaguaggaggaguagaguuuaaaaacaguacucuuuuuccgguucgggacguaguugaagcaacgacaagccggauaaccgcucuugagacaggaagcuuaccauggaacuccuaauacuaaaggcaaacgcaaucacuacaauucuaaccgccgugacauucugcuucgccuccggacaaaacaucaccgaagaauuuuaccaauccacaugcucggccgucaguaaaggcuaccucucggcucuccgaaccggcugguacaccuccgucaucaccaucgaacucuccaacaucaaagaaaacaaaugcaacggcaccgacgccaaagucaaacuaaucaaacaagaacucgacaaauacaaaaacgccgucacagaacuccaacuacuaaugcaaucaacacccgcuacaggaagcggcuccgccaucgccagcggcguagcugucugcaaaguccuccaccucgaaggugaagucaacaaaaucaaaucagcccuacucagcacaaacaaagccguuguaagccuauccaacggcgucuccguacuaacauucaaaguccuugaccucaagaacuacaucgacaaacaacuucucccaauccuaaacaaacaaagcugcucaauuuccaacaucgaaacaguaaucgaauuucaacaaaaaaacaaccgacuccucgaaaucacccgcgaauuuuccguuaacgccggcguuacaacccccgucuccaccuacaugcucaccaauuccgaacuacuaucacucauaaacgacaugccuaucacaaacgaccaaaaaaaacuaaugucaaacaauguccaaaucguccgccagcaaagcuauuccaucaugugcaucaucaaagaggaaguccucgccuacguaguccaacugccccucuacggcgucauugauacccccugcuggaaacuccacaccuccccccucugcaccacaaacaccaaagaagguuccaacaucugccuaacacgaaccgacagaggcugguacugcgacaacgccggcagcgucuccuucuucccccaagcagaaaccuguaaaguccagucuaaccgcgucuucugcgacacaaugaacucaagaacccuaccuuccgaaguaaaccucugcaacguagacaucuucaacccuaaauacgacugcaaaaucaugacuucaaaaacagacguaagcucuuccguaaucacuucccucggcgccaucguauccugcuacgguaaaaccaaaugcaccgccuccaacaaaaaccgagggaucauaaaaaccuucuccaacggcugcgacuacguaucuaacaaaggcgucgacaccgucuccgucggcaacacccucuauuacguaaacaaacaagagggcaaaucacuauacgucaaaggcgagccaaucauaaacuucuaugacccacucgucuucccuucagacgaauuugaugccagcaucagccaagucaacgaaaaaaucaaccaaucacucgccuucauccgcaaaagcgacgaacuccuucacaacgucaacgcaggcaaaucaaccaccaacaucaugaucaccaccaucaucaucgucaucaucguuauccuacucagccucaucgcaguuggucuucuccuuuacugcaaagcccgcuccacccccgucacccucaguaaagaccaacucagcggaaucaacaacauagcauucuccaacuaaggacuaguguccaccugucccuccugggcugcuggauugucucguuuuccugccaaauaaacaggaucagcgcuuuacagaucuaaaaaaaaaaaaaaaaaaaaaaaaaaaaaaaaaaaaaaaaaaaaaaaaaaaaaaaaaaaaaaaaugcaucccccccccccccccccccccccccccccccaaaggcucuuuucagagccaccagaauu

SEQ ID NO: 4051 - RNA, 1910 nt, Artificial Sequence
  mRNA product Design e-5 comprising derived and/or modified sequence from HRSV(A2)__F_DSCav1_mut0 (opt1)
gggagagcggcucggccauuuugucccagucaguccggaggcugcggcugcagaaguaccgccugcggaguaacugcaaagaagcuuaccauggagcugcucauccugaaggccaacgccaucaccaccauccugacggcggugaccuucugcuucgccagcggccagaacaucaccgaggaguucuaccaguccacgugcagcgccgucuccaagggguaccucagcgcccugcggaccggcugguacaccuccgugaucaccaucgagcugagcaacaucaaggagaacaagugcaacgggaccgacgccaaggugaagcucaucaagcaggagcuggacaaguacaagaacgcggucacggagcugcagcuccugaugcaguccaccccggcaaccggcuccggcuccgccaucgcgagcggcgucgccgugugcaaggugcugcaccucgagggggaggucaacaagaucaagagcgcccugcuguccaccaacaaggccguggugagccucuccaacggcgucagcgugcugaccuucaaggugcuggaccucaagaacuacaucgacaagcagcugcugcccauccugaacaagcagagcugcuccaucagcaacaucgagacggugaucgaguuccagcagaagaacaaccggcuccuggagaucacccgcgaguucagcgugaacgccggggucaccacccccguguccacguacaugcugaccaacagcgagcuccugucccugaucaacgacaugccgaucaccaacgaccagaagaagcucaugagcaacaacgugcagaucguccggcagcaguccuacagcaucaugugcaucaucaaggaggaggugcuggcguacgugguccagcugccccucuacggcgugaucgacacccccugcuggaagcugcacacgagcccccugugcaccaccaacaccaaggagggguccaacaucugccucacgcgcaccgaccggggcugguacugcgacaacgccggcagcgucuccuucuucccgcaggccgagaccugcaaggugcagagcaaccgcguguucugcgacaccaugaacucccggacgcugcccagcgagguaaaccucugcaacgucgacaucuucaaccccaaguacgacugcaagaucaugaccuccaagaccgacgugagcuccagcgugaucaccucccugggggccaucgucagcugcuacggcaagacgaagugcaccgccagcaacaagaaccgggggaucaucaagaccuucuccaacggcugcgacuacgugagcaacaagggcguggacaccguguccgucgggaacacccuguacuacgugaacaagcaggagggcaagagccucuacgugaagggggagcccaucaucaacuucuacgacccgcuggucuuccccuccgacgaguucgacgcgagcaucucccaggugaacgagaagaucaaccagagccuggccuucauccgcaaguccgacgagcugcuccacaacgugaacgccggcaagagcacgaccaacaucaugaucaccaccaucaucaucgucaucaucgugauccugcugucccucaucgccguggggcugcugcucuacugcaaggcccggagcacgcccgucacccuguccaaggaccagcugagcggcaucaacaacaucgcguucuccaacugaggacuaguguccaccugucccuccugggcugcuggauugucucguuuuccugccaaauaaacaggaucagcgcuuuacagaucuaaaaaaaaaaaaaaaaaaaaaaaaaaaaaaaaaaaaaaaaaaaaaaaaaaaaaaaaaaaaaaaaugcaucccccccccccccccccccccccccccccccaaaggcucuuuucagagccaccagaauu

SEQ ID NO: 4052 - RNA, 1910 nt, Artificial Sequence
  mRNA product Design e-5 comprising derived and/or modified sequence from HRSV(A2)__F_DSCav1_mut0 (opt1)
gggagagcggcucggccauuuugucccagucaguccggaggcugcggcugcagaaguaccgccugcggaguaacugcaaagaagcuuaccauggagcugcucauccugaaggccaacgccaucaccaccauccugacggcggugaccuucugcuucgccagcggccagaacaucaccgaggaguucuaccaguccacgugcagcgccgucuccaagggguaccucagcgcccugcgcaccggcugguacaccuccgugaucaccaucgagcugagcaacaucaaggagaacaagugcaacgggaccgacgccaaggugaagcucaucaagcaggagcuggacaaguacaagaacgcggucacggagcugcagcuccugaugcaguccacccccgccaccggcagcggguccgccaucgccagcggcguggcggugugcaagguccugcaccucgagggcgaggugaacaagaucaaguccgcccugcugagcaccaacaaggccguggucucccucagcaacgggguguccgugcugacguucaagguccuggaccucaagaacuacaucgacaagcagcugcugccgauccucaacaagcagagcugcuccaucagcaacaucgagaccgugaucgaguuccagcagaagaacaaccggcugcuggagaucacccgcgaguucuccgugaacgccggcgucaccacgcccgugagcaccuacaugcucaccaacagcgagcugcugucccucaucaacgacaugcccaucaccaacgaccagaagaagcugaugagcaacaacgugcagaucguccggcagcaguccuacagcaucaugugcaucaucaaggaggaggugcuggccuacgugguccagcucccccuguacggggugaucgacacgccgugcuggaagcugcacaccagcccccucugcaccaccaacacgaaggagggcuccaacaucugccugacccgcaccgaccgggggugguacugcgacaacgcgggcuccgugagcuucuucccccaggccgagaccugcaagguccaguccaaccgcguguucugcgacacgaugaacagccggacccuccccuccgaggucaaccugugcaacguggacaucuucaacccgaaguacgacugcaagaucaugaccagcaagaccgacguguccagcuccgucaucacgagccugggcgccaucguguccugcuacgggaagaccaagugcaccgccagcaacaagaaccggggcaucaucaagaccuucuccaacgggugcgacuacgugagcaacaagggcgucgacacggugagcgugggcaacacccucuacuacgucaacaagcaggaggggaagucccuguacgugaagggcgagcccaucaucaacuucuacgacccccugguguuccccagcgacgaguucgacgccuccaucagccaggucaacgagaagaucaaccagucccucgcguucauccgcaagagcgacgagcugcugcacaacgugaacgccgggaaguccaccaccaacaucaugaucaccacgaucaucaucgugaucaucgucauccuccugagccugaucgccgugggccuccugcuguacugcaaggcccgguccaccccggugacccugagcaaggaccagcucuccgggaucaacaacaucgccuucagcaacugaggacuaguguccaccugucccuccugggcugcuggauugucucguuuuccugccaaauaaacaggaucagcgcuuuacagaucuaaaaaaaaaaaaaaaaaaaaaaaaaaaaaaaaaaaaaaaaaaaaaaaaaaaaaaaaaaaaaaaaugcaucccccccccccccccccccccccccccccccaaaggcucuuuucagagccaccagaauu

SEQ ID NO: 4053 - RNA, 1910 nt, Artificial Sequence
  mRNA product Design e-5 comprising derived and/or modified sequence from HRSV(A2)__F_DSCav1_mut0 (opt2)
gggagagcggcucggccauuuugucccagucaguccggaggcugcggcugcagaaguaccgccugcggaguaacugcaaagaagcuuaccauggagcuccucauccucaaggccaacgccaucaccaccauccucaccgccgucaccuucugcuucgccuccggccagaacaucaccgaggaguucuaccaguccaccugcuccgccgucuccaagggcuaccucuccgcccuccgcaccggcugguacaccuccgucaucaccaucgagcucuccaacaucaaggagaacaagugcaacggcaccgacgccaaggucaagcucaucaagcaggagcucgacaaguacaagaacgccgucaccgagcuccagcuccucaugcaguccacccccgccaccggcuccggcuccgccaucgccuccggcgucgccgucugcaagguccuccaccucgagggcgaggucaacaagaucaaguccgcccuccucuccaccaacaaggccgucgucucccucuccaacggcgucuccguccucaccuucaagguccucgaccucaagaacuacaucgacaagcagcuccuccccauccucaacaagcaguccugcuccaucuccaacaucgagaccgucaucgaguuccagcagaagaacaaccgccuccucgagaucacccgcgaguucuccgucaacgccggcgucaccacccccgucuccaccuacaugcucaccaacuccgagcuccucucccucaucaacgacaugcccaucaccaacgaccagaagaagcucauguccaacaacguccagaucguccgccagcaguccuacuccaucaugugcaucaucaaggaggagguccucgccuacgucguccagcucccccucuacggcgucaucgacacccccugcuggaagcuccacaccuccccccucugcaccaccaacaccaaggagggcuccaacaucugccucacccgcaccgaccgcggcugguacugcgacaacgccggcuccgucuccuucuucccccaggccgagaccugcaagguccaguccaaccgcgucuucugcgacaccaugaacucccgcacccuccccuccgaggucaaccucugcaacgucgacaucuucaaccccaaguacgacugcaagaucaugaccuccaagaccgacgucuccuccuccgucaucaccucccucggcgccaucgucuccugcuacggcaagaccaagugcaccgccuccaacaagaaccgcggcaucaucaagaccuucuccaacggcugcgacuacgucuccaacaagggcgucgacaccgucuccgucggcaacacccucuacuacgucaacaagcaggagggcaagucccucuacgucaagggcgagcccaucaucaacuucuacgacccccucgucuuccccuccgacgaguucgacgccuccaucucccaggucaacgagaagaucaaccagucccucgccuucauccgcaaguccgacgagcuccuccacaacgucaacgccggcaaguccaccaccaacaucaugaucaccaccaucaucaucgucaucaucgucauccuccucucccucaucgccgucggccuccuccucuacugcaaggcccgcuccacccccgucacccucuccaaggaccagcucuccggcaucaacaacaucgccuucuccaacugaggacuaguguccaccugucccuccugggcugcuggauugucucguuuuccugccaaauaaacaggaucagcgcuuuacagaucuaaaaaaaaaaaaaaaaaaaaaaaaaaaaaaaaaaaaaaaaaaaaaaaaaaaaaaaaaaaaaaaaugcaucccccccccccccccccccccccccccccccaaaggcucuuuucagagccaccagaauu

SEQ ID NO: 4054 - RNA, 1910 nt, Artificial Sequence
  mRNA product Design e-5 comprising derived and/or modified sequence from HRSV(A2)__F_DSCav1_mut0 (opt3)
gggagagcggcucggccauuuugucccagucaguccggaggcugcggcugcagaaguaccgccugcggaguaacugcaaagaagcuuaccauggagcugcucauccuuaaggccaacgcuauuaccacaauacugacugcagugacguucugcuuugccagcggccagaauaucaccgaagaguucuaccaauccacauguucugcggucucaaaaggguauuugagugcuuuaagaacuggaugguacaccagcguuauuacaaucgaacuguccaacauuaaggagaauaaaugcaacgguaccgacgccaaggugaaacuaaucaagcaggaacucgauaaguauaaaaaugcaguaacugagcugcagcuucugaugcagucuacacccgccaccggcucggggucagcuauagcaagcggaguggccgucuguaagguguugcaccucgagggcgaaguuaacaaaaucaagagugcucugcuguccacgaauaaagccguggucucucucagcaacgguguguccguauuaacuuuuaagguucuggaccuuaagaauuacauugauaaacaauugcugccuauccuaaacaagcagucaugcaguauuagcaauaucgagaccgugauagaguuccagcagaaaaacaauaggcuccuggaaauuacacgggaguuuucugucaacgcgggggugacuaccccaguguccacauauaugcuuaccaauucagaacuguugagccucaucaacgacaugccgauuacgaacgaucaaaagaaacugaugaguaauaacguccagaucguucgccagcagucuuacuccaucauguguauuauaaaggaggaaguguuagcauauguagugcaacugccccucuacggagucaucgacacuccuugcuggaaacuucauacaagcccacuguguaccacuaauacaaaggagggcucgaacauuugcuugacccgaacggaucguggcugguacugugacaaugccgggucuguguccuucuuuccccaggcugaaaccugcaagguucagucaaacagaguguucugugauacaaugaauaguagaacucugccuagcgaggucaaccucugcaauguggacaucuuuaacccaaaauaugauugcaagauaaugaccuccaaaacagacguaucuagcucaguuauuaccagucugggagccaucguguccuguuacgguaagacuaaaugcacagcaagcaauaagaacaggggcaucauuaagaccuucucuaaugggugugauuaugucucaaacaaaggaguggacacugucagugugggcaauacgcuuuacuauguuaacaagcaagaggguaaaagccuguacgugaagggggaacccaucauuaacuuuuaugacccuuugguauucccauccgaugaguuugacgcuucuauaucgcaggucaaugagaaaaucaaccagagccucgccuucauucggaaguccgaugaacuguuacacaaugugaacgcgggaaagucaacaaccaauaucaugaucacuaccauuauaaucguuauuaucgugauucugcuaagucucaucgccgucggccugcuuuuguacugcaaagcacgcucuacaccggugacccugagcaaggaccagcucuccggcauaaacaauaucgcuuucucaaacugaggacuaguguccaccugucccuccugggcugcuggauugucucguuuuccugccaaauaaacaggaucagcgcuuuacagaucuaaaaaaaaaaaaaaaaaaaaaaaaaaaaaaaaaaaaaaaaaaaaaaaaaaaaaaaaaaaaaaaaugcaucccccccccccccccccccccccccccccccaaaggcucuuuucagagccaccagaauu

SEQ ID NO: 4055 - RNA, 1910 nt, Artificial Sequence
  mRNA product Design e-5 comprising derived and/or modified sequence from HRSV(A2)__F_DSCav1_mut0 (opt4)
gggagagcggcucggccauuuugucccagucaguccggaggcugcggcugcagaaguaccgccugcggaguaacugcaaagaagcuuaccauggagcugcugauccugaaggccaacgccaucaccaccauccugaccgccgugaccuucugcuucgccagcggccagaacaucaccgaggaguucuaccagagcaccugcagcgccgugagcaagggcuaccugagcgcccugagaaccggcugguacaccagcgugaucaccaucgagcugagcaacaucaaggagaacaagugcaacggcaccgacgccaaggugaagcugaucaagcaggagcuggacaaguacaagaacgccgugaccgagcugcagcugcugaugcagagcacccccgccaccggcagcggcagcgccaucgccagcggcguggccgugugcaaggugcugcaccuggagggcgaggugaacaagaucaagagcgcccugcugagcaccaacaaggccguggugagccugagcaacggcgugagcgugcugaccuucaaggugcuggaccugaagaacuacaucgacaagcagcugcugcccauccugaacaagcagagcugcagcaucagcaacaucgagaccgugaucgaguuccagcagaagaacaacagacugcuggagaucaccagagaguucagcgugaacgccggcgugaccacccccgugagcaccuacaugcugaccaacagcgagcugcugagccugaucaacgacaugcccaucaccaacgaccagaagaagcugaugagcaacaacgugcagaucgugagacagcagagcuacagcaucaugugcaucaucaaggaggaggugcuggccuacguggugcagcugccccuguacggcgugaucgacacccccugcuggaagcugcacaccagcccccugugcaccaccaacaccaaggagggcagcaacaucugccugaccagaaccgacagaggcugguacugcgacaacgccggcagcgugagcuucuucccccaggccgagaccugcaaggugcagagcaacagaguguucugcgacaccaugaacagcagaacccugcccagcgaggugaaccugugcaacguggacaucuucaaccccaaguacgacugcaagaucaugaccagcaagaccgacgugagcagcagcgugaucaccagccugggcgccaucgugagcugcuacggcaagaccaagugcaccgccagcaacaagaacagaggcaucaucaagaccuucagcaacggcugcgacuacgugagcaacaagggcguggacaccgugagcgugggcaacacccuguacuacgugaacaagcaggagggcaagagccuguacgugaagggcgagcccaucaucaacuucuacgacccccugguguuccccagcgacgaguucgacgccagcaucagccaggugaacgagaagaucaaccagagccuggccuucaucagaaagagcgacgagcugcugcacaacgugaacgccggcaagagcaccaccaacaucaugaucaccaccaucaucaucgugaucaucgugauccugcugagccugaucgccgugggccugcugcuguacugcaaggccagaagcacccccgugacccugagcaaggaccagcugagcggcaucaacaacaucgccuucagcaacugaggacuaguguccaccugucccuccugggcugcuggauugucucguuuuccugccaaauaaacaggaucagcgcuuuacagaucuaaaaaaaaaaaaaaaaaaaaaaaaaaaaaaaaaaaaaaaaaaaaaaaaaaaaaaaaaaaaaaaaugcaucccccccccccccccccccccccccccccccaaaggcucuuuucagagccaccagaauu

SEQ ID NO: 4056 - RNA, 1910 nt, Artificial Sequence
  mRNA product Design e-5 comprising derived and/or modified sequence from HRSV(A2)__F_DSCav1_mut0 (opt5)
gggagagcggcucggccauuuugucccagucaguccggaggcugcggcugcagaaguaccgccugcggaguaacugcaaagaagcuuaccauggagcugcucauccugaaggccaacgcuauuaccacaauccuuacggccgugaccuucugcuuugcgagcggccagaauauuacagaagaguucuaccaauccaccuguucugcugucagcaaaggguaucuguccgcccucagaacaggaugguacaccucuguuaucacaauugaacugagcaacaucaaggagaauaaaugcaacggcaccgacgccaaggugaaacuuaucaagcaggaacuggauaaguauaaaaaugcugugacggagcuccagcugcugaugcaguccacccccgccacagggucuggaagcgcuauugccuccggcgucgcgguguguaagguucuccaccuggagggggaagugaacaaaaucaagagcgcccuucugucuaccaauaaagcugucgugucccucagcaacggaguuucugugcugacauuuaagguccuugaccugaagaauuacauugauaaacaacuccugccuauccugaacaagcaguccugcagcauuucuaauaucgagaccgugauugaguuccagcagaaaaacaaucggcuccuggaaaucacgcgcgaguuuuccgugaacgccggcgucacaaccccgguuagcacauauaugcuuaccaauuccgaacugcucucucugaucaacgacaugcccauuaccaacgaucaaaagaaacuuaugagcaauaacgugcagaucgugagacagcaguccuacagcauuauguguaucauuaaggaggaaguccuggcuuaugugguucaacucccucuguacggcgugaucgacacacccugcuggaaacugcauacgucuccucucuguaccacaaauaccaaggagggguccaacaucugccugacacggaccgaucgcggaugguacugugacaaugccggcagcgucucuuucuuuccccaggcggaaacgugcaaggugcagagcaacagaguuuucugugauacaaugaacuccagaacccugccuucugaggugaaucucugcaaugucgacauuuuuaacccgaaauaugauugcaagaucaugaccagcaaaacagacguguccagcucugucauuaccucccugggggccaucgugagcuguuacggaaagacaaaaugcacggcuucuaauaagaaccggggcauuaucaagaccuucuccaaugggugugauuauguuagcaacaaaggaguggacacagucuccgugggcaauacccuuuacuauguuaacaagcaagagggcaaaucucuguacgugaagggggaacccaucauuaacuuuuaugacccucucgucuuccccagcgaugaguuugacgccuccaucucucaggugaaugagaaaauuaaccagagccuggcuuucauccgcaaguccgaugaacugcuccacaaugugaacgccggaaagagcacaaccaauauuaugaucacgaccauuaucaucguuauuaucgucauucugcuuucucugaucgccgugggccuccugcuguacugcaaagcuagauccacaccugugacccuuagcaaggaccagcucucugggauuaacaauaucgcguucuccaacugaggacuaguguccaccugucccuccugggcugcuggauugucucguuuuccugccaaauaaacaggaucagcgcuuuacagaucuaaaaaaaaaaaaaaaaaaaaaaaaaaaaaaaaaaaaaaaaaaaaaaaaaaaaaaaaaaaaaaaaugcaucccccccccccccccccccccccccccccccaaaggcucuuuucagagccaccagaauu

SEQ ID NO: 4057 - RNA, 1910 nt, Artificial Sequence
  mRNA product Design e-5 comprising derived and/or modified sequence from HRSV(A2)__F_DSCav1_mut0 (opt6)
gggagagcggcucggccauuuugucccagucaguccggaggcugcggcugcagaaguaccgccugcggaguaacugcaaagaagcuuaccauggaacuacuaauacuaaaagccaaugcaauaacaaccauacuaaccgccguaacauuuuguuucgcaucaggucaaaacauaaccgaagaauuuuaucaaucaacaugcucagcaguaucaaaaggauacuuauccgcucuaagaacaggaugguacacaaguguaauuacaauagagcucucaaacauaaaagaaaacaaaugcaauggaacugacgcaaaaguuaaacuuauaaaacaagaacuagauaaauauaaaaaugcaguaaccgaauuacaacuccuaaugcaauccacaccugcuaccgguuccggaucagccauagcaucuggaguagccguaugcaaaguccuccaccuagaaggagaaguaaauaaaaucaaaucagcacuauuaucuaccaauaaagcaguugucucacuauccaauggcguaucaguacuaacauucaaaguauuagaccuuaaaaacuacauagacaaacaacuauuaccaauucugaacaaacaauccuguucaauaucaaacaucgaaacgguaauagaauuucaacaaaaaaauaacagauuacuugaaauaacaagagaauuuucaguaaaugcaggaguuacaacacccgucuccaccuacaugcucacaaauucagaauuauuaucacuuauaaacgacaugccaauaacuaacgaccaaaaaaaacuaaugucaaacaauguccaaauaguccgacaacaauccuacucaauaaugugcauuauaaaagaagaaguccuagccuacguuguccaacuacccuuauauggaguaauagauaccccaugcuggaaacuucauaccuccccccuaugcacaacaaacacaaaagaaggcucaaacaucugcuuaacacguacagaccgagguugguacugugauaacgcaggauccguaucauuuuucccacaagcagaaacaugcaaaguacaaucaaaccgcguuuuuugugacaccaugaacagcagaacccucccuucagaaguaaaccuaugcaacgucgauauauuuaacccaaaauacgauugcaaaauaaugacaucaaaaaccgaugucucaucuucaguaauaaccucucuaggagcaauagucucauguuacggaaaaacaaaaugcacagcaaguaauaaaaauagaggaauaauaaaaacauucucuaauggcugcgacuacguauccaauaaaggcguugacacaguauccguaggcaacacacucuacuauguuaacaaacaagaaggaaaaaguuuauacguuaaaggagaaccaauuauaaacuuuuacgacccacucguauucccaucugaugaauuugacgcaucaaucucacaaguaaaugaaaaaaucaaucagucccuugccuuuauaagaaaaucagaugaacuuuuacacaacguuaacgccggaaaaucaacaaccaauauaaugaucacaaccauaauaauaguuauaauuguaauuuuauuauccuuaauagccgucggacuacuacuauacugcaaagcaagaucuacacccguaacccuaucaaaagaccaacuaaguggaauaaauaacauugcauucucaaauuaaggacuaguguccaccugucccuccugggcugcuggauugucucguuuuccugccaaauaaacaggaucagcgcuuuacagaucuaaaaaaaaaaaaaaaaaaaaaaaaaaaaaaaaaaaaaaaaaaaaaaaaaaaaaaaaaaaaaaaaugcaucccccccccccccccccccccccccccccccaaaggcucuuuucagagccaccagaauu

SEQ ID NO: 4058 - RNA, 1910 nt, Artificial Sequence
  mRNA product Design e-5 comprising derived and/or modified sequence from HRSV(A2)__F_DSCav1_mut0 (opt11)
gggagagcggcucggccauuuugucccagucaguccggaggcugcggcugcagaaguaccgccugcggaguaacugcaaagaagcuuaccauggaacuccuaauacuaaaggcaaacgcaaucacuacaauucuaaccgccgugacauucugcuucgccuccggacaaaacaucaccgaagaauuuuaccaauccacaugcucggccgucaguaaaggcuaccucucggcucuccgaaccggcugguacaccuccgucaucaccaucgaacucuccaacaucaaagaaaacaaaugcaacggcaccgacgccaaagucaaacuaaucaaacaagaacucgacaaauacaaaaacgccgucacagaacuccaacuacuaaugcaaucaacacccgcuacaggaagcggcuccgccaucgccagcggcguagcugucugcaaaguccuccaccucgaaggugaagucaacaaaaucaaaucagcccuacucagcacaaacaaagccguuguaagccuauccaacggcgucuccguacuaacauucaaaguccuugaccucaagaacuacaucgacaaacaacuucucccaauccuaaacaaacaaagcugcucaauuuccaacaucgaaacaguaaucgaauuucaacaaaaaaacaaccgacuccucgaaaucacccgcgaauuuuccguuaacgccggcguuacaacccccgucuccaccuacaugcucaccaauuccgaacuacuaucacucauaaacgacaugccuaucacaaacgaccaaaaaaaacuaaugucaaacaauguccaaaucguccgccagcaaagcuauuccaucaugugcaucaucaaagaggaaguccucgccuacguaguccaacugccccucuacggcgucauugauacccccugcuggaaacuccacaccuccccccucugcaccacaaacaccaaagaagguuccaacaucugccuaacacgaaccgacagaggcugguacugcgacaacgccggcagcgucuccuucuucccccaagcagaaaccuguaaaguccagucuaaccgcgucuucugcgacacaaugaacucaagaacccuaccuuccgaaguaaaccucugcaacguagacaucuucaacccuaaauacgacugcaaaaucaugacuucaaaaacagacguaagcucuuccguaaucacuucccucggcgccaucguauccugcuacgguaaaaccaaaugcaccgccuccaacaaaaaccgagggaucauaaaaaccuucuccaacggcugcgacuacguaucuaacaaaggcgucgacaccgucuccgucggcaacacccucuauuacguaaacaaacaagagggcaaaucacuauacgucaaaggcgagccaaucauaaacuucuaugacccacucgucuucccuucagacgaauuugaugccagcaucagccaagucaacgaaaaaaucaaccaaucacucgccuucauccgcaaaagcgacgaacuccuucacaacgucaacgcaggcaaaucaaccaccaacaucaugaucaccaccaucaucaucgucaucaucguuauccuacucagccucaucgcaguuggucuucuccuuuacugcaaagcccgcuccacccccgucacccucaguaaagaccaacucagcggaaucaacaacauagcauucuccaacuaaggacuaguguccaccugucccuccugggcugcuggauugucucguuuuccugccaaauaaacaggaucagcgcuuuacagaucuaaaaaaaaaaaaaaaaaaaaaaaaaaaaaaaaaaaaaaaaaaaaaaaaaaaaaaaaaaaaaaaaugcaucccccccccccccccccccccccccccccccaaaggcucuuuucagagccaccagaauu

SEQ ID NO: 4059 - RNA, 1977 nt, Artificial Sequence
  mRNA product Design e-6 comprising derived and/or modified sequence from HRSV(A2)__F_DSCav1_mut0 (opt1)
gggagagcggcucggccauuuugucccagucaguccggaggcugcggcugcagaaguaccgccugcggaguaacugcaaagaagcuuaccauggagcugcucauccugaaggccaacgccaucaccaccauccugacggcggugaccuucugcuucgccagcggccagaacaucaccgaggaguucuaccaguccacgugcagcgccgucuccaagggguaccucagcgcccugcggaccggcugguacaccuccgugaucaccaucgagcugagcaacaucaaggagaacaagugcaacgggaccgacgccaaggugaagcucaucaagcaggagcuggacaaguacaagaacgcggucacggagcugcagcuccugaugcaguccaccccggcaaccggcuccggcuccgccaucgcgagcggcgucgccgugugcaaggugcugcaccucgagggggaggucaacaagaucaagagcgcccugcuguccaccaacaaggccguggugagccucuccaacggcgucagcgugcugaccuucaaggugcuggaccucaagaacuacaucgacaagcagcugcugcccauccugaacaagcagagcugcuccaucagcaacaucgagacggugaucgaguuccagcagaagaacaaccggcuccuggagaucacccgcgaguucagcgugaacgccggggucaccacccccguguccacguacaugcugaccaacagcgagcuccugucccugaucaacgacaugccgaucaccaacgaccagaagaagcucaugagcaacaacgugcagaucguccggcagcaguccuacagcaucaugugcaucaucaaggaggaggugcuggcguacgugguccagcugccccucuacggcgugaucgacacccccugcuggaagcugcacacgagcccccugugcaccaccaacaccaaggagggguccaacaucugccucacgcgcaccgaccggggcugguacugcgacaacgccggcagcgucuccuucuucccgcaggccgagaccugcaaggugcagagcaaccgcguguucugcgacaccaugaacucccggacgcugcccagcgagguaaaccucugcaacgucgacaucuucaaccccaaguacgacugcaagaucaugaccuccaagaccgacgugagcuccagcgugaucaccucccugggggccaucgucagcugcuacggcaagacgaagugcaccgccagcaacaagaaccgggggaucaucaagaccuucuccaacggcugcgacuacgugagcaacaagggcguggacaccguguccgucgggaacacccuguacuacgugaacaagcaggagggcaagagccucuacgugaagggggagcccaucaucaacuucuacgacccgcuggucuuccccuccgacgaguucgacgcgagcaucucccaggugaacgagaagaucaaccagagccuggccuucauccgcaaguccgacgagcugcuccacaacgugaacgccggcaagagcacgaccaacaucaugaucaccaccaucaucaucgucaucaucgugauccugcugucccucaucgccguggggcugcugcucuacugcaaggcccggagcacgcccgucacccuguccaaggaccagcugagcggcaucaacaacaucgcguucuccaacugaggacuaguacuggcugcaucucccuuuccucuguccuccauccuucucccaggauggugaagggggaccugguacccagugauccccaccccaggauccuaaaucaugacuuaccugcuaauaaaaacucauuggaaaagugagaagaucuaaaaaaaaaaaaaaaaaaaaaaaaaaaaaaaaaaaaaaaaaaaaaaaaaaaaaaaaaaaaaaaaugcaucccccccccccccccccccccccccccccccaaaggcucuuuucagagccaccagaauu

SEQ ID NO: 4060 - RNA, 1977 nt, Artificial Sequence
  mRNA product Design e-6 comprising derived and/or modified sequence from HRSV(A2)__F_DSCav1_mut0 (opt1)
gggagagcggcucggccauuuugucccagucaguccggaggcugcggcugcagaaguaccgccugcggaguaacugcaaagaagcuuaccauggagcugcucauccugaaggccaacgccaucaccaccauccugacggcggugaccuucugcuucgccagcggccagaacaucaccgaggaguucuaccaguccacgugcagcgccgucuccaagggguaccucagcgcccugcgcaccggcugguacaccuccgugaucaccaucgagcugagcaacaucaaggagaacaagugcaacgggaccgacgccaaggugaagcucaucaagcaggagcuggacaaguacaagaacgcggucacggagcugcagcuccugaugcaguccacccccgccaccggcagcggguccgccaucgccagcggcguggcggugugcaagguccugcaccucgagggcgaggugaacaagaucaaguccgcccugcugagcaccaacaaggccguggucucccucagcaacgggguguccgugcugacguucaagguccuggaccucaagaacuacaucgacaagcagcugcugccgauccucaacaagcagagcugcuccaucagcaacaucgagaccgugaucgaguuccagcagaagaacaaccggcugcuggagaucacccgcgaguucuccgugaacgccggcgucaccacgcccgugagcaccuacaugcucaccaacagcgagcugcugucccucaucaacgacaugcccaucaccaacgaccagaagaagcugaugagcaacaacgugcagaucguccggcagcaguccuacagcaucaugugcaucaucaaggaggaggugcuggccuacgugguccagcucccccuguacggggugaucgacacgccgugcuggaagcugcacaccagcccccucugcaccaccaacacgaaggagggcuccaacaucugccugacccgcaccgaccgggggugguacugcgacaacgcgggcuccgugagcuucuucccccaggccgagaccugcaagguccaguccaaccgcguguucugcgacacgaugaacagccggacccuccccuccgaggucaaccugugcaacguggacaucuucaacccgaaguacgacugcaagaucaugaccagcaagaccgacguguccagcuccgucaucacgagccugggcgccaucguguccugcuacgggaagaccaagugcaccgccagcaacaagaaccggggcaucaucaagaccuucuccaacgggugcgacuacgugagcaacaagggcgucgacacggugagcgugggcaacacccucuacuacgucaacaagcaggaggggaagucccuguacgugaagggcgagcccaucaucaacuucuacgacccccugguguuccccagcgacgaguucgacgccuccaucagccaggucaacgagaagaucaaccagucccucgcguucauccgcaagagcgacgagcugcugcacaacgugaacgccgggaaguccaccaccaacaucaugaucaccacgaucaucaucgugaucaucgucauccuccugagccugaucgccgugggccuccugcuguacugcaaggcccgguccaccccggugacccugagcaaggaccagcucuccgggaucaacaacaucgccuucagcaacugaggacuaguacuggcugcaucucccuuuccucuguccuccauccuucucccaggauggugaagggggaccugguacccagugauccccaccccaggauccuaaaucaugacuuaccugcuaauaaaaacucauuggaaaagugagaagaucuaaaaaaaaaaaaaaaaaaaaaaaaaaaaaaaaaaaaaaaaaaaaaaaaaaaaaaaaaaaaaaaaugcaucccccccccccccccccccccccccccccccaaaggcucuuuucagagccaccagaauu

SEQ ID NO: 4061 - RNA, 1977 nt, Artificial Sequence
  mRNA product Design e-6 comprising derived and/or modified sequence from HRSV(A2)__F_DSCav1_mut0 (opt2)
gggagagcggcucggccauuuugucccagucaguccggaggcugcggcugcagaaguaccgccugcggaguaacugcaaagaagcuuaccauggagcuccucauccucaaggccaacgccaucaccaccauccucaccgccgucaccuucugcuucgccuccggccagaacaucaccgaggaguucuaccaguccaccugcuccgccgucuccaagggcuaccucuccgcccuccgcaccggcugguacaccuccgucaucaccaucgagcucuccaacaucaaggagaacaagugcaacggcaccgacgccaaggucaagcucaucaagcaggagcucgacaaguacaagaacgccgucaccgagcuccagcuccucaugcaguccacccccgccaccggcuccggcuccgccaucgccuccggcgucgccgucugcaagguccuccaccucgagggcgaggucaacaagaucaaguccgcccuccucuccaccaacaaggccgucgucucccucuccaacggcgucuccguccucaccuucaagguccucgaccucaagaacuacaucgacaagcagcuccuccccauccucaacaagcaguccugcuccaucuccaacaucgagaccgucaucgaguuccagcagaagaacaaccgccuccucgagaucacccgcgaguucuccgucaacgccggcgucaccacccccgucuccaccuacaugcucaccaacuccgagcuccucucccucaucaacgacaugcccaucaccaacgaccagaagaagcucauguccaacaacguccagaucguccgccagcaguccuacuccaucaugugcaucaucaaggaggagguccucgccuacgucguccagcucccccucuacggcgucaucgacacccccugcuggaagcuccacaccuccccccucugcaccaccaacaccaaggagggcuccaacaucugccucacccgcaccgaccgcggcugguacugcgacaacgccggcuccgucuccuucuucccccaggccgagaccugcaagguccaguccaaccgcgucuucugcgacaccaugaacucccgcacccuccccuccgaggucaaccucugcaacgucgacaucuucaaccccaaguacgacugcaagaucaugaccuccaagaccgacgucuccuccuccgucaucaccucccucggcgccaucgucuccugcuacggcaagaccaagugcaccgccuccaacaagaaccgcggcaucaucaagaccuucuccaacggcugcgacuacgucuccaacaagggcgucgacaccgucuccgucggcaacacccucuacuacgucaacaagcaggagggcaagucccucuacgucaagggcgagcccaucaucaacuucuacgacccccucgucuuccccuccgacgaguucgacgccuccaucucccaggucaacgagaagaucaaccagucccucgccuucauccgcaaguccgacgagcuccuccacaacgucaacgccggcaaguccaccaccaacaucaugaucaccaccaucaucaucgucaucaucgucauccuccucucccucaucgccgucggccuccuccucuacugcaaggcccgcuccacccccgucacccucuccaaggaccagcucuccggcaucaacaacaucgccuucuccaacugaggacuaguacuggcugcaucucccuuuccucuguccuccauccuucucccaggauggugaagggggaccugguacccagugauccccaccccaggauccuaaaucaugacuuaccugcuaauaaaaacucauuggaaaagugagaagaucuaaaaaaaaaaaaaaaaaaaaaaaaaaaaaaaaaaaaaaaaaaaaaaaaaaaaaaaaaaaaaaaaugcaucccccccccccccccccccccccccccccccaaaggcucuuuucagagccaccagaauu

SEQ ID NO: 4062 - RNA, 1977 nt, Artificial Sequence
  mRNA product Design e-6 comprising derived and/or modified sequence from HRSV(A2)__F_DSCav1_mut0 (opt3)
gggagagcggcucggccauuuugucccagucaguccggaggcugcggcugcagaaguaccgccugcggaguaacugcaaagaagcuuaccauggagcugcucauccuuaaggccaacgcuauuaccacaauacugacugcagugacguucugcuuugccagcggccagaauaucaccgaagaguucuaccaauccacauguucugcggucucaaaaggguauuugagugcuuuaagaacuggaugguacaccagcguuauuacaaucgaacuguccaacauuaaggagaauaaaugcaacgguaccgacgccaaggugaaacuaaucaagcaggaacucgauaaguauaaaaaugcaguaacugagcugcagcuucugaugcagucuacacccgccaccggcucggggucagcuauagcaagcggaguggccgucuguaagguguugcaccucgagggcgaaguuaacaaaaucaagagugcucugcuguccacgaauaaagccguggucucucucagcaacgguguguccguauuaacuuuuaagguucuggaccuuaagaauuacauugauaaacaauugcugccuauccuaaacaagcagucaugcaguauuagcaauaucgagaccgugauagaguuccagcagaaaaacaauaggcuccuggaaauuacacgggaguuuucugucaacgcgggggugacuaccccaguguccacauauaugcuuaccaauucagaacuguugagccucaucaacgacaugccgauuacgaacgaucaaaagaaacugaugaguaauaacguccagaucguucgccagcagucuuacuccaucauguguauuauaaaggaggaaguguuagcauauguagugcaacugccccucuacggagucaucgacacuccuugcuggaaacuucauacaagcccacuguguaccacuaauacaaaggagggcucgaacauuugcuugacccgaacggaucguggcugguacugugacaaugccgggucuguguccuucuuuccccaggcugaaaccugcaagguucagucaaacagaguguucugugauacaaugaauaguagaacucugccuagcgaggucaaccucugcaauguggacaucuuuaacccaaaauaugauugcaagauaaugaccuccaaaacagacguaucuagcucaguuauuaccagucugggagccaucguguccuguuacgguaagacuaaaugcacagcaagcaauaagaacaggggcaucauuaagaccuucucuaaugggugugauuaugucucaaacaaaggaguggacacugucagugugggcaauacgcuuuacuauguuaacaagcaagaggguaaaagccuguacgugaagggggaacccaucauuaacuuuuaugacccuuugguauucccauccgaugaguuugacgcuucuauaucgcaggucaaugagaaaaucaaccagagccucgccuucauucggaaguccgaugaacuguuacacaaugugaacgcgggaaagucaacaaccaauaucaugaucacuaccauuauaaucguuauuaucgugauucugcuaagucucaucgccgucggccugcuuuuguacugcaaagcacgcucuacaccggugacccugagcaaggaccagcucuccggcauaaacaauaucgcuuucucaaacugaggacuaguacuggcugcaucucccuuuccucuguccuccauccuucucccaggauggugaagggggaccugguacccagugauccccaccccaggauccuaaaucaugacuuaccugcuaauaaaaacucauuggaaaagugagaagaucuaaaaaaaaaaaaaaaaaaaaaaaaaaaaaaaaaaaaaaaaaaaaaaaaaaaaaaaaaaaaaaaaugcaucccccccccccccccccccccccccccccccaaaggcucuuuucagagccaccagaauu

SEQ ID NO: 4063 - RNA, 1977 nt, Artificial Sequence
  mRNA product Design e-6 comprising derived and/or modified sequence from HRSV(A2)__F_DSCav1_mut0 (opt4)
gggagagcggcucggccauuuugucccagucaguccggaggcugcggcugcagaaguaccgccugcggaguaacugcaaagaagcuuaccauggagcugcugauccugaaggccaacgccaucaccaccauccugaccgccgugaccuucugcuucgccagcggccagaacaucaccgaggaguucuaccagagcaccugcagcgccgugagcaagggcuaccugagcgcccugagaaccggcugguacaccagcgugaucaccaucgagcugagcaacaucaaggagaacaagugcaacggcaccgacgccaaggugaagcugaucaagcaggagcuggacaaguacaagaacgccgugaccgagcugcagcugcugaugcagagcacccccgccaccggcagcggcagcgccaucgccagcggcguggccgugugcaaggugcugcaccuggagggcgaggugaacaagaucaagagcgcccugcugagcaccaacaaggccguggugagccugagcaacggcgugagcgugcugaccuucaaggugcuggaccugaagaacuacaucgacaagcagcugcugcccauccugaacaagcagagcugcagcaucagcaacaucgagaccgugaucgaguuccagcagaagaacaacagacugcuggagaucaccagagaguucagcgugaacgccggcgugaccacccccgugagcaccuacaugcugaccaacagcgagcugcugagccugaucaacgacaugcccaucaccaacgaccagaagaagcugaugagcaacaacgugcagaucgugagacagcagagcuacagcaucaugugcaucaucaaggaggaggugcuggccuacguggugcagcugccccuguacggcgugaucgacacccccugcuggaagcugcacaccagcccccugugcaccaccaacaccaaggagggcagcaacaucugccugaccagaaccgacagaggcugguacugcgacaacgccggcagcgugagcuucuucccccaggccgagaccugcaaggugcagagcaacagaguguucugcgacaccaugaacagcagaacccugcccagcgaggugaaccugugcaacguggacaucuucaaccccaaguacgacugcaagaucaugaccagcaagaccgacgugagcagcagcgugaucaccagccugggcgccaucgugagcugcuacggcaagaccaagugcaccgccagcaacaagaacagaggcaucaucaagaccuucagcaacggcugcgacuacgugagcaacaagggcguggacaccgugagcgugggcaacacccuguacuacgugaacaagcaggagggcaagagccuguacgugaagggcgagcccaucaucaacuucuacgacccccugguguuccccagcgacgaguucgacgccagcaucagccaggugaacgagaagaucaaccagagccuggccuucaucagaaagagcgacgagcugcugcacaacgugaacgccggcaagagcaccaccaacaucaugaucaccaccaucaucaucgugaucaucgugauccugcugagccugaucgccgugggccugcugcuguacugcaaggccagaagcacccccgugacccugagcaaggaccagcugagcggcaucaacaacaucgccuucagcaacugaggacuaguacuggcugcaucucccuuuccucuguccuccauccuucucccaggauggugaagggggaccugguacccagugauccccaccccaggauccuaaaucaugacuuaccugcuaauaaaaacucauuggaaaagugagaagaucuaaaaaaaaaaaaaaaaaaaaaaaaaaaaaaaaaaaaaaaaaaaaaaaaaaaaaaaaaaaaaaaaugcaucccccccccccccccccccccccccccccccaaaggcucuuuucagagccaccagaauu

SEQ ID NO: 4064 - RNA, 1977 nt, Artificial Sequence
  mRNA product Design e-6 comprising derived and/or modified sequence from HRSV(A2)__F_DSCav1_mut0 (opt5)
gggagagcggcucggccauuuugucccagucaguccggaggcugcggcugcagaaguaccgccugcggaguaacugcaaagaagcuuaccauggagcugcucauccugaaggccaacgcuauuaccacaauccuuacggccgugaccuucugcuuugcgagcggccagaauauuacagaagaguucuaccaauccaccuguucugcugucagcaaaggguaucuguccgcccucagaacaggaugguacaccucuguuaucacaauugaacugagcaacaucaaggagaauaaaugcaacggcaccgacgccaaggugaaacuuaucaagcaggaacuggauaaguauaaaaaugcugugacggagcuccagcugcugaugcaguccacccccgccacagggucuggaagcgcuauugccuccggcgucgcgguguguaagguucuccaccuggagggggaagugaacaaaaucaagagcgcccuucugucuaccaauaaagcugucgugucccucagcaacggaguuucugugcugacauuuaagguccuugaccugaagaauuacauugauaaacaacuccugccuauccugaacaagcaguccugcagcauuucuaauaucgagaccgugauugaguuccagcagaaaaacaaucggcuccuggaaaucacgcgcgaguuuuccgugaacgccggcgucacaaccccgguuagcacauauaugcuuaccaauuccgaacugcucucucugaucaacgacaugcccauuaccaacgaucaaaagaaacuuaugagcaauaacgugcagaucgugagacagcaguccuacagcauuauguguaucauuaaggaggaaguccuggcuuaugugguucaacucccucuguacggcgugaucgacacacccugcuggaaacugcauacgucuccucucuguaccacaaauaccaaggagggguccaacaucugccugacacggaccgaucgcggaugguacugugacaaugccggcagcgucucuuucuuuccccaggcggaaacgugcaaggugcagagcaacagaguuuucugugauacaaugaacuccagaacccugccuucugaggugaaucucugcaaugucgacauuuuuaacccgaaauaugauugcaagaucaugaccagcaaaacagacguguccagcucugucauuaccucccugggggccaucgugagcuguuacggaaagacaaaaugcacggcuucuaauaagaaccggggcauuaucaagaccuucuccaaugggugugauuauguuagcaacaaaggaguggacacagucuccgugggcaauacccuuuacuauguuaacaagcaagagggcaaaucucuguacgugaagggggaacccaucauuaacuuuuaugacccucucgucuuccccagcgaugaguuugacgccuccaucucucaggugaaugagaaaauuaaccagagccuggcuuucauccgcaaguccgaugaacugcuccacaaugugaacgccggaaagagcacaaccaauauuaugaucacgaccauuaucaucguuauuaucgucauucugcuuucucugaucgccgugggccuccugcuguacugcaaagcuagauccacaccugugacccuuagcaaggaccagcucucugggauuaacaauaucgcguucuccaacugaggacuaguacuggcugcaucucccuuuccucuguccuccauccuucucccaggauggugaagggggaccugguacccagugauccccaccccaggauccuaaaucaugacuuaccugcuaauaaaaacucauuggaaaagugagaagaucuaaaaaaaaaaaaaaaaaaaaaaaaaaaaaaaaaaaaaaaaaaaaaaaaaaaaaaaaaaaaaaaaugcaucccccccccccccccccccccccccccccccaaaggcucuuuucagagccaccagaauu

SEQ ID NO: 4065 - RNA, 1977 nt, Artificial Sequence
  mRNA product Design e-6 comprising derived and/or modified sequence from HRSV(A2)__F_DSCav1_mut0 (opt6)
gggagagcggcucggccauuuugucccagucaguccggaggcugcggcugcagaaguaccgccugcggaguaacugcaaagaagcuuaccauggaacuacuaauacuaaaagccaaugcaauaacaaccauacuaaccgccguaacauuuuguuucgcaucaggucaaaacauaaccgaagaauuuuaucaaucaacaugcucagcaguaucaaaaggauacuuauccgcucuaagaacaggaugguacacaaguguaauuacaauagagcucucaaacauaaaagaaaacaaaugcaauggaacugacgcaaaaguuaaacuuauaaaacaagaacuagauaaauauaaaaaugcaguaaccgaauuacaacuccuaaugcaauccacaccugcuaccgguuccggaucagccauagcaucuggaguagccguaugcaaaguccuccaccuagaaggagaaguaaauaaaaucaaaucagcacuauuaucuaccaauaaagcaguugucucacuauccaauggcguaucaguacuaacauucaaaguauuagaccuuaaaaacuacauagacaaacaacuauuaccaauucugaacaaacaauccuguucaauaucaaacaucgaaacgguaauagaauuucaacaaaaaaauaacagauuacuugaaauaacaagagaauuuucaguaaaugcaggaguuacaacacccgucuccaccuacaugcucacaaauucagaauuauuaucacuuauaaacgacaugccaauaacuaacgaccaaaaaaaacuaaugucaaacaauguccaaauaguccgacaacaauccuacucaauaaugugcauuauaaaagaagaaguccuagccuacguuguccaacuacccuuauauggaguaauagauaccccaugcuggaaacuucauaccuccccccuaugcacaacaaacacaaaagaaggcucaaacaucugcuuaacacguacagaccgagguugguacugugauaacgcaggauccguaucauuuuucccacaagcagaaacaugcaaaguacaaucaaaccgcguuuuuugugacaccaugaacagcagaacccucccuucagaaguaaaccuaugcaacgucgauauauuuaacccaaaauacgauugcaaaauaaugacaucaaaaaccgaugucucaucuucaguaauaaccucucuaggagcaauagucucauguuacggaaaaacaaaaugcacagcaaguaauaaaaauagaggaauaauaaaaacauucucuaauggcugcgacuacguauccaauaaaggcguugacacaguauccguaggcaacacacucuacuauguuaacaaacaagaaggaaaaaguuuauacguuaaaggagaaccaauuauaaacuuuuacgacccacucguauucccaucugaugaauuugacgcaucaaucucacaaguaaaugaaaaaaucaaucagucccuugccuuuauaagaaaaucagaugaacuuuuacacaacguuaacgccggaaaaucaacaaccaauauaaugaucacaaccauaauaauaguuauaauuguaauuuuauuauccuuaauagccgucggacuacuacuauacugcaaagcaagaucuacacccguaacccuaucaaaagaccaacuaaguggaauaaauaacauugcauucucaaauuaaggacuaguacuggcugcaucucccuuuccucuguccuccauccuucucccaggauggugaagggggaccugguacccagugauccccaccccaggauccuaaaucaugacuuaccugcuaauaaaaacucauuggaaaagugagaagaucuaaaaaaaaaaaaaaaaaaaaaaaaaaaaaaaaaaaaaaaaaaaaaaaaaaaaaaaaaaaaaaaaugcaucccccccccccccccccccccccccccccccaaaggcucuuuucagagccaccagaauu

SEQ ID NO: 4066 - RNA, 1977 nt, Artificial Sequence
  mRNA product Design e-6 comprising derived and/or modified sequence from HRSV(A2)__F_DSCav1_mut0 (opt11)
gggagagcggcucggccauuuugucccagucaguccggaggcugcggcugcagaaguaccgccugcggaguaacugcaaagaagcuuaccauggaacuccuaauacuaaaggcaaacgcaaucacuacaauucuaaccgccgugacauucugcuucgccuccggacaaaacaucaccgaagaauuuuaccaauccacaugcucggccgucaguaaaggcuaccucucggcucuccgaaccggcugguacaccuccgucaucaccaucgaacucuccaacaucaaagaaaacaaaugcaacggcaccgacgccaaagucaaacuaaucaaacaagaacucgacaaauacaaaaacgccgucacagaacuccaacuacuaaugcaaucaacacccgcuacaggaagcggcuccgccaucgccagcggcguagcugucugcaaaguccuccaccucgaaggugaagucaacaaaaucaaaucagcccuacucagcacaaacaaagccguuguaagccuauccaacggcgucuccguacuaacauucaaaguccuugaccucaagaacuacaucgacaaacaacuucucccaauccuaaacaaacaaagcugcucaauuuccaacaucgaaacaguaaucgaauuucaacaaaaaaacaaccgacuccucgaaaucacccgcgaauuuuccguuaacgccggcguuacaacccccgucuccaccuacaugcucaccaauuccgaacuacuaucacucauaaacgacaugccuaucacaaacgaccaaaaaaaacuaaugucaaacaauguccaaaucguccgccagcaaagcuauuccaucaugugcaucaucaaagaggaaguccucgccuacguaguccaacugccccucuacggcgucauugauacccccugcuggaaacuccacaccuccccccucugcaccacaaacaccaaagaagguuccaacaucugccuaacacgaaccgacagaggcugguacugcgacaacgccggcagcgucuccuucuucccccaagcagaaaccuguaaaguccagucuaaccgcgucuucugcgacacaaugaacucaagaacccuaccuuccgaaguaaaccucugcaacguagacaucuucaacccuaaauacgacugcaaaaucaugacuucaaaaacagacguaagcucuuccguaaucacuucccucggcgccaucguauccugcuacgguaaaaccaaaugcaccgccuccaacaaaaaccgagggaucauaaaaaccuucuccaacggcugcgacuacguaucuaacaaaggcgucgacaccgucuccgucggcaacacccucuauuacguaaacaaacaagagggcaaaucacuauacgucaaaggcgagccaaucauaaacuucuaugacccacucgucuucccuucagacgaauuugaugccagcaucagccaagucaacgaaaaaaucaaccaaucacucgccuucauccgcaaaagcgacgaacuccuucacaacgucaacgcaggcaaaucaaccaccaacaucaugaucaccaccaucaucaucgucaucaucguuauccuacucagccucaucgcaguuggucuucuccuuuacugcaaagcccgcuccacccccgucacccucaguaaagaccaacucagcggaaucaacaacauagcauucuccaacuaaggacuaguacuggcugcaucucccuuuccucuguccuccauccuucucccaggauggugaagggggaccugguacccagugauccccaccccaggauccuaaaucaugacuuaccugcuaauaaaaacucauuggaaaagugagaagaucuaaaaaaaaaaaaaaaaaaaaaaaaaaaaaaaaaaaaaaaaaaaaaaaaaaaaaaaaaaaaaaaaugcaucccccccccccccccccccccccccccccccaaaggcucuuuucagagccaccagaauu

SEQ ID NO: 4067 - RNA, 2193 nt, Artificial Sequence
  mRNA product Design f-1 comprising derived and/or modified sequence from HRSV(A2)__F_DSCav1_mut0 (opt1)
gggagagcggcucggccauuuugucccagucaguccggaggcugcggcugcagaaguaccgccugcggaguaacugcaaagaagcuuaccauggagcugcucauccugaaggccaacgccaucaccaccauccugacggcggugaccuucugcuucgccagcggccagaacaucaccgaggaguucuaccaguccacgugcagcgccgucuccaagggguaccucagcgcccugcggaccggcugguacaccuccgugaucaccaucgagcugagcaacaucaaggagaacaagugcaacgggaccgacgccaaggugaagcucaucaagcaggagcuggacaaguacaagaacgcggucacggagcugcagcuccugaugcaguccaccccggcaaccggcuccggcuccgccaucgcgagcggcgucgccgugugcaaggugcugcaccucgagggggaggucaacaagaucaagagcgcccugcuguccaccaacaaggccguggugagccucuccaacggcgucagcgugcugaccuucaaggugcuggaccucaagaacuacaucgacaagcagcugcugcccauccugaacaagcagagcugcuccaucagcaacaucgagacggugaucgaguuccagcagaagaacaaccggcuccuggagaucacccgcgaguucagcgugaacgccggggucaccacccccguguccacguacaugcugaccaacagcgagcuccugucccugaucaacgacaugccgaucaccaacgaccagaagaagcucaugagcaacaacgugcagaucguccggcagcaguccuacagcaucaugugcaucaucaaggaggaggugcuggcguacgugguccagcugccccucuacggcgugaucgacacccccugcuggaagcugcacacgagcccccugugcaccaccaacaccaaggagggguccaacaucugccucacgcgcaccgaccggggcugguacugcgacaacgccggcagcgucuccuucuucccgcaggccgagaccugcaaggugcagagcaaccgcguguucugcgacaccaugaacucccggacgcugcccagcgagguaaaccucugcaacgucgacaucuucaaccccaaguacgacugcaagaucaugaccuccaagaccgacgugagcuccagcgugaucaccucccugggggccaucgucagcugcuacggcaagacgaagugcaccgccagcaacaagaaccgggggaucaucaagaccuucuccaacggcugcgacuacgugagcaacaagggcguggacaccguguccgucgggaacacccuguacuacgugaacaagcaggagggcaagagccucuacgugaagggggagcccaucaucaacuucuacgacccgcuggucuuccccuccgacgaguucgacgcgagcaucucccaggugaacgagaagaucaaccagagccuggccuucauccgcaaguccgacgagcugcuccacaacgugaacgccggcaagagcacgaccaacaucaugaucaccaccaucaucaucgucaucaucgugauccugcugucccucaucgccguggggcugcugcucuacugcaaggcccggagcacgcccgucacccuguccaaggaccagcugagcggcaucaacaacaucgcguucuccaacugaggacuagugaagggaacacccaaauuuaauucagccuuaagcacaauuaauuaagagugaaacguaauuguacaagcaguuggucacccaccauagggcaugaucaacaccgcaaccuuuccuuuuucccccagugauucugaaaaaccccucuucccuucagcuugcuuagauguuccaaauuuaguaagcuuaaggcggccuacagaagaaaaagaaaaaaaaggccacaaaaguucccucucacuuucaguaaauaaaauaaaagcagcaacagaaauaaagaaauaaaugaaauucaaaaugaaauaaauauuguguugugcagcauuaaaaaaucaauaaaaauuaaaaaugagcaagaucuaaaaaaaaaaaaaaaaaaaaaaaaaaaaaaaaaaaaaaaaaaaaaaaaaaaaaaaaaaaaaaaaugcaucccccccccccccccccccccccccccccccaaaggcucuuuucagagccaccagaauu

SEQ ID NO: 4068 - RNA, 2193 nt, Artificial Sequence
  mRNA product Design f-1 comprising derived and/or modified sequence from HRSV(A2)__F_DSCav1_mut0 (opt1)
gggagagcggcucggccauuuugucccagucaguccggaggcugcggcugcagaaguaccgccugcggaguaacugcaaagaagcuuaccauggagcugcucauccugaaggccaacgccaucaccaccauccugacggcggugaccuucugcuucgccagcggccagaacaucaccgaggaguucuaccaguccacgugcagcgccgucuccaagggguaccucagcgcccugcgcaccggcugguacaccuccgugaucaccaucgagcugagcaacaucaaggagaacaagugcaacgggaccgacgccaaggugaagcucaucaagcaggagcuggacaaguacaagaacgcggucacggagcugcagcuccugaugcaguccacccccgccaccggcagcggguccgccaucgccagcggcguggcggugugcaagguccugcaccucgagggcgaggugaacaagaucaaguccgcccugcugagcaccaacaaggccguggucucccucagcaacgggguguccgugcugacguucaagguccuggaccucaagaacuacaucgacaagcagcugcugccgauccucaacaagcagagcugcuccaucagcaacaucgagaccgugaucgaguuccagcagaagaacaaccggcugcuggagaucacccgcgaguucuccgugaacgccggcgucaccacgcccgugagcaccuacaugcucaccaacagcgagcugcugucccucaucaacgacaugcccaucaccaacgaccagaagaagcugaugagcaacaacgugcagaucguccggcagcaguccuacagcaucaugugcaucaucaaggaggaggugcuggccuacgugguccagcucccccuguacggggugaucgacacgccgugcuggaagcugcacaccagcccccucugcaccaccaacacgaaggagggcuccaacaucugccugacccgcaccgaccgggggugguacugcgacaacgcgggcuccgugagcuucuucccccaggccgagaccugcaagguccaguccaaccgcguguucugcgacacgaugaacagccggacccuccccuccgaggucaaccugugcaacguggacaucuucaacccgaaguacgacugcaagaucaugaccagcaagaccgacguguccagcuccgucaucacgagccugggcgccaucguguccugcuacgggaagaccaagugcaccgccagcaacaagaaccggggcaucaucaagaccuucuccaacgggugcgacuacgugagcaacaagggcgucgacacggugagcgugggcaacacccucuacuacgucaacaagcaggaggggaagucccuguacgugaagggcgagcccaucaucaacuucuacgacccccugguguuccccagcgacgaguucgacgccuccaucagccaggucaacgagaagaucaaccagucccucgcguucauccgcaagagcgacgagcugcugcacaacgugaacgccgggaaguccaccaccaacaucaugaucaccacgaucaucaucgugaucaucgucauccuccugagccugaucgccgugggccuccugcuguacugcaaggcccgguccaccccggugacccugagcaaggaccagcucuccgggaucaacaacaucgccuucagcaacugaggacuagugaagggaacacccaaauuuaauucagccuuaagcacaauuaauuaagagugaaacguaauuguacaagcaguuggucacccaccauagggcaugaucaacaccgcaaccuuuccuuuuucccccagugauucugaaaaaccccucuucccuucagcuugcuuagauguuccaaauuuaguaagcuuaaggcggccuacagaagaaaaagaaaaaaaaggccacaaaaguucccucucacuuucaguaaauaaaauaaaagcagcaacagaaauaaagaaauaaaugaaauucaaaaugaaauaaauauuguguugugcagcauuaaaaaaucaauaaaaauuaaaaaugagcaagaucuaaaaaaaaaaaaaaaaaaaaaaaaaaaaaaaaaaaaaaaaaaaaaaaaaaaaaaaaaaaaaaaaugcaucccccccccccccccccccccccccccccccaaaggcucuuuucagagccaccagaauu

SEQ ID NO: 4069 - RNA, 2193 nt, Artificial Sequence
  mRNA product Design f-1 comprising derived and/or modified sequence from HRSV(A2)__F_DSCav1_mut0 (opt2)
gggagagcggcucggccauuuugucccagucaguccggaggcugcggcugcagaaguaccgccugcggaguaacugcaaagaagcuuaccauggagcuccucauccucaaggccaacgccaucaccaccauccucaccgccgucaccuucugcuucgccuccggccagaacaucaccgaggaguucuaccaguccaccugcuccgccgucuccaagggcuaccucuccgcccuccgcaccggcugguacaccuccgucaucaccaucgagcucuccaacaucaaggagaacaagugcaacggcaccgacgccaaggucaagcucaucaagcaggagcucgacaaguacaagaacgccgucaccgagcuccagcuccucaugcaguccacccccgccaccggcuccggcuccgccaucgccuccggcgucgccgucugcaagguccuccaccucgagggcgaggucaacaagaucaaguccgcccuccucuccaccaacaaggccgucgucucccucuccaacggcgucuccguccucaccuucaagguccucgaccucaagaacuacaucgacaagcagcuccuccccauccucaacaagcaguccugcuccaucuccaacaucgagaccgucaucgaguuccagcagaagaacaaccgccuccucgagaucacccgcgaguucuccgucaacgccggcgucaccacccccgucuccaccuacaugcucaccaacuccgagcuccucucccucaucaacgacaugcccaucaccaacgaccagaagaagcucauguccaacaacguccagaucguccgccagcaguccuacuccaucaugugcaucaucaaggaggagguccucgccuacgucguccagcucccccucuacggcgucaucgacacccccugcuggaagcuccacaccuccccccucugcaccaccaacaccaaggagggcuccaacaucugccucacccgcaccgaccgcggcugguacugcgacaacgccggcuccgucuccuucuucccccaggccgagaccugcaagguccaguccaaccgcgucuucugcgacaccaugaacucccgcacccuccccuccgaggucaaccucugcaacgucgacaucuucaaccccaaguacgacugcaagaucaugaccuccaagaccgacgucuccuccuccgucaucaccucccucggcgccaucgucuccugcuacggcaagaccaagugcaccgccuccaacaagaaccgcggcaucaucaagaccuucuccaacggcugcgacuacgucuccaacaagggcgucgacaccgucuccgucggcaacacccucuacuacgucaacaagcaggagggcaagucccucuacgucaagggcgagcccaucaucaacuucuacgacccccucgucuuccccuccgacgaguucgacgccuccaucucccaggucaacgagaagaucaaccagucccucgccuucauccgcaaguccgacgagcuccuccacaacgucaacgccggcaaguccaccaccaacaucaugaucaccaccaucaucaucgucaucaucgucauccuccucucccucaucgccgucggccuccuccucuacugcaaggcccgcuccacccccgucacccucuccaaggaccagcucuccggcaucaacaacaucgccuucuccaacugaggacuagugaagggaacacccaaauuuaauucagccuuaagcacaauuaauuaagagugaaacguaauuguacaagcaguuggucacccaccauagggcaugaucaacaccgcaaccuuuccuuuuucccccagugauucugaaaaaccccucuucccuucagcuugcuuagauguuccaaauuuaguaagcuuaaggcggccuacagaagaaaaagaaaaaaaaggccacaaaaguucccucucacuuucaguaaauaaaauaaaagcagcaacagaaauaaagaaauaaaugaaauucaaaaugaaauaaauauuguguugugcagcauuaaaaaaucaauaaaaauuaaaaaugagcaagaucuaaaaaaaaaaaaaaaaaaaaaaaaaaaaaaaaaaaaaaaaaaaaaaaaaaaaaaaaaaaaaaaaugcaucccccccccccccccccccccccccccccccaaaggcucuuuucagagccaccagaauu

SEQ ID NO: 4070 - RNA, 2193 nt, Artificial Sequence
  mRNA product Design f-1 comprising derived and/or modified sequence from HRSV(A2)__F_DSCav1_mut0 (opt3)
gggagagcggcucggccauuuugucccagucaguccggaggcugcggcugcagaaguaccgccugcggaguaacugcaaagaagcuuaccauggagcugcucauccuuaaggccaacgcuauuaccacaauacugacugcagugacguucugcuuugccagcggccagaauaucaccgaagaguucuaccaauccacauguucugcggucucaaaaggguauuugagugcuuuaagaacuggaugguacaccagcguuauuacaaucgaacuguccaacauuaaggagaauaaaugcaacgguaccgacgccaaggugaaacuaaucaagcaggaacucgauaaguauaaaaaugcaguaacugagcugcagcuucugaugcagucuacacccgccaccggcucggggucagcuauagcaagcggaguggccgucuguaagguguugcaccucgagggcgaaguuaacaaaaucaagagugcucugcuguccacgaauaaagccguggucucucucagcaacgguguguccguauuaacuuuuaagguucuggaccuuaagaauuacauugauaaacaauugcugccuauccuaaacaagcagucaugcaguauuagcaauaucgagaccgugauagaguuccagcagaaaaacaauaggcuccuggaaauuacacgggaguuuucugucaacgcgggggugacuaccccaguguccacauauaugcuuaccaauucagaacuguugagccucaucaacgacaugccgauuacgaacgaucaaaagaaacugaugaguaauaacguccagaucguucgccagcagucuuacuccaucauguguauuauaaaggaggaaguguuagcauauguagugcaacugccccucuacggagucaucgacacuccuugcuggaaacuucauacaagcccacuguguaccacuaauacaaaggagggcucgaacauuugcuugacccgaacggaucguggcugguacugugacaaugccgggucuguguccuucuuuccccaggcugaaaccugcaagguucagucaaacagaguguucugugauacaaugaauaguagaacucugccuagcgaggucaaccucugcaauguggacaucuuuaacccaaaauaugauugcaagauaaugaccuccaaaacagacguaucuagcucaguuauuaccagucugggagccaucguguccuguuacgguaagacuaaaugcacagcaagcaauaagaacaggggcaucauuaagaccuucucuaaugggugugauuaugucucaaacaaaggaguggacacugucagugugggcaauacgcuuuacuauguuaacaagcaagaggguaaaagccuguacgugaagggggaacccaucauuaacuuuuaugacccuuugguauucccauccgaugaguuugacgcuucuauaucgcaggucaaugagaaaaucaaccagagccucgccuucauucggaaguccgaugaacuguuacacaaugugaacgcgggaaagucaacaaccaauaucaugaucacuaccauuauaaucguuauuaucgugauucugcuaagucucaucgccgucggccugcuuuuguacugcaaagcacgcucuacaccggugacccugagcaaggaccagcucuccggcauaaacaauaucgcuuucucaaacugaggacuagugaagggaacacccaaauuuaauucagccuuaagcacaauuaauuaagagugaaacguaauuguacaagcaguuggucacccaccauagggcaugaucaacaccgcaaccuuuccuuuuucccccagugauucugaaaaaccccucuucccuucagcuugcuuagauguuccaaauuuaguaagcuuaaggcggccuacagaagaaaaagaaaaaaaaggccacaaaaguucccucucacuuucaguaaauaaaauaaaagcagcaacagaaauaaagaaauaaaugaaauucaaaaugaaauaaauauuguguugugcagcauuaaaaaaucaauaaaaauuaaaaaugagcaagaucuaaaaaaaaaaaaaaaaaaaaaaaaaaaaaaaaaaaaaaaaaaaaaaaaaaaaaaaaaaaaaaaaugcaucccccccccccccccccccccccccccccccaaaggcucuuuucagagccaccagaauu

SEQ ID NO: 4071 - RNA, 2193 nt, Artificial Sequence
  mRNA product Design f-1 comprising derived and/or modified sequence from HRSV(A2)__F_DSCav1_mut0 (opt4)
gggagagcggcucggccauuuugucccagucaguccggaggcugcggcugcagaaguaccgccugcggaguaacugcaaagaagcuuaccauggagcugcugauccugaaggccaacgccaucaccaccauccugaccgccgugaccuucugcuucgccagcggccagaacaucaccgaggaguucuaccagagcaccugcagcgccgugagcaagggcuaccugagcgcccugagaaccggcugguacaccagcgugaucaccaucgagcugagcaacaucaaggagaacaagugcaacggcaccgacgccaaggugaagcugaucaagcaggagcuggacaaguacaagaacgccgugaccgagcugcagcugcugaugcagagcacccccgccaccggcagcggcagcgccaucgccagcggcguggccgugugcaaggugcugcaccuggagggcgaggugaacaagaucaagagcgcccugcugagcaccaacaaggccguggugagccugagcaacggcgugagcgugcugaccuucaaggugcuggaccugaagaacuacaucgacaagcagcugcugcccauccugaacaagcagagcugcagcaucagcaacaucgagaccgugaucgaguuccagcagaagaacaacagacugcuggagaucaccagagaguucagcgugaacgccggcgugaccacccccgugagcaccuacaugcugaccaacagcgagcugcugagccugaucaacgacaugcccaucaccaacgaccagaagaagcugaugagcaacaacgugcagaucgugagacagcagagcuacagcaucaugugcaucaucaaggaggaggugcuggccuacguggugcagcugccccuguacggcgugaucgacacccccugcuggaagcugcacaccagcccccugugcaccaccaacaccaaggagggcagcaacaucugccugaccagaaccgacagaggcugguacugcgacaacgccggcagcgugagcuucuucccccaggccgagaccugcaaggugcagagcaacagaguguucugcgacaccaugaacagcagaacccugcccagcgaggugaaccugugcaacguggacaucuucaaccccaaguacgacugcaagaucaugaccagcaagaccgacgugagcagcagcgugaucaccagccugggcgccaucgugagcugcuacggcaagaccaagugcaccgccagcaacaagaacagaggcaucaucaagaccuucagcaacggcugcgacuacgugagcaacaagggcguggacaccgugagcgugggcaacacccuguacuacgugaacaagcaggagggcaagagccuguacgugaagggcgagcccaucaucaacuucuacgacccccugguguuccccagcgacgaguucgacgccagcaucagccaggugaacgagaagaucaaccagagccuggccuucaucagaaagagcgacgagcugcugcacaacgugaacgccggcaagagcaccaccaacaucaugaucaccaccaucaucaucgugaucaucgugauccugcugagccugaucgccgugggccugcugcuguacugcaaggccagaagcacccccgugacccugagcaaggaccagcugagcggcaucaacaacaucgccuucagcaacugaggacuagugaagggaacacccaaauuuaauucagccuuaagcacaauuaauuaagagugaaacguaauuguacaagcaguuggucacccaccauagggcaugaucaacaccgcaaccuuuccuuuuucccccagugauucugaaaaaccccucuucccuucagcuugcuuagauguuccaaauuuaguaagcuuaaggcggccuacagaagaaaaagaaaaaaaaggccacaaaaguucccucucacuuucaguaaauaaaauaaaagcagcaacagaaauaaagaaauaaaugaaauucaaaaugaaauaaauauuguguugugcagcauuaaaaaaucaauaaaaauuaaaaaugagcaagaucuaaaaaaaaaaaaaaaaaaaaaaaaaaaaaaaaaaaaaaaaaaaaaaaaaaaaaaaaaaaaaaaaugcaucccccccccccccccccccccccccccccccaaaggcucuuuucagagccaccagaauu

SEQ ID NO: 4072 - RNA, 2193 nt, Artificial Sequence
  mRNA product Design f-1 comprising derived and/or modified sequence from HRSV(A2)__F_DSCav1_mut0 (opt5)
gggagagcggcucggccauuuugucccagucaguccggaggcugcggcugcagaaguaccgccugcggaguaacugcaaagaagcuuaccauggagcugcucauccugaaggccaacgcuauuaccacaauccuuacggccgugaccuucugcuuugcgagcggccagaauauuacagaagaguucuaccaauccaccuguucugcugucagcaaaggguaucuguccgcccucagaacaggaugguacaccucuguuaucacaauugaacugagcaacaucaaggagaauaaaugcaacggcaccgacgccaaggugaaacuuaucaagcaggaacuggauaaguauaaaaaugcugugacggagcuccagcugcugaugcaguccacccccgccacagggucuggaagcgcuauugccuccggcgucgcgguguguaagguucuccaccuggagggggaagugaacaaaaucaagagcgcccuucugucuaccaauaaagcugucgugucccucagcaacggaguuucugugcugacauuuaagguccuugaccugaagaauuacauugauaaacaacuccugccuauccugaacaagcaguccugcagcauuucuaauaucgagaccgugauugaguuccagcagaaaaacaaucggcuccuggaaaucacgcgcgaguuuuccgugaacgccggcgucacaaccccgguuagcacauauaugcuuaccaauuccgaacugcucucucugaucaacgacaugcccauuaccaacgaucaaaagaaacuuaugagcaauaacgugcagaucgugagacagcaguccuacagcauuauguguaucauuaaggaggaaguccuggcuuaugugguucaacucccucuguacggcgugaucgacacacccugcuggaaacugcauacgucuccucucuguaccacaaauaccaaggagggguccaacaucugccugacacggaccgaucgcggaugguacugugacaaugccggcagcgucucuuucuuuccccaggcggaaacgugcaaggugcagagcaacagaguuuucugugauacaaugaacuccagaacccugccuucugaggugaaucucugcaaugucgacauuuuuaacccgaaauaugauugcaagaucaugaccagcaaaacagacguguccagcucugucauuaccucccugggggccaucgugagcuguuacggaaagacaaaaugcacggcuucuaauaagaaccggggcauuaucaagaccuucuccaaugggugugauuauguuagcaacaaaggaguggacacagucuccgugggcaauacccuuuacuauguuaacaagcaagagggcaaaucucuguacgugaagggggaacccaucauuaacuuuuaugacccucucgucuuccccagcgaugaguuugacgccuccaucucucaggugaaugagaaaauuaaccagagccuggcuuucauccgcaaguccgaugaacugcuccacaaugugaacgccggaaagagcacaaccaauauuaugaucacgaccauuaucaucguuauuaucgucauucugcuuucucugaucgccgugggccuccugcuguacugcaaagcuagauccacaccugugacccuuagcaaggaccagcucucugggauuaacaauaucgcguucuccaacugaggacuagugaagggaacacccaaauuuaauucagccuuaagcacaauuaauuaagagugaaacguaauuguacaagcaguuggucacccaccauagggcaugaucaacaccgcaaccuuuccuuuuucccccagugauucugaaaaaccccucuucccuucagcuugcuuagauguuccaaauuuaguaagcuuaaggcggccuacagaagaaaaagaaaaaaaaggccacaaaaguucccucucacuuucaguaaauaaaauaaaagcagcaacagaaauaaagaaauaaaugaaauucaaaaugaaauaaauauuguguugugcagcauuaaaaaaucaauaaaaauuaaaaaugagcaagaucuaaaaaaaaaaaaaaaaaaaaaaaaaaaaaaaaaaaaaaaaaaaaaaaaaaaaaaaaaaaaaaaaugcaucccccccccccccccccccccccccccccccaaaggcucuuuucagagccaccagaauu

SEQ ID NO: 4073 - RNA, 2193 nt, Artificial Sequence
  mRNA product Design f-1 comprising derived and/or modified sequence from HRSV(A2)__F_DSCav1_mut0 (opt6)
gggagagcggcucggccauuuugucccagucaguccggaggcugcggcugcagaaguaccgccugcggaguaacugcaaagaagcuuaccauggaacuacuaauacuaaaagccaaugcaauaacaaccauacuaaccgccguaacauuuuguuucgcaucaggucaaaacauaaccgaagaauuuuaucaaucaacaugcucagcaguaucaaaaggauacuuauccgcucuaagaacaggaugguacacaaguguaauuacaauagagcucucaaacauaaaagaaaacaaaugcaauggaacugacgcaaaaguuaaacuuauaaaacaagaacuagauaaauauaaaaaugcaguaaccgaauuacaacuccuaaugcaauccacaccugcuaccgguuccggaucagccauagcaucuggaguagccguaugcaaaguccuccaccuagaaggagaaguaaauaaaaucaaaucagcacuauuaucuaccaauaaagcaguugucucacuauccaauggcguaucaguacuaacauucaaaguauuagaccuuaaaaacuacauagacaaacaacuauuaccaauucugaacaaacaauccuguucaauaucaaacaucgaaacgguaauagaauuucaacaaaaaaauaacagauuacuugaaauaacaagagaauuuucaguaaaugcaggaguuacaacacccgucuccaccuacaugcucacaaauucagaauuauuaucacuuauaaacgacaugccaauaacuaacgaccaaaaaaaacuaaugucaaacaauguccaaauaguccgacaacaauccuacucaauaaugugcauuauaaaagaagaaguccuagccuacguuguccaacuacccuuauauggaguaauagauaccccaugcuggaaacuucauaccuccccccuaugcacaacaaacacaaaagaaggcucaaacaucugcuuaacacguacagaccgagguugguacugugauaacgcaggauccguaucauuuuucccacaagcagaaacaugcaaaguacaaucaaaccgcguuuuuugugacaccaugaacagcagaacccucccuucagaaguaaaccuaugcaacgucgauauauuuaacccaaaauacgauugcaaaauaaugacaucaaaaaccgaugucucaucuucaguaauaaccucucuaggagcaauagucucauguuacggaaaaacaaaaugcacagcaaguaauaaaaauagaggaauaauaaaaacauucucuaauggcugcgacuacguauccaauaaaggcguugacacaguauccguaggcaacacacucuacuauguuaacaaacaagaaggaaaaaguuuauacguuaaaggagaaccaauuauaaacuuuuacgacccacucguauucccaucugaugaauuugacgcaucaaucucacaaguaaaugaaaaaaucaaucagucccuugccuuuauaagaaaaucagaugaacuuuuacacaacguuaacgccggaaaaucaacaaccaauauaaugaucacaaccauaauaauaguuauaauuguaauuuuauuauccuuaauagccgucggacuacuacuauacugcaaagcaagaucuacacccguaacccuaucaaaagaccaacuaaguggaauaaauaacauugcauucucaaauuaaggacuagugaagggaacacccaaauuuaauucagccuuaagcacaauuaauuaagagugaaacguaauuguacaagcaguuggucacccaccauagggcaugaucaacaccgcaaccuuuccuuuuucccccagugauucugaaaaaccccucuucccuucagcuugcuuagauguuccaaauuuaguaagcuuaaggcggccuacagaagaaaaagaaaaaaaaggccacaaaaguucccucucacuuucaguaaauaaaauaaaagcagcaacagaaauaaagaaauaaaugaaauucaaaaugaaauaaauauuguguugugcagcauuaaaaaaucaauaaaaauuaaaaaugagcaagaucuaaaaaaaaaaaaaaaaaaaaaaaaaaaaaaaaaaaaaaaaaaaaaaaaaaaaaaaaaaaaaaaaugcaucccccccccccccccccccccccccccccccaaaggcucuuuucagagccaccagaauu

SEQ ID NO: 4074 - RNA, 2193 nt, Artificial Sequence
  mRNA product Design f-1 comprising derived and/or modified sequence from HRSV(A2)__F_DSCav1_mut0 (opt11)
gggagagcggcucggccauuuugucccagucaguccggaggcugcggcugcagaaguaccgccugcggaguaacugcaaagaagcuuaccauggaacuccuaauacuaaaggcaaacgcaaucacuacaauucuaaccgccgugacauucugcuucgccuccggacaaaacaucaccgaagaauuuuaccaauccacaugcucggccgucaguaaaggcuaccucucggcucuccgaaccggcugguacaccuccgucaucaccaucgaacucuccaacaucaaagaaaacaaaugcaacggcaccgacgccaaagucaaacuaaucaaacaagaacucgacaaauacaaaaacgccgucacagaacuccaacuacuaaugcaaucaacacccgcuacaggaagcggcuccgccaucgccagcggcguagcugucugcaaaguccuccaccucgaaggugaagucaacaaaaucaaaucagcccuacucagcacaaacaaagccguuguaagccuauccaacggcgucuccguacuaacauucaaaguccuugaccucaagaacuacaucgacaaacaacuucucccaauccuaaacaaacaaagcugcucaauuuccaacaucgaaacaguaaucgaauuucaacaaaaaaacaaccgacuccucgaaaucacccgcgaauuuuccguuaacgccggcguuacaacccccgucuccaccuacaugcucaccaauuccgaacuacuaucacucauaaacgacaugccuaucacaaacgaccaaaaaaaacuaaugucaaacaauguccaaaucguccgccagcaaagcuauuccaucaugugcaucaucaaagaggaaguccucgccuacguaguccaacugccccucuacggcgucauugauacccccugcuggaaacuccacaccuccccccucugcaccacaaacaccaaagaagguuccaacaucugccuaacacgaaccgacagaggcugguacugcgacaacgccggcagcgucuccuucuucccccaagcagaaaccuguaaaguccagucuaaccgcgucuucugcgacacaaugaacucaagaacccuaccuuccgaaguaaaccucugcaacguagacaucuucaacccuaaauacgacugcaaaaucaugacuucaaaaacagacguaagcucuuccguaaucacuucccucggcgccaucguauccugcuacgguaaaaccaaaugcaccgccuccaacaaaaaccgagggaucauaaaaaccuucuccaacggcugcgacuacguaucuaacaaaggcgucgacaccgucuccgucggcaacacccucuauuacguaaacaaacaagagggcaaaucacuauacgucaaaggcgagccaaucauaaacuucuaugacccacucgucuucccuucagacgaauuugaugccagcaucagccaagucaacgaaaaaaucaaccaaucacucgccuucauccgcaaaagcgacgaacuccuucacaacgucaacgcaggcaaaucaaccaccaacaucaugaucaccaccaucaucaucgucaucaucguuauccuacucagccucaucgcaguuggucuucuccuuuacugcaaagcccgcuccacccccgucacccucaguaaagaccaacucagcggaaucaacaacauagcauucuccaacuaaggacuagugaagggaacacccaaauuuaauucagccuuaagcacaauuaauuaagagugaaacguaauuguacaagcaguuggucacccaccauagggcaugaucaacaccgcaaccuuuccuuuuucccccagugauucugaaaaaccccucuucccuucagcuugcuuagauguuccaaauuuaguaagcuuaaggcggccuacagaagaaaaagaaaaaaaaggccacaaaaguucccucucacuuucaguaaauaaaauaaaagcagcaacagaaauaaagaaauaaaugaaauucaaaaugaaauaaauauuguguugugcagcauuaaaaaaucaauaaaaauuaaaaaugagcaagaucuaaaaaaaaaaaaaaaaaaaaaaaaaaaaaaaaaaaaaaaaaaaaaaaaaaaaaaaaaaaaaaaaugcaucccccccccccccccccccccccccccccccaaaggcucuuuucagagccaccagaauu

SEQ ID NO: 4075 - RNA, 1973 nt, Artificial Sequence
  mRNA product Design f-2 comprising derived and/or modified sequence from HRSV(A2)__F_DSCav1_mut0 (opt1)
gggagagcggcucggccauuuugucccagucaguccggaggcugcggcugcagaaguaccgccugcggaguaacugcaaagaagcuuaccauggagcugcucauccugaaggccaacgccaucaccaccauccugacggcggugaccuucugcuucgccagcggccagaacaucaccgaggaguucuaccaguccacgugcagcgccgucuccaagggguaccucagcgcccugcggaccggcugguacaccuccgugaucaccaucgagcugagcaacaucaaggagaacaagugcaacgggaccgacgccaaggugaagcucaucaagcaggagcuggacaaguacaagaacgcggucacggagcugcagcuccugaugcaguccaccccggcaaccggcuccggcuccgccaucgcgagcggcgucgccgugugcaaggugcugcaccucgagggggaggucaacaagaucaagagcgcccugcuguccaccaacaaggccguggugagccucuccaacggcgucagcgugcugaccuucaaggugcuggaccucaagaacuacaucgacaagcagcugcugcccauccugaacaagcagagcugcuccaucagcaacaucgagacggugaucgaguuccagcagaagaacaaccggcuccuggagaucacccgcgaguucagcgugaacgccggggucaccacccccguguccacguacaugcugaccaacagcgagcuccugucccugaucaacgacaugccgaucaccaacgaccagaagaagcucaugagcaacaacgugcagaucguccggcagcaguccuacagcaucaugugcaucaucaaggaggaggugcuggcguacgugguccagcugccccucuacggcgugaucgacacccccugcuggaagcugcacacgagcccccugugcaccaccaacaccaaggagggguccaacaucugccucacgcgcaccgaccggggcugguacugcgacaacgccggcagcgucuccuucuucccgcaggccgagaccugcaaggugcagagcaaccgcguguucugcgacaccaugaacucccggacgcugcccagcgagguaaaccucugcaacgucgacaucuucaaccccaaguacgacugcaagaucaugaccuccaagaccgacgugagcuccagcgugaucaccucccugggggccaucgucagcugcuacggcaagacgaagugcaccgccagcaacaagaaccgggggaucaucaagaccuucuccaacggcugcgacuacgugagcaacaagggcguggacaccguguccgucgggaacacccuguacuacgugaacaagcaggagggcaagagccucuacgugaagggggagcccaucaucaacuucuacgacccgcuggucuuccccuccgacgaguucgacgcgagcaucucccaggugaacgagaagaucaaccagagccuggccuucauccgcaaguccgacgagcugcuccacaacgugaacgccggcaagagcacgaccaacaucaugaucaccaccaucaucaucgucaucaucgugauccugcugucccucaucgccguggggcugcugcucuacugcaaggcccggagcacgcccgucacccuguccaaggaccagcugagcggcaucaacaacaucgcguucuccaacugaggacuaguggaagcauuuuccuggcugauuaaaagaaauuacucagcuauggucaucuguuccuguuagaaggcuaugcagcauauuauauacuaugcgcauguuaugaaaugcauaauaaaaaauuuuaaaaaaucuaaaagaucuaaaaaaaaaaaaaaaaaaaaaaaaaaaaaaaaaaaaaaaaaaaaaaaaaaaaaaaaaaaaaaaaugcaucccccccccccccccccccccccccccccccaaaggcucuuuucagagccaccagaauu

SEQ ID NO: 4076 - RNA, 1973 nt, Artificial Sequence
  mRNA product Design f-2 comprising derived and/or modified sequence from HRSV(A2)__F_DSCav1_mut0 (opt1)
gggagagcggcucggccauuuugucccagucaguccggaggcugcggcugcagaaguaccgccugcggaguaacugcaaagaagcuuaccauggagcugcucauccugaaggccaacgccaucaccaccauccugacggcggugaccuucugcuucgccagcggccagaacaucaccgaggaguucuaccaguccacgugcagcgccgucuccaagggguaccucagcgcccugcgcaccggcugguacaccuccgugaucaccaucgagcugagcaacaucaaggagaacaagugcaacgggaccgacgccaaggugaagcucaucaagcaggagcuggacaaguacaagaacgcggucacggagcugcagcuccugaugcaguccacccccgccaccggcagcggguccgccaucgccagcggcguggcggugugcaagguccugcaccucgagggcgaggugaacaagaucaaguccgcccugcugagcaccaacaaggccguggucucccucagcaacgggguguccgugcugacguucaagguccuggaccucaagaacuacaucgacaagcagcugcugccgauccucaacaagcagagcugcuccaucagcaacaucgagaccgugaucgaguuccagcagaagaacaaccggcugcuggagaucacccgcgaguucuccgugaacgccggcgucaccacgcccgugagcaccuacaugcucaccaacagcgagcugcugucccucaucaacgacaugcccaucaccaacgaccagaagaagcugaugagcaacaacgugcagaucguccggcagcaguccuacagcaucaugugcaucaucaaggaggaggugcuggccuacgugguccagcucccccuguacggggugaucgacacgccgugcuggaagcugcacaccagcccccucugcaccaccaacacgaaggagggcuccaacaucugccugacccgcaccgaccgggggugguacugcgacaacgcgggcuccgugagcuucuucccccaggccgagaccugcaagguccaguccaaccgcguguucugcgacacgaugaacagccggacccuccccuccgaggucaaccugugcaacguggacaucuucaacccgaaguacgacugcaagaucaugaccagcaagaccgacguguccagcuccgucaucacgagccugggcgccaucguguccugcuacgggaagaccaagugcaccgccagcaacaagaaccggggcaucaucaagaccuucuccaacgggugcgacuacgugagcaacaagggcgucgacacggugagcgugggcaacacccucuacuacgucaacaagcaggaggggaagucccuguacgugaagggcgagcccaucaucaacuucuacgacccccugguguuccccagcgacgaguucgacgccuccaucagccaggucaacgagaagaucaaccagucccucgcguucauccgcaagagcgacgagcugcugcacaacgugaacgccgggaaguccaccaccaacaucaugaucaccacgaucaucaucgugaucaucgucauccuccugagccugaucgccgugggccuccugcuguacugcaaggcccgguccaccccggugacccugagcaaggaccagcucuccgggaucaacaacaucgccuucagcaacugaggacuaguggaagcauuuuccuggcugauuaaaagaaauuacucagcuauggucaucuguuccuguuagaaggcuaugcagcauauuauauacuaugcgcauguuaugaaaugcauaauaaaaaauuuuaaaaaaucuaaaagaucuaaaaaaaaaaaaaaaaaaaaaaaaaaaaaaaaaaaaaaaaaaaaaaaaaaaaaaaaaaaaaaaaugcaucccccccccccccccccccccccccccccccaaaggcucuuuucagagccaccagaauu

SEQ ID NO: 4077 - RNA, 1973 nt, Artificial Sequence
  mRNA product Design f-2 comprising derived and/or modified sequence from HRSV(A2)__F_DSCav1_mut0 (opt2)
gggagagcggcucggccauuuugucccagucaguccggaggcugcggcugcagaaguaccgccugcggaguaacugcaaagaagcuuaccauggagcuccucauccucaaggccaacgccaucaccaccauccucaccgccgucaccuucugcuucgccuccggccagaacaucaccgaggaguucuaccaguccaccugcuccgccgucuccaagggcuaccucuccgcccuccgcaccggcugguacaccuccgucaucaccaucgagcucuccaacaucaaggagaacaagugcaacggcaccgacgccaaggucaagcucaucaagcaggagcucgacaaguacaagaacgccgucaccgagcuccagcuccucaugcaguccacccccgccaccggcuccggcuccgccaucgccuccggcgucgccgucugcaagguccuccaccucgagggcgaggucaacaagaucaaguccgcccuccucuccaccaacaaggccgucgucucccucuccaacggcgucuccguccucaccuucaagguccucgaccucaagaacuacaucgacaagcagcuccuccccauccucaacaagcaguccugcuccaucuccaacaucgagaccgucaucgaguuccagcagaagaacaaccgccuccucgagaucacccgcgaguucuccgucaacgccggcgucaccacccccgucuccaccuacaugcucaccaacuccgagcuccucucccucaucaacgacaugcccaucaccaacgaccagaagaagcucauguccaacaacguccagaucguccgccagcaguccuacuccaucaugugcaucaucaaggaggagguccucgccuacgucguccagcucccccucuacggcgucaucgacacccccugcuggaagcuccacaccuccccccucugcaccaccaacaccaaggagggcuccaacaucugccucacccgcaccgaccgcggcugguacugcgacaacgccggcuccgucuccuucuucccccaggccgagaccugcaagguccaguccaaccgcgucuucugcgacaccaugaacucccgcacccuccccuccgaggucaaccucugcaacgucgacaucuucaaccccaaguacgacugcaagaucaugaccuccaagaccgacgucuccuccuccgucaucaccucccucggcgccaucgucuccugcuacggcaagaccaagugcaccgccuccaacaagaaccgcggcaucaucaagaccuucuccaacggcugcgacuacgucuccaacaagggcgucgacaccgucuccgucggcaacacccucuacuacgucaacaagcaggagggcaagucccucuacgucaagggcgagcccaucaucaacuucuacgacccccucgucuuccccuccgacgaguucgacgccuccaucucccaggucaacgagaagaucaaccagucccucgccuucauccgcaaguccgacgagcuccuccacaacgucaacgccggcaaguccaccaccaacaucaugaucaccaccaucaucaucgucaucaucgucauccuccucucccucaucgccgucggccuccuccucuacugcaaggcccgcuccacccccgucacccucuccaaggaccagcucuccggcaucaacaacaucgccuucuccaacugaggacuaguggaagcauuuuccuggcugauuaaaagaaauuacucagcuauggucaucuguuccuguuagaaggcuaugcagcauauuauauacuaugcgcauguuaugaaaugcauaauaaaaaauuuuaaaaaaucuaaaagaucuaaaaaaaaaaaaaaaaaaaaaaaaaaaaaaaaaaaaaaaaaaaaaaaaaaaaaaaaaaaaaaaaugcaucccccccccccccccccccccccccccccccaaaggcucuuuucagagccaccagaauu

SEQ ID NO: 4078 - RNA, 1973 nt, Artificial Sequence
  mRNA product Design f-2 comprising derived and/or modified sequence from HRSV(A2)__F_DSCav1_mut0 (opt3)
gggagagcggcucggccauuuugucccagucaguccggaggcugcggcugcagaaguaccgccugcggaguaacugcaaagaagcuuaccauggagcugcucauccuuaaggccaacgcuauuaccacaauacugacugcagugacguucugcuuugccagcggccagaauaucaccgaagaguucuaccaauccacauguucugcggucucaaaaggguauuugagugcuuuaagaacuggaugguacaccagcguuauuacaaucgaacuguccaacauuaaggagaauaaaugcaacgguaccgacgccaaggugaaacuaaucaagcaggaacucgauaaguauaaaaaugcaguaacugagcugcagcuucugaugcagucuacacccgccaccggcucggggucagcuauagcaagcggaguggccgucuguaagguguugcaccucgagggcgaaguuaacaaaaucaagagugcucugcuguccacgaauaaagccguggucucucucagcaacgguguguccguauuaacuuuuaagguucuggaccuuaagaauuacauugauaaacaauugcugccuauccuaaacaagcagucaugcaguauuagcaauaucgagaccgugauagaguuccagcagaaaaacaauaggcuccuggaaauuacacgggaguuuucugucaacgcgggggugacuaccccaguguccacauauaugcuuaccaauucagaacuguugagccucaucaacgacaugccgauuacgaacgaucaaaagaaacugaugaguaauaacguccagaucguucgccagcagucuuacuccaucauguguauuauaaaggaggaaguguuagcauauguagugcaacugccccucuacggagucaucgacacuccuugcuggaaacuucauacaagcccacuguguaccacuaauacaaaggagggcucgaacauuugcuugacccgaacggaucguggcugguacugugacaaugccgggucuguguccuucuuuccccaggcugaaaccugcaagguucagucaaacagaguguucugugauacaaugaauaguagaacucugccuagcgaggucaaccucugcaauguggacaucuuuaacccaaaauaugauugcaagauaaugaccuccaaaacagacguaucuagcucaguuauuaccagucugggagccaucguguccuguuacgguaagacuaaaugcacagcaagcaauaagaacaggggcaucauuaagaccuucucuaaugggugugauuaugucucaaacaaaggaguggacacugucagugugggcaauacgcuuuacuauguuaacaagcaagaggguaaaagccuguacgugaagggggaacccaucauuaacuuuuaugacccuuugguauucccauccgaugaguuugacgcuucuauaucgcaggucaaugagaaaaucaaccagagccucgccuucauucggaaguccgaugaacuguuacacaaugugaacgcgggaaagucaacaaccaauaucaugaucacuaccauuauaaucguuauuaucgugauucugcuaagucucaucgccgucggccugcuuuuguacugcaaagcacgcucuacaccggugacccugagcaaggaccagcucuccggcauaaacaauaucgcuuucucaaacugaggacuaguggaagcauuuuccuggcugauuaaaagaaauuacucagcuauggucaucuguuccuguuagaaggcuaugcagcauauuauauacuaugcgcauguuaugaaaugcauaauaaaaaauuuuaaaaaaucuaaaagaucuaaaaaaaaaaaaaaaaaaaaaaaaaaaaaaaaaaaaaaaaaaaaaaaaaaaaaaaaaaaaaaaaugcaucccccccccccccccccccccccccccccccaaaggcucuuuucagagccaccagaauu

SEQ ID NO: 4079 - RNA, 1973 nt, Artificial Sequence
  mRNA product Design f-2 comprising derived and/or modified sequence from HRSV(A2)__F_DSCav1_mut0 (opt4)
gggagagcggcucggccauuuugucccagucaguccggaggcugcggcugcagaaguaccgccugcggaguaacugcaaagaagcuuaccauggagcugcugauccugaaggccaacgccaucaccaccauccugaccgccgugaccuucugcuucgccagcggccagaacaucaccgaggaguucuaccagagcaccugcagcgccgugagcaagggcuaccugagcgcccugagaaccggcugguacaccagcgugaucaccaucgagcugagcaacaucaaggagaacaagugcaacggcaccgacgccaaggugaagcugaucaagcaggagcuggacaaguacaagaacgccgugaccgagcugcagcugcugaugcagagcacccccgccaccggcagcggcagcgccaucgccagcggcguggccgugugcaaggugcugcaccuggagggcgaggugaacaagaucaagagcgcccugcugagcaccaacaaggccguggugagccugagcaacggcgugagcgugcugaccuucaaggugcuggaccugaagaacuacaucgacaagcagcugcugcccauccugaacaagcagagcugcagcaucagcaacaucgagaccgugaucgaguuccagcagaagaacaacagacugcuggagaucaccagagaguucagcgugaacgccggcgugaccacccccgugagcaccuacaugcugaccaacagcgagcugcugagccugaucaacgacaugcccaucaccaacgaccagaagaagcugaugagcaacaacgugcagaucgugagacagcagagcuacagcaucaugugcaucaucaaggaggaggugcuggccuacguggugcagcugccccuguacggcgugaucgacacccccugcuggaagcugcacaccagcccccugugcaccaccaacaccaaggagggcagcaacaucugccugaccagaaccgacagaggcugguacugcgacaacgccggcagcgugagcuucuucccccaggccgagaccugcaaggugcagagcaacagaguguucugcgacaccaugaacagcagaacccugcccagcgaggugaaccugugcaacguggacaucuucaaccccaaguacgacugcaagaucaugaccagcaagaccgacgugagcagcagcgugaucaccagccugggcgccaucgugagcugcuacggcaagaccaagugcaccgccagcaacaagaacagaggcaucaucaagaccuucagcaacggcugcgacuacgugagcaacaagggcguggacaccgugagcgugggcaacacccuguacuacgugaacaagcaggagggcaagagccuguacgugaagggcgagcccaucaucaacuucuacgacccccugguguuccccagcgacgaguucgacgccagcaucagccaggugaacgagaagaucaaccagagccuggccuucaucagaaagagcgacgagcugcugcacaacgugaacgccggcaagagcaccaccaacaucaugaucaccaccaucaucaucgugaucaucgugauccugcugagccugaucgccgugggccugcugcuguacugcaaggccagaagcacccccgugacccugagcaaggaccagcugagcggcaucaacaacaucgccuucagcaacugaggacuaguggaagcauuuuccuggcugauuaaaagaaauuacucagcuauggucaucuguuccuguuagaaggcuaugcagcauauuauauacuaugcgcauguuaugaaaugcauaauaaaaaauuuuaaaaaaucuaaaagaucuaaaaaaaaaaaaaaaaaaaaaaaaaaaaaaaaaaaaaaaaaaaaaaaaaaaaaaaaaaaaaaaaugcaucccccccccccccccccccccccccccccccaaaggcucuuuucagagccaccagaauu

SEQ ID NO: 4080 - RNA, 1973 nt, Artificial Sequence
  mRNA product Design f-2 comprising derived and/or modified sequence from HRSV(A2)__F_DSCav1_mut0 (opt5)
gggagagcggcucggccauuuugucccagucaguccggaggcugcggcugcagaaguaccgccugcggaguaacugcaaagaagcuuaccauggagcugcucauccugaaggccaacgcuauuaccacaauccuuacggccgugaccuucugcuuugcgagcggccagaauauuacagaagaguucuaccaauccaccuguucugcugucagcaaaggguaucuguccgcccucagaacaggaugguacaccucuguuaucacaauugaacugagcaacaucaaggagaauaaaugcaacggcaccgacgccaaggugaaacuuaucaagcaggaacuggauaaguauaaaaaugcugugacggagcuccagcugcugaugcaguccacccccgccacagggucuggaagcgcuauugccuccggcgucgcgguguguaagguucuccaccuggagggggaagugaacaaaaucaagagcgcccuucugucuaccaauaaagcugucgugucccucagcaacggaguuucugugcugacauuuaagguccuugaccugaagaauuacauugauaaacaacuccugccuauccugaacaagcaguccugcagcauuucuaauaucgagaccgugauugaguuccagcagaaaaacaaucggcuccuggaaaucacgcgcgaguuuuccgugaacgccggcgucacaaccccgguuagcacauauaugcuuaccaauuccgaacugcucucucugaucaacgacaugcccauuaccaacgaucaaaagaaacuuaugagcaauaacgugcagaucgugagacagcaguccuacagcauuauguguaucauuaaggaggaaguccuggcuuaugugguucaacucccucuguacggcgugaucgacacacccugcuggaaacugcauacgucuccucucuguaccacaaauaccaaggagggguccaacaucugccugacacggaccgaucgcggaugguacugugacaaugccggcagcgucucuuucuuuccccaggcggaaacgugcaaggugcagagcaacagaguuuucugugauacaaugaacuccagaacccugccuucugaggugaaucucugcaaugucgacauuuuuaacccgaaauaugauugcaagaucaugaccagcaaaacagacguguccagcucugucauuaccucccugggggccaucgugagcuguuacggaaagacaaaaugcacggcuucuaauaagaaccggggcauuaucaagaccuucuccaaugggugugauuauguuagcaacaaaggaguggacacagucuccgugggcaauacccuuuacuauguuaacaagcaagagggcaaaucucuguacgugaagggggaacccaucauuaacuuuuaugacccucucgucuuccccagcgaugaguuugacgccuccaucucucaggugaaugagaaaauuaaccagagccuggcuuucauccgcaaguccgaugaacugcuccacaaugugaacgccggaaagagcacaaccaauauuaugaucacgaccauuaucaucguuauuaucgucauucugcuuucucugaucgccgugggccuccugcuguacugcaaagcuagauccacaccugugacccuuagcaaggaccagcucucugggauuaacaauaucgcguucuccaacugaggacuaguggaagcauuuuccuggcugauuaaaagaaauuacucagcuauggucaucuguuccuguuagaaggcuaugcagcauauuauauacuaugcgcauguuaugaaaugcauaauaaaaaauuuuaaaaaaucuaaaagaucuaaaaaaaaaaaaaaaaaaaaaaaaaaaaaaaaaaaaaaaaaaaaaaaaaaaaaaaaaaaaaaaaugcaucccccccccccccccccccccccccccccccaaaggcucuuuucagagccaccagaauu

SEQ ID NO: 4081 - RNA, 1973 nt, Artificial Sequence
  mRNA product Design f-2 comprising derived and/or modified sequence from HRSV(A2)__F_DSCav1_mut0 (opt6)
gggagagcggcucggccauuuugucccagucaguccggaggcugcggcugcagaaguaccgccugcggaguaacugcaaagaagcuuaccauggaacuacuaauacuaaaagccaaugcaauaacaaccauacuaaccgccguaacauuuuguuucgcaucaggucaaaacauaaccgaagaauuuuaucaaucaacaugcucagcaguaucaaaaggauacuuauccgcucuaagaacaggaugguacacaaguguaauuacaauagagcucucaaacauaaaagaaaacaaaugcaauggaacugacgcaaaaguuaaacuuauaaaacaagaacuagauaaauauaaaaaugcaguaaccgaauuacaacuccuaaugcaauccacaccugcuaccgguuccggaucagccauagcaucuggaguagccguaugcaaaguccuccaccuagaaggagaaguaaauaaaaucaaaucagcacuauuaucuaccaauaaagcaguugucucacuauccaauggcguaucaguacuaacauucaaaguauuagaccuuaaaaacuacauagacaaacaacuauuaccaauucugaacaaacaauccuguucaauaucaaacaucgaaacgguaauagaauuucaacaaaaaaauaacagauuacuugaaauaacaagagaauuuucaguaaaugcaggaguuacaacacccgucuccaccuacaugcucacaaauucagaauuauuaucacuuauaaacgacaugccaauaacuaacgaccaaaaaaaacuaaugucaaacaauguccaaauaguccgacaacaauccuacucaauaaugugcauuauaaaagaagaaguccuagccuacguuguccaacuacccuuauauggaguaauagauaccccaugcuggaaacuucauaccuccccccuaugcacaacaaacacaaaagaaggcucaaacaucugcuuaacacguacagaccgagguugguacugugauaacgcaggauccguaucauuuuucccacaagcagaaacaugcaaaguacaaucaaaccgcguuuuuugugacaccaugaacagcagaacccucccuucagaaguaaaccuaugcaacgucgauauauuuaacccaaaauacgauugcaaaauaaugacaucaaaaaccgaugucucaucuucaguaauaaccucucuaggagcaauagucucauguuacggaaaaacaaaaugcacagcaaguaauaaaaauagaggaauaauaaaaacauucucuaauggcugcgacuacguauccaauaaaggcguugacacaguauccguaggcaacacacucuacuauguuaacaaacaagaaggaaaaaguuuauacguuaaaggagaaccaauuauaaacuuuuacgacccacucguauucccaucugaugaauuugacgcaucaaucucacaaguaaaugaaaaaaucaaucagucccuugccuuuauaagaaaaucagaugaacuuuuacacaacguuaacgccggaaaaucaacaaccaauauaaugaucacaaccauaauaauaguuauaauuguaauuuuauuauccuuaauagccgucggacuacuacuauacugcaaagcaagaucuacacccguaacccuaucaaaagaccaacuaaguggaauaaauaacauugcauucucaaauuaaggacuaguggaagcauuuuccuggcugauuaaaagaaauuacucagcuauggucaucuguuccuguuagaaggcuaugcagcauauuauauacuaugcgcauguuaugaaaugcauaauaaaaaauuuuaaaaaaucuaaaagaucuaaaaaaaaaaaaaaaaaaaaaaaaaaaaaaaaaaaaaaaaaaaaaaaaaaaaaaaaaaaaaaaaugcaucccccccccccccccccccccccccccccccaaaggcucuuuucagagccaccagaauu

SEQ ID NO: 4082 - RNA, 1973 nt, Artificial Sequence
  mRNA product Design f-2 comprising derived and/or modified sequence from HRSV(A2)__F_DSCav1_mut0 (opt11)
gggagagcggcucggccauuuugucccagucaguccggaggcugcggcugcagaaguaccgccugcggaguaacugcaaagaagcuuaccauggaacuccuaauacuaaaggcaaacgcaaucacuacaauucuaaccgccgugacauucugcuucgccuccggacaaaacaucaccgaagaauuuuaccaauccacaugcucggccgucaguaaaggcuaccucucggcucuccgaaccggcugguacaccuccgucaucaccaucgaacucuccaacaucaaagaaaacaaaugcaacggcaccgacgccaaagucaaacuaaucaaacaagaacucgacaaauacaaaaacgccgucacagaacuccaacuacuaaugcaaucaacacccgcuacaggaagcggcuccgccaucgccagcggcguagcugucugcaaaguccuccaccucgaaggugaagucaacaaaaucaaaucagcccuacucagcacaaacaaagccguuguaagccuauccaacggcgucuccguacuaacauucaaaguccuugaccucaagaacuacaucgacaaacaacuucucccaauccuaaacaaacaaagcugcucaauuuccaacaucgaaacaguaaucgaauuucaacaaaaaaacaaccgacuccucgaaaucacccgcgaauuuuccguuaacgccggcguuacaacccccgucuccaccuacaugcucaccaauuccgaacuacuaucacucauaaacgacaugccuaucacaaacgaccaaaaaaaacuaaugucaaacaauguccaaaucguccgccagcaaagcuauuccaucaugugcaucaucaaagaggaaguccucgccuacguaguccaacugccccucuacggcgucauugauacccccugcuggaaacuccacaccuccccccucugcaccacaaacaccaaagaagguuccaacaucugccuaacacgaaccgacagaggcugguacugcgacaacgccggcagcgucuccuucuucccccaagcagaaaccuguaaaguccagucuaaccgcgucuucugcgacacaaugaacucaagaacccuaccuuccgaaguaaaccucugcaacguagacaucuucaacccuaaauacgacugcaaaaucaugacuucaaaaacagacguaagcucuuccguaaucacuucccucggcgccaucguauccugcuacgguaaaaccaaaugcaccgccuccaacaaaaaccgagggaucauaaaaaccuucuccaacggcugcgacuacguaucuaacaaaggcgucgacaccgucuccgucggcaacacccucuauuacguaaacaaacaagagggcaaaucacuauacgucaaaggcgagccaaucauaaacuucuaugacccacucgucuucccuucagacgaauuugaugccagcaucagccaagucaacgaaaaaaucaaccaaucacucgccuucauccgcaaaagcgacgaacuccuucacaacgucaacgcaggcaaaucaaccaccaacaucaugaucaccaccaucaucaucgucaucaucguuauccuacucagccucaucgcaguuggucuucuccuuuacugcaaagcccgcuccacccccgucacccucaguaaagaccaacucagcggaaucaacaacauagcauucuccaacuaaggacuaguggaagcauuuuccuggcugauuaaaagaaauuacucagcuauggucaucuguuccuguuagaaggcuaugcagcauauuauauacuaugcgcauguuaugaaaugcauaauaaaaaauuuuaaaaaaucuaaaagaucuaaaaaaaaaaaaaaaaaaaaaaaaaaaaaaaaaaaaaaaaaaaaaaaaaaaaaaaaaaaaaaaaugcaucccccccccccccccccccccccccccccccaaaggcucuuuucagagccaccagaauu

SEQ ID NO: 4083 - RNA, 1964 nt, Artificial Sequence
  mRNA product Design f-3 comprising derived and/or modified sequence from HRSV(A2)__F_DSCav1_mut0 (opt1)
gggagagucccgcagucggcguccagcggcucugcuuguucgugugugugucguugcaggccuuauucaagcuuaccauggagcugcucauccugaaggccaacgccaucaccaccauccugacggcggugaccuucugcuucgccagcggccagaacaucaccgaggaguucuaccaguccacgugcagcgccgucuccaagggguaccucagcgcccugcggaccggcugguacaccuccgugaucaccaucgagcugagcaacaucaaggagaacaagugcaacgggaccgacgccaaggugaagcucaucaagcaggagcuggacaaguacaagaacgcggucacggagcugcagcuccugaugcaguccaccccggcaaccggcuccggcuccgccaucgcgagcggcgucgccgugugcaaggugcugcaccucgagggggaggucaacaagaucaagagcgcccugcuguccaccaacaaggccguggugagccucuccaacggcgucagcgugcugaccuucaaggugcuggaccucaagaacuacaucgacaagcagcugcugcccauccugaacaagcagagcugcuccaucagcaacaucgagacggugaucgaguuccagcagaagaacaaccggcuccuggagaucacccgcgaguucagcgugaacgccggggucaccacccccguguccacguacaugcugaccaacagcgagcuccugucccugaucaacgacaugccgaucaccaacgaccagaagaagcucaugagcaacaacgugcagaucguccggcagcaguccuacagcaucaugugcaucaucaaggaggaggugcuggcguacgugguccagcugccccucuacggcgugaucgacacccccugcuggaagcugcacacgagcccccugugcaccaccaacaccaaggagggguccaacaucugccucacgcgcaccgaccggggcugguacugcgacaacgccggcagcgucuccuucuucccgcaggccgagaccugcaaggugcagagcaaccgcguguucugcgacaccaugaacucccggacgcugcccagcgagguaaaccucugcaacgucgacaucuucaaccccaaguacgacugcaagaucaugaccuccaagaccgacgugagcuccagcgugaucaccucccugggggccaucgucagcugcuacggcaagacgaagugcaccgccagcaacaagaaccgggggaucaucaagaccuucuccaacggcugcgacuacgugagcaacaagggcguggacaccguguccgucgggaacacccuguacuacgugaacaagcaggagggcaagagccucuacgugaagggggagcccaucaucaacuucuacgacccgcuggucuuccccuccgacgaguucgacgcgagcaucucccaggugaacgagaagaucaaccagagccuggccuucauccgcaaguccgacgagcugcuccacaacgugaacgccggcaagagcacgaccaacaucaugaucaccaccaucaucaucgucaucaucgugauccugcugucccucaucgccguggggcugcugcucuacugcaaggcccggagcacgcccgucacccuguccaaggaccagcugagcggcaucaacaacaucgcguucuccaacugaggacuaguacuggcugcaucucccuuuccucuguccuccauccuucucccaggauggugaagggggaccugguacccagugauccccaccccaggauccuaaaucaugacuuaccugcuaauaaaaacucauuggaaaagugagaagaucuaaaaaaaaaaaaaaaaaaaaaaaaaaaaaaaaaaaaaaaaaaaaaaaaaaaaaaaaaaaaaaaaugcaucccccccccccccccccccccccccccccccaaaggcucuuuucagagccaccagaauu

SEQ ID NO: 4084 - RNA, 1964 nt, Artificial Sequence
  mRNA product Design f-3 comprising derived and/or modified sequence from HRSV(A2)__F_DSCav1_mut0 (opt1)
gggagagucccgcagucggcguccagcggcucugcuuguucgugugugugucguugcaggccuuauucaagcuuaccauggagcugcucauccugaaggccaacgccaucaccaccauccugacggcggugaccuucugcuucgccagcggccagaacaucaccgaggaguucuaccaguccacgugcagcgccgucuccaagggguaccucagcgcccugcgcaccggcugguacaccuccgugaucaccaucgagcugagcaacaucaaggagaacaagugcaacgggaccgacgccaaggugaagcucaucaagcaggagcuggacaaguacaagaacgcggucacggagcugcagcuccugaugcaguccacccccgccaccggcagcggguccgccaucgccagcggcguggcggugugcaagguccugcaccucgagggcgaggugaacaagaucaaguccgcccugcugagcaccaacaaggccguggucucccucagcaacgggguguccgugcugacguucaagguccuggaccucaagaacuacaucgacaagcagcugcugccgauccucaacaagcagagcugcuccaucagcaacaucgagaccgugaucgaguuccagcagaagaacaaccggcugcuggagaucacccgcgaguucuccgugaacgccggcgucaccacgcccgugagcaccuacaugcucaccaacagcgagcugcugucccucaucaacgacaugcccaucaccaacgaccagaagaagcugaugagcaacaacgugcagaucguccggcagcaguccuacagcaucaugugcaucaucaaggaggaggugcuggccuacgugguccagcucccccuguacggggugaucgacacgccgugcuggaagcugcacaccagcccccucugcaccaccaacacgaaggagggcuccaacaucugccugacccgcaccgaccgggggugguacugcgacaacgcgggcuccgugagcuucuucccccaggccgagaccugcaagguccaguccaaccgcguguucugcgacacgaugaacagccggacccuccccuccgaggucaaccugugcaacguggacaucuucaacccgaaguacgacugcaagaucaugaccagcaagaccgacguguccagcuccgucaucacgagccugggcgccaucguguccugcuacgggaagaccaagugcaccgccagcaacaagaaccggggcaucaucaagaccuucuccaacgggugcgacuacgugagcaacaagggcgucgacacggugagcgugggcaacacccucuacuacgucaacaagcaggaggggaagucccuguacgugaagggcgagcccaucaucaacuucuacgacccccugguguuccccagcgacgaguucgacgccuccaucagccaggucaacgagaagaucaaccagucccucgcguucauccgcaagagcgacgagcugcugcacaacgugaacgccgggaaguccaccaccaacaucaugaucaccacgaucaucaucgugaucaucgucauccuccugagccugaucgccgugggccuccugcuguacugcaaggcccgguccaccccggugacccugagcaaggaccagcucuccgggaucaacaacaucgccuucagcaacugaggacuaguacuggcugcaucucccuuuccucuguccuccauccuucucccaggauggugaagggggaccugguacccagugauccccaccccaggauccuaaaucaugacuuaccugcuaauaaaaacucauuggaaaagugagaagaucuaaaaaaaaaaaaaaaaaaaaaaaaaaaaaaaaaaaaaaaaaaaaaaaaaaaaaaaaaaaaaaaaugcaucccccccccccccccccccccccccccccccaaaggcucuuuucagagccaccagaauu

SEQ ID NO: 4085 - RNA, 1964 nt, Artificial Sequence
  mRNA product Design f-3 comprising derived and/or modified sequence from HRSV(A2)__F_DSCav1_mut0 (opt2)
gggagagucccgcagucggcguccagcggcucugcuuguucgugugugugucguugcaggccuuauucaagcuuaccauggagcuccucauccucaaggccaacgccaucaccaccauccucaccgccgucaccuucugcuucgccuccggccagaacaucaccgaggaguucuaccaguccaccugcuccgccgucuccaagggcuaccucuccgcccuccgcaccggcugguacaccuccgucaucaccaucgagcucuccaacaucaaggagaacaagugcaacggcaccgacgccaaggucaagcucaucaagcaggagcucgacaaguacaagaacgccgucaccgagcuccagcuccucaugcaguccacccccgccaccggcuccggcuccgccaucgccuccggcgucgccgucugcaagguccuccaccucgagggcgaggucaacaagaucaaguccgcccuccucuccaccaacaaggccgucgucucccucuccaacggcgucuccguccucaccuucaagguccucgaccucaagaacuacaucgacaagcagcuccuccccauccucaacaagcaguccugcuccaucuccaacaucgagaccgucaucgaguuccagcagaagaacaaccgccuccucgagaucacccgcgaguucuccgucaacgccggcgucaccacccccgucuccaccuacaugcucaccaacuccgagcuccucucccucaucaacgacaugcccaucaccaacgaccagaagaagcucauguccaacaacguccagaucguccgccagcaguccuacuccaucaugugcaucaucaaggaggagguccucgccuacgucguccagcucccccucuacggcgucaucgacacccccugcuggaagcuccacaccuccccccucugcaccaccaacaccaaggagggcuccaacaucugccucacccgcaccgaccgcggcugguacugcgacaacgccggcuccgucuccuucuucccccaggccgagaccugcaagguccaguccaaccgcgucuucugcgacaccaugaacucccgcacccuccccuccgaggucaaccucugcaacgucgacaucuucaaccccaaguacgacugcaagaucaugaccuccaagaccgacgucuccuccuccgucaucaccucccucggcgccaucgucuccugcuacggcaagaccaagugcaccgccuccaacaagaaccgcggcaucaucaagaccuucuccaacggcugcgacuacgucuccaacaagggcgucgacaccgucuccgucggcaacacccucuacuacgucaacaagcaggagggcaagucccucuacgucaagggcgagcccaucaucaacuucuacgacccccucgucuuccccuccgacgaguucgacgccuccaucucccaggucaacgagaagaucaaccagucccucgccuucauccgcaaguccgacgagcuccuccacaacgucaacgccggcaaguccaccaccaacaucaugaucaccaccaucaucaucgucaucaucgucauccuccucucccucaucgccgucggccuccuccucuacugcaaggcccgcuccacccccgucacccucuccaaggaccagcucuccggcaucaacaacaucgccuucuccaacugaggacuaguacuggcugcaucucccuuuccucuguccuccauccuucucccaggauggugaagggggaccugguacccagugauccccaccccaggauccuaaaucaugacuuaccugcuaauaaaaacucauuggaaaagugagaagaucuaaaaaaaaaaaaaaaaaaaaaaaaaaaaaaaaaaaaaaaaaaaaaaaaaaaaaaaaaaaaaaaaugcaucccccccccccccccccccccccccccccccaaaggcucuuuucagagccaccagaauu

SEQ ID NO: 4086 - RNA, 1964 nt, Artificial Sequence
  mRNA product Design f-3 comprising derived and/or modified sequence from HRSV(A2)__F_DSCav1_mut0 (opt3)
gggagagucccgcagucggcguccagcggcucugcuuguucgugugugugucguugcaggccuuauucaagcuuaccauggagcugcucauccuuaaggccaacgcuauuaccacaauacugacugcagugacguucugcuuugccagcggccagaauaucaccgaagaguucuaccaauccacauguucugcggucucaaaaggguauuugagugcuuuaagaacuggaugguacaccagcguuauuacaaucgaacuguccaacauuaaggagaauaaaugcaacgguaccgacgccaaggugaaacuaaucaagcaggaacucgauaaguauaaaaaugcaguaacugagcugcagcuucugaugcagucuacacccgccaccggcucggggucagcuauagcaagcggaguggccgucuguaagguguugcaccucgagggcgaaguuaacaaaaucaagagugcucugcuguccacgaauaaagccguggucucucucagcaacgguguguccguauuaacuuuuaagguucuggaccuuaagaauuacauugauaaacaauugcugccuauccuaaacaagcagucaugcaguauuagcaauaucgagaccgugauagaguuccagcagaaaaacaauaggcuccuggaaauuacacgggaguuuucugucaacgcgggggugacuaccccaguguccacauauaugcuuaccaauucagaacuguugagccucaucaacgacaugccgauuacgaacgaucaaaagaaacugaugaguaauaacguccagaucguucgccagcagucuuacuccaucauguguauuauaaaggaggaaguguuagcauauguagugcaacugccccucuacggagucaucgacacuccuugcuggaaacuucauacaagcccacuguguaccacuaauacaaaggagggcucgaacauuugcuugacccgaacggaucguggcugguacugugacaaugccgggucuguguccuucuuuccccaggcugaaaccugcaagguucagucaaacagaguguucugugauacaaugaauaguagaacucugccuagcgaggucaaccucugcaauguggacaucuuuaacccaaaauaugauugcaagauaaugaccuccaaaacagacguaucuagcucaguuauuaccagucugggagccaucguguccuguuacgguaagacuaaaugcacagcaagcaauaagaacaggggcaucauuaagaccuucucuaaugggugugauuaugucucaaacaaaggaguggacacugucagugugggcaauacgcuuuacuauguuaacaagcaagaggguaaaagccuguacgugaagggggaacccaucauuaacuuuuaugacccuuugguauucccauccgaugaguuugacgcuucuauaucgcaggucaaugagaaaaucaaccagagccucgccuucauucggaaguccgaugaacuguuacacaaugugaacgcgggaaagucaacaaccaauaucaugaucacuaccauuauaaucguuauuaucgugauucugcuaagucucaucgccgucggccugcuuuuguacugcaaagcacgcucuacaccggugacccugagcaaggaccagcucuccggcauaaacaauaucgcuuucucaaacugaggacuaguacuggcugcaucucccuuuccucuguccuccauccuucucccaggauggugaagggggaccugguacccagugauccccaccccaggauccuaaaucaugacuuaccugcuaauaaaaacucauuggaaaagugagaagaucuaaaaaaaaaaaaaaaaaaaaaaaaaaaaaaaaaaaaaaaaaaaaaaaaaaaaaaaaaaaaaaaaugcaucccccccccccccccccccccccccccccccaaaggcucuuuucagagccaccagaauu

SEQ ID NO: 4087 - RNA, 1964 nt, Artificial Sequence
  mRNA product Design f-3 comprising derived and/or modified sequence from HRSV(A2)__F_DSCav1_mut0 (opt4)
gggagagucccgcagucggcguccagcggcucugcuuguucgugugugugucguugcaggccuuauucaagcuuaccauggagcugcugauccugaaggccaacgccaucaccaccauccugaccgccgugaccuucugcuucgccagcggccagaacaucaccgaggaguucuaccagagcaccugcagcgccgugagcaagggcuaccugagcgcccugagaaccggcugguacaccagcgugaucaccaucgagcugagcaacaucaaggagaacaagugcaacggcaccgacgccaaggugaagcugaucaagcaggagcuggacaaguacaagaacgccgugaccgagcugcagcugcugaugcagagcacccccgccaccggcagcggcagcgccaucgccagcggcguggccgugugcaaggugcugcaccuggagggcgaggugaacaagaucaagagcgcccugcugagcaccaacaaggccguggugagccugagcaacggcgugagcgugcugaccuucaaggugcuggaccugaagaacuacaucgacaagcagcugcugcccauccugaacaagcagagcugcagcaucagcaacaucgagaccgugaucgaguuccagcagaagaacaacagacugcuggagaucaccagagaguucagcgugaacgccggcgugaccacccccgugagcaccuacaugcugaccaacagcgagcugcugagccugaucaacgacaugcccaucaccaacgaccagaagaagcugaugagcaacaacgugcagaucgugagacagcagagcuacagcaucaugugcaucaucaaggaggaggugcuggccuacguggugcagcugccccuguacggcgugaucgacacccccugcuggaagcugcacaccagcccccugugcaccaccaacaccaaggagggcagcaacaucugccugaccagaaccgacagaggcugguacugcgacaacgccggcagcgugagcuucuucccccaggccgagaccugcaaggugcagagcaacagaguguucugcgacaccaugaacagcagaacccugcccagcgaggugaaccugugcaacguggacaucuucaaccccaaguacgacugcaagaucaugaccagcaagaccgacgugagcagcagcgugaucaccagccugggcgccaucgugagcugcuacggcaagaccaagugcaccgccagcaacaagaacagaggcaucaucaagaccuucagcaacggcugcgacuacgugagcaacaagggcguggacaccgugagcgugggcaacacccuguacuacgugaacaagcaggagggcaagagccuguacgugaagggcgagcccaucaucaacuucuacgacccccugguguuccccagcgacgaguucgacgccagcaucagccaggugaacgagaagaucaaccagagccuggccuucaucagaaagagcgacgagcugcugcacaacgugaacgccggcaagagcaccaccaacaucaugaucaccaccaucaucaucgugaucaucgugauccugcugagccugaucgccgugggccugcugcuguacugcaaggccagaagcacccccgugacccugagcaaggaccagcugagcggcaucaacaacaucgccuucagcaacugaggacuaguacuggcugcaucucccuuuccucuguccuccauccuucucccaggauggugaagggggaccugguacccagugauccccaccccaggauccuaaaucaugacuuaccugcuaauaaaaacucauuggaaaagugagaagaucuaaaaaaaaaaaaaaaaaaaaaaaaaaaaaaaaaaaaaaaaaaaaaaaaaaaaaaaaaaaaaaaaugcaucccccccccccccccccccccccccccccccaaaggcucuuuucagagccaccagaauu

SEQ ID NO: 4088 - RNA, 1964 nt, Artificial Sequence
  mRNA product Design f-3 comprising derived and/or modified sequence from HRSV(A2)__F_DSCav1_mut0 (opt5)
gggagagucccgcagucggcguccagcggcucugcuuguucgugugugugucguugcaggccuuauucaagcuuaccauggagcugcucauccugaaggccaacgcuauuaccacaauccuuacggccgugaccuucugcuuugcgagcggccagaauauuacagaagaguucuaccaauccaccuguucugcugucagcaaaggguaucuguccgcccucagaacaggaugguacaccucuguuaucacaauugaacugagcaacaucaaggagaauaaaugcaacggcaccgacgccaaggugaaacuuaucaagcaggaacuggauaaguauaaaaaugcugugacggagcuccagcugcugaugcaguccacccccgccacagggucuggaagcgcuauugccuccggcgucgcgguguguaagguucuccaccuggagggggaagugaacaaaaucaagagcgcccuucugucuaccaauaaagcugucgugucccucagcaacggaguuucugugcugacauuuaagguccuugaccugaagaauuacauugauaaacaacuccugccuauccugaacaagcaguccugcagcauuucuaauaucgagaccgugauugaguuccagcagaaaaacaaucggcuccuggaaaucacgcgcgaguuuuccgugaacgccggcgucacaaccccgguuagcacauauaugcuuaccaauuccgaacugcucucucugaucaacgacaugcccauuaccaacgaucaaaagaaacuuaugagcaauaacgugcagaucgugagacagcaguccuacagcauuauguguaucauuaaggaggaaguccuggcuuaugugguucaacucccucuguacggcgugaucgacacacccugcuggaaacugcauacgucuccucucuguaccacaaauaccaaggagggguccaacaucugccugacacggaccgaucgcggaugguacugugacaaugccggcagcgucucuuucuuuccccaggcggaaacgugcaaggugcagagcaacagaguuuucugugauacaaugaacuccagaacccugccuucugaggugaaucucugcaaugucgacauuuuuaacccgaaauaugauugcaagaucaugaccagcaaaacagacguguccagcucugucauuaccucccugggggccaucgugagcuguuacggaaagacaaaaugcacggcuucuaauaagaaccggggcauuaucaagaccuucuccaaugggugugauuauguuagcaacaaaggaguggacacagucuccgugggcaauacccuuuacuauguuaacaagcaagagggcaaaucucuguacgugaagggggaacccaucauuaacuuuuaugacccucucgucuuccccagcgaugaguuugacgccuccaucucucaggugaaugagaaaauuaaccagagccuggcuuucauccgcaaguccgaugaacugcuccacaaugugaacgccggaaagagcacaaccaauauuaugaucacgaccauuaucaucguuauuaucgucauucugcuuucucugaucgccgugggccuccugcuguacugcaaagcuagauccacaccugugacccuuagcaaggaccagcucucugggauuaacaauaucgcguucuccaacugaggacuaguacuggcugcaucucccuuuccucuguccuccauccuucucccaggauggugaagggggaccugguacccagugauccccaccccaggauccuaaaucaugacuuaccugcuaauaaaaacucauuggaaaagugagaagaucuaaaaaaaaaaaaaaaaaaaaaaaaaaaaaaaaaaaaaaaaaaaaaaaaaaaaaaaaaaaaaaaaugcaucccccccccccccccccccccccccccccccaaaggcucuuuucagagccaccagaauu

SEQ ID NO: 4089 - RNA, 1964 nt, Artificial Sequence
  mRNA product Design f-3 comprising derived and/or modified sequence from HRSV(A2)__F_DSCav1_mut0 (opt6)
gggagagucccgcagucggcguccagcggcucugcuuguucgugugugugucguugcaggccuuauucaagcuuaccauggaacuacuaauacuaaaagccaaugcaauaacaaccauacuaaccgccguaacauuuuguuucgcaucaggucaaaacauaaccgaagaauuuuaucaaucaacaugcucagcaguaucaaaaggauacuuauccgcucuaagaacaggaugguacacaaguguaauuacaauagagcucucaaacauaaaagaaaacaaaugcaauggaacugacgcaaaaguuaaacuuauaaaacaagaacuagauaaauauaaaaaugcaguaaccgaauuacaacuccuaaugcaauccacaccugcuaccgguuccggaucagccauagcaucuggaguagccguaugcaaaguccuccaccuagaaggagaaguaaauaaaaucaaaucagcacuauuaucuaccaauaaagcaguugucucacuauccaauggcguaucaguacuaacauucaaaguauuagaccuuaaaaacuacauagacaaacaacuauuaccaauucugaacaaacaauccuguucaauaucaaacaucgaaacgguaauagaauuucaacaaaaaaauaacagauuacuugaaauaacaagagaauuuucaguaaaugcaggaguuacaacacccgucuccaccuacaugcucacaaauucagaauuauuaucacuuauaaacgacaugccaauaacuaacgaccaaaaaaaacuaaugucaaacaauguccaaauaguccgacaacaauccuacucaauaaugugcauuauaaaagaagaaguccuagccuacguuguccaacuacccuuauauggaguaauagauaccccaugcuggaaacuucauaccuccccccuaugcacaacaaacacaaaagaaggcucaaacaucugcuuaacacguacagaccgagguugguacugugauaacgcaggauccguaucauuuuucccacaagcagaaacaugcaaaguacaaucaaaccgcguuuuuugugacaccaugaacagcagaacccucccuucagaaguaaaccuaugcaacgucgauauauuuaacccaaaauacgauugcaaaauaaugacaucaaaaaccgaugucucaucuucaguaauaaccucucuaggagcaauagucucauguuacggaaaaacaaaaugcacagcaaguaauaaaaauagaggaauaauaaaaacauucucuaauggcugcgacuacguauccaauaaaggcguugacacaguauccguaggcaacacacucuacuauguuaacaaacaagaaggaaaaaguuuauacguuaaaggagaaccaauuauaaacuuuuacgacccacucguauucccaucugaugaauuugacgcaucaaucucacaaguaaaugaaaaaaucaaucagucccuugccuuuauaagaaaaucagaugaacuuuuacacaacguuaacgccggaaaaucaacaaccaauauaaugaucacaaccauaauaauaguuauaauuguaauuuuauuauccuuaauagccgucggacuacuacuauacugcaaagcaagaucuacacccguaacccuaucaaaagaccaacuaaguggaauaaauaacauugcauucucaaauuaaggacuaguacuggcugcaucucccuuuccucuguccuccauccuucucccaggauggugaagggggaccugguacccagugauccccaccccaggauccuaaaucaugacuuaccugcuaauaaaaacucauuggaaaagugagaagaucuaaaaaaaaaaaaaaaaaaaaaaaaaaaaaaaaaaaaaaaaaaaaaaaaaaaaaaaaaaaaaaaaugcaucccccccccccccccccccccccccccccccaaaggcucuuuucagagccaccagaauu

SEQ ID NO: 4090 - RNA, 1964 nt, Artificial Sequence
  mRNA product Design f-3 comprising derived and/or modified sequence from HRSV(A2)__F_DSCav1_mut0 (opt11)
gggagagucccgcagucggcguccagcggcucugcuuguucgugugugugucguugcaggccuuauucaagcuuaccauggaacuccuaauacuaaaggcaaacgcaaucacuacaauucuaaccgccgugacauucugcuucgccuccggacaaaacaucaccgaagaauuuuaccaauccacaugcucggccgucaguaaaggcuaccucucggcucuccgaaccggcugguacaccuccgucaucaccaucgaacucuccaacaucaaagaaaacaaaugcaacggcaccgacgccaaagucaaacuaaucaaacaagaacucgacaaauacaaaaacgccgucacagaacuccaacuacuaaugcaaucaacacccgcuacaggaagcggcuccgccaucgccagcggcguagcugucugcaaaguccuccaccucgaaggugaagucaacaaaaucaaaucagcccuacucagcacaaacaaagccguuguaagccuauccaacggcgucuccguacuaacauucaaaguccuugaccucaagaacuacaucgacaaacaacuucucccaauccuaaacaaacaaagcugcucaauuuccaacaucgaaacaguaaucgaauuucaacaaaaaaacaaccgacuccucgaaaucacccgcgaauuuuccguuaacgccggcguuacaacccccgucuccaccuacaugcucaccaauuccgaacuacuaucacucauaaacgacaugccuaucacaaacgaccaaaaaaaacuaaugucaaacaauguccaaaucguccgccagcaaagcuauuccaucaugugcaucaucaaagaggaaguccucgccuacguaguccaacugccccucuacggcgucauugauacccccugcuggaaacuccacaccuccccccucugcaccacaaacaccaaagaagguuccaacaucugccuaacacgaaccgacagaggcugguacugcgacaacgccggcagcgucuccuucuucccccaagcagaaaccuguaaaguccagucuaaccgcgucuucugcgacacaaugaacucaagaacccuaccuuccgaaguaaaccucugcaacguagacaucuucaacccuaaauacgacugcaaaaucaugacuucaaaaacagacguaagcucuuccguaaucacuucccucggcgccaucguauccugcuacgguaaaaccaaaugcaccgccuccaacaaaaaccgagggaucauaaaaaccuucuccaacggcugcgacuacguaucuaacaaaggcgucgacaccgucuccgucggcaacacccucuauuacguaaacaaacaagagggcaaaucacuauacgucaaaggcgagccaaucauaaacuucuaugacccacucgucuucccuucagacgaauuugaugccagcaucagccaagucaacgaaaaaaucaaccaaucacucgccuucauccgcaaaagcgacgaacuccuucacaacgucaacgcaggcaaaucaaccaccaacaucaugaucaccaccaucaucaucgucaucaucguuauccuacucagccucaucgcaguuggucuucuccuuuacugcaaagcccgcuccacccccgucacccucaguaaagaccaacucagcggaaucaacaacauagcauucuccaacuaaggacuaguacuggcugcaucucccuuuccucuguccuccauccuucucccaggauggugaagggggaccugguacccagugauccccaccccaggauccuaaaucaugacuuaccugcuaauaaaaacucauuggaaaagugagaagaucuaaaaaaaaaaaaaaaaaaaaaaaaaaaaaaaaaaaaaaaaaaaaaaaaaaaaaaaaaaaaaaaaugcaucccccccccccccccccccccccccccccccaaaggcucuuuucagagccaccagaauu

SEQ ID NO: 4091 - RNA, 2180 nt, Artificial Sequence
  mRNA product Design f-4 comprising derived and/or modified sequence from HRSV(A2)__F_DSCav1_mut0 (opt1)
gggagagucccgcagucggcguccagcggcucugcuuguucgugugugugucguugcaggccuuauucaagcuuaccauggagcugcucauccugaaggccaacgccaucaccaccauccugacggcggugaccuucugcuucgccagcggccagaacaucaccgaggaguucuaccaguccacgugcagcgccgucuccaagggguaccucagcgcccugcggaccggcugguacaccuccgugaucaccaucgagcugagcaacaucaaggagaacaagugcaacgggaccgacgccaaggugaagcucaucaagcaggagcuggacaaguacaagaacgcggucacggagcugcagcuccugaugcaguccaccccggcaaccggcuccggcuccgccaucgcgagcggcgucgccgugugcaaggugcugcaccucgagggggaggucaacaagaucaagagcgcccugcuguccaccaacaaggccguggugagccucuccaacggcgucagcgugcugaccuucaaggugcuggaccucaagaacuacaucgacaagcagcugcugcccauccugaacaagcagagcugcuccaucagcaacaucgagacggugaucgaguuccagcagaagaacaaccggcuccuggagaucacccgcgaguucagcgugaacgccggggucaccacccccguguccacguacaugcugaccaacagcgagcuccugucccugaucaacgacaugccgaucaccaacgaccagaagaagcucaugagcaacaacgugcagaucguccggcagcaguccuacagcaucaugugcaucaucaaggaggaggugcuggcguacgugguccagcugccccucuacggcgugaucgacacccccugcuggaagcugcacacgagcccccugugcaccaccaacaccaaggagggguccaacaucugccucacgcgcaccgaccggggcugguacugcgacaacgccggcagcgucuccuucuucccgcaggccgagaccugcaaggugcagagcaaccgcguguucugcgacaccaugaacucccggacgcugcccagcgagguaaaccucugcaacgucgacaucuucaaccccaaguacgacugcaagaucaugaccuccaagaccgacgugagcuccagcgugaucaccucccugggggccaucgucagcugcuacggcaagacgaagugcaccgccagcaacaagaaccgggggaucaucaagaccuucuccaacggcugcgacuacgugagcaacaagggcguggacaccguguccgucgggaacacccuguacuacgugaacaagcaggagggcaagagccucuacgugaagggggagcccaucaucaacuucuacgacccgcuggucuuccccuccgacgaguucgacgcgagcaucucccaggugaacgagaagaucaaccagagccuggccuucauccgcaaguccgacgagcugcuccacaacgugaacgccggcaagagcacgaccaacaucaugaucaccaccaucaucaucgucaucaucgugauccugcugucccucaucgccguggggcugcugcucuacugcaaggcccggagcacgcccgucacccuguccaaggaccagcugagcggcaucaacaacaucgcguucuccaacugaggacuagugaagggaacacccaaauuuaauucagccuuaagcacaauuaauuaagagugaaacguaauuguacaagcaguuggucacccaccauagggcaugaucaacaccgcaaccuuuccuuuuucccccagugauucugaaaaaccccucuucccuucagcuugcuuagauguuccaaauuuaguaagcuuaaggcggccuacagaagaaaaagaaaaaaaaggccacaaaaguucccucucacuuucaguaaauaaaauaaaagcagcaacagaaauaaagaaauaaaugaaauucaaaaugaaauaaauauuguguugugcagcauuaaaaaaucaauaaaaauuaaaaaugagcaagaucuaaaaaaaaaaaaaaaaaaaaaaaaaaaaaaaaaaaaaaaaaaaaaaaaaaaaaaaaaaaaaaaaugcaucccccccccccccccccccccccccccccccaaaggcucuuuucagagccaccagaauu

SEQ ID NO: 4092 - RNA, 2180 nt, Artificial Sequence
  mRNA product Design f-4 comprising derived and/or modified sequence from HRSV(A2)__F_DSCav1_mut0 (opt1)
gggagagucccgcagucggcguccagcggcucugcuuguucgugugugugucguugcaggccuuauucaagcuuaccauggagcugcucauccugaaggccaacgccaucaccaccauccugacggcggugaccuucugcuucgccagcggccagaacaucaccgaggaguucuaccaguccacgugcagcgccgucuccaagggguaccucagcgcccugcgcaccggcugguacaccuccgugaucaccaucgagcugagcaacaucaaggagaacaagugcaacgggaccgacgccaaggugaagcucaucaagcaggagcuggacaaguacaagaacgcggucacggagcugcagcuccugaugcaguccacccccgccaccggcagcggguccgccaucgccagcggcguggcggugugcaagguccugcaccucgagggcgaggugaacaagaucaaguccgcccugcugagcaccaacaaggccguggucucccucagcaacgggguguccgugcugacguucaagguccuggaccucaagaacuacaucgacaagcagcugcugccgauccucaacaagcagagcugcuccaucagcaacaucgagaccgugaucgaguuccagcagaagaacaaccggcugcuggagaucacccgcgaguucuccgugaacgccggcgucaccacgcccgugagcaccuacaugcucaccaacagcgagcugcugucccucaucaacgacaugcccaucaccaacgaccagaagaagcugaugagcaacaacgugcagaucguccggcagcaguccuacagcaucaugugcaucaucaaggaggaggugcuggccuacgugguccagcucccccuguacggggugaucgacacgccgugcuggaagcugcacaccagcccccucugcaccaccaacacgaaggagggcuccaacaucugccugacccgcaccgaccgggggugguacugcgacaacgcgggcuccgugagcuucuucccccaggccgagaccugcaagguccaguccaaccgcguguucugcgacacgaugaacagccggacccuccccuccgaggucaaccugugcaacguggacaucuucaacccgaaguacgacugcaagaucaugaccagcaagaccgacguguccagcuccgucaucacgagccugggcgccaucguguccugcuacgggaagaccaagugcaccgccagcaacaagaaccggggcaucaucaagaccuucuccaacgggugcgacuacgugagcaacaagggcgucgacacggugagcgugggcaacacccucuacuacgucaacaagcaggaggggaagucccuguacgugaagggcgagcccaucaucaacuucuacgacccccugguguuccccagcgacgaguucgacgccuccaucagccaggucaacgagaagaucaaccagucccucgcguucauccgcaagagcgacgagcugcugcacaacgugaacgccgggaaguccaccaccaacaucaugaucaccacgaucaucaucgugaucaucgucauccuccugagccugaucgccgugggccuccugcuguacugcaaggcccgguccaccccggugacccugagcaaggaccagcucuccgggaucaacaacaucgccuucagcaacugaggacuagugaagggaacacccaaauuuaauucagccuuaagcacaauuaauuaagagugaaacguaauuguacaagcaguuggucacccaccauagggcaugaucaacaccgcaaccuuuccuuuuucccccagugauucugaaaaaccccucuucccuucagcuugcuuagauguuccaaauuuaguaagcuuaaggcggccuacagaagaaaaagaaaaaaaaggccacaaaaguucccucucacuuucaguaaauaaaauaaaagcagcaacagaaauaaagaaauaaaugaaauucaaaaugaaauaaauauuguguugugcagcauuaaaaaaucaauaaaaauuaaaaaugagcaagaucuaaaaaaaaaaaaaaaaaaaaaaaaaaaaaaaaaaaaaaaaaaaaaaaaaaaaaaaaaaaaaaaaugcaucccccccccccccccccccccccccccccccaaaggcucuuuucagagccaccagaauu

SEQ ID NO: 4093 - RNA, 2180 nt, Artificial Sequence
  mRNA product Design f-4 comprising derived and/or modified sequence from HRSV(A2)__F_DSCav1_mut0 (opt2)
gggagagucccgcagucggcguccagcggcucugcuuguucgugugugugucguugcaggccuuauucaagcuuaccauggagcuccucauccucaaggccaacgccaucaccaccauccucaccgccgucaccuucugcuucgccuccggccagaacaucaccgaggaguucuaccaguccaccugcuccgccgucuccaagggcuaccucuccgcccuccgcaccggcugguacaccuccgucaucaccaucgagcucuccaacaucaaggagaacaagugcaacggcaccgacgccaaggucaagcucaucaagcaggagcucgacaaguacaagaacgccgucaccgagcuccagcuccucaugcaguccacccccgccaccggcuccggcuccgccaucgccuccggcgucgccgucugcaagguccuccaccucgagggcgaggucaacaagaucaaguccgcccuccucuccaccaacaaggccgucgucucccucuccaacggcgucuccguccucaccuucaagguccucgaccucaagaacuacaucgacaagcagcuccuccccauccucaacaagcaguccugcuccaucuccaacaucgagaccgucaucgaguuccagcagaagaacaaccgccuccucgagaucacccgcgaguucuccgucaacgccggcgucaccacccccgucuccaccuacaugcucaccaacuccgagcuccucucccucaucaacgacaugcccaucaccaacgaccagaagaagcucauguccaacaacguccagaucguccgccagcaguccuacuccaucaugugcaucaucaaggaggagguccucgccuacgucguccagcucccccucuacggcgucaucgacacccccugcuggaagcuccacaccuccccccucugcaccaccaacaccaaggagggcuccaacaucugccucacccgcaccgaccgcggcugguacugcgacaacgccggcuccgucuccuucuucccccaggccgagaccugcaagguccaguccaaccgcgucuucugcgacaccaugaacucccgcacccuccccuccgaggucaaccucugcaacgucgacaucuucaaccccaaguacgacugcaagaucaugaccuccaagaccgacgucuccuccuccgucaucaccucccucggcgccaucgucuccugcuacggcaagaccaagugcaccgccuccaacaagaaccgcggcaucaucaagaccuucuccaacggcugcgacuacgucuccaacaagggcgucgacaccgucuccgucggcaacacccucuacuacgucaacaagcaggagggcaagucccucuacgucaagggcgagcccaucaucaacuucuacgacccccucgucuuccccuccgacgaguucgacgccuccaucucccaggucaacgagaagaucaaccagucccucgccuucauccgcaaguccgacgagcuccuccacaacgucaacgccggcaaguccaccaccaacaucaugaucaccaccaucaucaucgucaucaucgucauccuccucucccucaucgccgucggccuccuccucuacugcaaggcccgcuccacccccgucacccucuccaaggaccagcucuccggcaucaacaacaucgccuucuccaacugaggacuagugaagggaacacccaaauuuaauucagccuuaagcacaauuaauuaagagugaaacguaauuguacaagcaguuggucacccaccauagggcaugaucaacaccgcaaccuuuccuuuuucccccagugauucugaaaaaccccucuucccuucagcuugcuuagauguuccaaauuuaguaagcuuaaggcggccuacagaagaaaaagaaaaaaaaggccacaaaaguucccucucacuuucaguaaauaaaauaaaagcagcaacagaaauaaagaaauaaaugaaauucaaaaugaaauaaauauuguguugugcagcauuaaaaaaucaauaaaaauuaaaaaugagcaagaucuaaaaaaaaaaaaaaaaaaaaaaaaaaaaaaaaaaaaaaaaaaaaaaaaaaaaaaaaaaaaaaaaugcaucccccccccccccccccccccccccccccccaaaggcucuuuucagagccaccagaauu

SEQ ID NO: 4094 - RNA, 2180 nt, Artificial Sequence
  mRNA product Design f-4 comprising derived and/or modified sequence from HRSV(A2)__F_DSCav1_mut0 (opt3)
gggagagucccgcagucggcguccagcggcucugcuuguucgugugugugucguugcaggccuuauucaagcuuaccauggagcugcucauccuuaaggccaacgcuauuaccacaauacugacugcagugacguucugcuuugccagcggccagaauaucaccgaagaguucuaccaauccacauguucugcggucucaaaaggguauuugagugcuuuaagaacuggaugguacaccagcguuauuacaaucgaacuguccaacauuaaggagaauaaaugcaacgguaccgacgccaaggugaaacuaaucaagcaggaacucgauaaguauaaaaaugcaguaacugagcugcagcuucugaugcagucuacacccgccaccggcucggggucagcuauagcaagcggaguggccgucuguaagguguugcaccucgagggcgaaguuaacaaaaucaagagugcucugcuguccacgaauaaagccguggucucucucagcaacgguguguccguauuaacuuuuaagguucuggaccuuaagaauuacauugauaaacaauugcugccuauccuaaacaagcagucaugcaguauuagcaauaucgagaccgugauagaguuccagcagaaaaacaauaggcuccuggaaauuacacgggaguuuucugucaacgcgggggugacuaccccaguguccacauauaugcuuaccaauucagaacuguugagccucaucaacgacaugccgauuacgaacgaucaaaagaaacugaugaguaauaacguccagaucguucgccagcagucuuacuccaucauguguauuauaaaggaggaaguguuagcauauguagugcaacugccccucuacggagucaucgacacuccuugcuggaaacuucauacaagcccacuguguaccacuaauacaaaggagggcucgaacauuugcuugacccgaacggaucguggcugguacugugacaaugccgggucuguguccuucuuuccccaggcugaaaccugcaagguucagucaaacagaguguucugugauacaaugaauaguagaacucugccuagcgaggucaaccucugcaauguggacaucuuuaacccaaaauaugauugcaagauaaugaccuccaaaacagacguaucuagcucaguuauuaccagucugggagccaucguguccuguuacgguaagacuaaaugcacagcaagcaauaagaacaggggcaucauuaagaccuucucuaaugggugugauuaugucucaaacaaaggaguggacacugucagugugggcaauacgcuuuacuauguuaacaagcaagaggguaaaagccuguacgugaagggggaacccaucauuaacuuuuaugacccuuugguauucccauccgaugaguuugacgcuucuauaucgcaggucaaugagaaaaucaaccagagccucgccuucauucggaaguccgaugaacuguuacacaaugugaacgcgggaaagucaacaaccaauaucaugaucacuaccauuauaaucguuauuaucgugauucugcuaagucucaucgccgucggccugcuuuuguacugcaaagcacgcucuacaccggugacccugagcaaggaccagcucuccggcauaaacaauaucgcuuucucaaacugaggacuagugaagggaacacccaaauuuaauucagccuuaagcacaauuaauuaagagugaaacguaauuguacaagcaguuggucacccaccauagggcaugaucaacaccgcaaccuuuccuuuuucccccagugauucugaaaaaccccucuucccuucagcuugcuuagauguuccaaauuuaguaagcuuaaggcggccuacagaagaaaaagaaaaaaaaggccacaaaaguucccucucacuuucaguaaauaaaauaaaagcagcaacagaaauaaagaaauaaaugaaauucaaaaugaaauaaauauuguguugugcagcauuaaaaaaucaauaaaaauuaaaaaugagcaagaucuaaaaaaaaaaaaaaaaaaaaaaaaaaaaaaaaaaaaaaaaaaaaaaaaaaaaaaaaaaaaaaaaugcaucccccccccccccccccccccccccccccccaaaggcucuuuucagagccaccagaauu

SEQ ID NO: 4095 - RNA, 2180 nt, Artificial Sequence
  mRNA product Design f-4 comprising derived and/or modified sequence from HRSV(A2)__F_DSCav1_mut0 (opt4)
gggagagucccgcagucggcguccagcggcucugcuuguucgugugugugucguugcaggccuuauucaagcuuaccauggagcugcugauccugaaggccaacgccaucaccaccauccugaccgccgugaccuucugcuucgccagcggccagaacaucaccgaggaguucuaccagagcaccugcagcgccgugagcaagggcuaccugagcgcccugagaaccggcugguacaccagcgugaucaccaucgagcugagcaacaucaaggagaacaagugcaacggcaccgacgccaaggugaagcugaucaagcaggagcuggacaaguacaagaacgccgugaccgagcugcagcugcugaugcagagcacccccgccaccggcagcggcagcgccaucgccagcggcguggccgugugcaaggugcugcaccuggagggcgaggugaacaagaucaagagcgcccugcugagcaccaacaaggccguggugagccugagcaacggcgugagcgugcugaccuucaaggugcuggaccugaagaacuacaucgacaagcagcugcugcccauccugaacaagcagagcugcagcaucagcaacaucgagaccgugaucgaguuccagcagaagaacaacagacugcuggagaucaccagagaguucagcgugaacgccggcgugaccacccccgugagcaccuacaugcugaccaacagcgagcugcugagccugaucaacgacaugcccaucaccaacgaccagaagaagcugaugagcaacaacgugcagaucgugagacagcagagcuacagcaucaugugcaucaucaaggaggaggugcuggccuacguggugcagcugccccuguacggcgugaucgacacccccugcuggaagcugcacaccagcccccugugcaccaccaacaccaaggagggcagcaacaucugccugaccagaaccgacagaggcugguacugcgacaacgccggcagcgugagcuucuucccccaggccgagaccugcaaggugcagagcaacagaguguucugcgacaccaugaacagcagaacccugcccagcgaggugaaccugugcaacguggacaucuucaaccccaaguacgacugcaagaucaugaccagcaagaccgacgugagcagcagcgugaucaccagccugggcgccaucgugagcugcuacggcaagaccaagugcaccgccagcaacaagaacagaggcaucaucaagaccuucagcaacggcugcgacuacgugagcaacaagggcguggacaccgugagcgugggcaacacccuguacuacgugaacaagcaggagggcaagagccuguacgugaagggcgagcccaucaucaacuucuacgacccccugguguuccccagcgacgaguucgacgccagcaucagccaggugaacgagaagaucaaccagagccuggccuucaucagaaagagcgacgagcugcugcacaacgugaacgccggcaagagcaccaccaacaucaugaucaccaccaucaucaucgugaucaucgugauccugcugagccugaucgccgugggccugcugcuguacugcaaggccagaagcacccccgugacccugagcaaggaccagcugagcggcaucaacaacaucgccuucagcaacugaggacuagugaagggaacacccaaauuuaauucagccuuaagcacaauuaauuaagagugaaacguaauuguacaagcaguuggucacccaccauagggcaugaucaacaccgcaaccuuuccuuuuucccccagugauucugaaaaaccccucuucccuucagcuugcuuagauguuccaaauuuaguaagcuuaaggcggccuacagaagaaaaagaaaaaaaaggccacaaaaguucccucucacuuucaguaaauaaaauaaaagcagcaacagaaauaaagaaauaaaugaaauucaaaaugaaauaaauauuguguugugcagcauuaaaaaaucaauaaaaauuaaaaaugagcaagaucuaaaaaaaaaaaaaaaaaaaaaaaaaaaaaaaaaaaaaaaaaaaaaaaaaaaaaaaaaaaaaaaaugcaucccccccccccccccccccccccccccccccaaaggcucuuuucagagccaccagaauu

SEQ ID NO: 4096 - RNA, 2180 nt, Artificial Sequence
  mRNA product Design f-4 comprising derived and/or modified sequence from HRSV(A2)__F_DSCav1_mut0 (opt5)
gggagagucccgcagucggcguccagcggcucugcuuguucgugugugugucguugcaggccuuauucaagcuuaccauggagcugcucauccugaaggccaacgcuauuaccacaauccuuacggccgugaccuucugcuuugcgagcggccagaauauuacagaagaguucuaccaauccaccuguucugcugucagcaaaggguaucuguccgcccucagaacaggaugguacaccucuguuaucacaauugaacugagcaacaucaaggagaauaaaugcaacggcaccgacgccaaggugaaacuuaucaagcaggaacuggauaaguauaaaaaugcugugacggagcuccagcugcugaugcaguccacccccgccacagggucuggaagcgcuauugccuccggcgucgcgguguguaagguucuccaccuggagggggaagugaacaaaaucaagagcgcccuucugucuaccaauaaagcugucgugucccucagcaacggaguuucugugcugacauuuaagguccuugaccugaagaauuacauugauaaacaacuccugccuauccugaacaagcaguccugcagcauuucuaauaucgagaccgugauugaguuccagcagaaaaacaaucggcuccuggaaaucacgcgcgaguuuuccgugaacgccggcgucacaaccccgguuagcacauauaugcuuaccaauuccgaacugcucucucugaucaacgacaugcccauuaccaacgaucaaaagaaacuuaugagcaauaacgugcagaucgugagacagcaguccuacagcauuauguguaucauuaaggaggaaguccuggcuuaugugguucaacucccucuguacggcgugaucgacacacccugcuggaaacugcauacgucuccucucuguaccacaaauaccaaggagggguccaacaucugccugacacggaccgaucgcggaugguacugugacaaugccggcagcgucucuuucuuuccccaggcggaaacgugcaaggugcagagcaacagaguuuucugugauacaaugaacuccagaacccugccuucugaggugaaucucugcaaugucgacauuuuuaacccgaaauaugauugcaagaucaugaccagcaaaacagacguguccagcucugucauuaccucccugggggccaucgugagcuguuacggaaagacaaaaugcacggcuucuaauaagaaccggggcauuaucaagaccuucuccaaugggugugauuauguuagcaacaaaggaguggacacagucuccgugggcaauacccuuuacuauguuaacaagcaagagggcaaaucucuguacgugaagggggaacccaucauuaacuuuuaugacccucucgucuuccccagcgaugaguuugacgccuccaucucucaggugaaugagaaaauuaaccagagccuggcuuucauccgcaaguccgaugaacugcuccacaaugugaacgccggaaagagcacaaccaauauuaugaucacgaccauuaucaucguuauuaucgucauucugcuuucucugaucgccgugggccuccugcuguacugcaaagcuagauccacaccugugacccuuagcaaggaccagcucucugggauuaacaauaucgcguucuccaacugaggacuagugaagggaacacccaaauuuaauucagccuuaagcacaauuaauuaagagugaaacguaauuguacaagcaguuggucacccaccauagggcaugaucaacaccgcaaccuuuccuuuuucccccagugauucugaaaaaccccucuucccuucagcuugcuuagauguuccaaauuuaguaagcuuaaggcggccuacagaagaaaaagaaaaaaaaggccacaaaaguucccucucacuuucaguaaauaaaauaaaagcagcaacagaaauaaagaaauaaaugaaauucaaaaugaaauaaauauuguguugugcagcauuaaaaaaucaauaaaaauuaaaaaugagcaagaucuaaaaaaaaaaaaaaaaaaaaaaaaaaaaaaaaaaaaaaaaaaaaaaaaaaaaaaaaaaaaaaaaugcaucccccccccccccccccccccccccccccccaaaggcucuuuucagagccaccagaauu

SEQ ID NO: 4097 - RNA, 2180 nt, Artificial Sequence
  mRNA product Design f-4 comprising derived and/or modified sequence from HRSV(A2)__F_DSCav1_mut0 (opt6)
gggagagucccgcagucggcguccagcggcucugcuuguucgugugugugucguugcaggccuuauucaagcuuaccauggaacuacuaauacuaaaagccaaugcaauaacaaccauacuaaccgccguaacauuuuguuucgcaucaggucaaaacauaaccgaagaauuuuaucaaucaacaugcucagcaguaucaaaaggauacuuauccgcucuaagaacaggaugguacacaaguguaauuacaauagagcucucaaacauaaaagaaaacaaaugcaauggaacugacgcaaaaguuaaacuuauaaaacaagaacuagauaaauauaaaaaugcaguaaccgaauuacaacuccuaaugcaauccacaccugcuaccgguuccggaucagccauagcaucuggaguagccguaugcaaaguccuccaccuagaaggagaaguaaauaaaaucaaaucagcacuauuaucuaccaauaaagcaguugucucacuauccaauggcguaucaguacuaacauucaaaguauuagaccuuaaaaacuacauagacaaacaacuauuaccaauucugaacaaacaauccuguucaauaucaaacaucgaaacgguaauagaauuucaacaaaaaaauaacagauuacuugaaauaacaagagaauuuucaguaaaugcaggaguuacaacacccgucuccaccuacaugcucacaaauucagaauuauuaucacuuauaaacgacaugccaauaacuaacgaccaaaaaaaacuaaugucaaacaauguccaaauaguccgacaacaauccuacucaauaaugugcauuauaaaagaagaaguccuagccuacguuguccaacuacccuuauauggaguaauagauaccccaugcuggaaacuucauaccuccccccuaugcacaacaaacacaaaagaaggcucaaacaucugcuuaacacguacagaccgagguugguacugugauaacgcaggauccguaucauuuuucccacaagcagaaacaugcaaaguacaaucaaaccgcguuuuuugugacaccaugaacagcagaacccucccuucagaaguaaaccuaugcaacgucgauauauuuaacccaaaauacgauugcaaaauaaugacaucaaaaaccgaugucucaucuucaguaauaaccucucuaggagcaauagucucauguuacggaaaaacaaaaugcacagcaaguaauaaaaauagaggaauaauaaaaacauucucuaauggcugcgacuacguauccaauaaaggcguugacacaguauccguaggcaacacacucuacuauguuaacaaacaagaaggaaaaaguuuauacguuaaaggagaaccaauuauaaacuuuuacgacccacucguauucccaucugaugaauuugacgcaucaaucucacaaguaaaugaaaaaaucaaucagucccuugccuuuauaagaaaaucagaugaacuuuuacacaacguuaacgccggaaaaucaacaaccaauauaaugaucacaaccauaauaauaguuauaauuguaauuuuauuauccuuaauagccgucggacuacuacuauacugcaaagcaagaucuacacccguaacccuaucaaaagaccaacuaaguggaauaaauaacauugcauucucaaauuaaggacuagugaagggaacacccaaauuuaauucagccuuaagcacaauuaauuaagagugaaacguaauuguacaagcaguuggucacccaccauagggcaugaucaacaccgcaaccuuuccuuuuucccccagugauucugaaaaaccccucuucccuucagcuugcuuagauguuccaaauuuaguaagcuuaaggcggccuacagaagaaaaagaaaaaaaaggccacaaaaguucccucucacuuucaguaaauaaaauaaaagcagcaacagaaauaaagaaauaaaugaaauucaaaaugaaauaaauauuguguugugcagcauuaaaaaaucaauaaaaauuaaaaaugagcaagaucuaaaaaaaaaaaaaaaaaaaaaaaaaaaaaaaaaaaaaaaaaaaaaaaaaaaaaaaaaaaaaaaaugcaucccccccccccccccccccccccccccccccaaaggcucuuuucagagccaccagaauu

SEQ ID NO: 4098 - RNA, 2180 nt, Artificial Sequence
  mRNA product Design f-4 comprising derived and/or modified sequence from HRSV(A2)__F_DSCav1_mut0 (opt11)
gggagagucccgcagucggcguccagcggcucugcuuguucgugugugugucguugcaggccuuauucaagcuuaccauggaacuccuaauacuaaaggcaaacgcaaucacuacaauucuaaccgccgugacauucugcuucgccuccggacaaaacaucaccgaagaauuuuaccaauccacaugcucggccgucaguaaaggcuaccucucggcucuccgaaccggcugguacaccuccgucaucaccaucgaacucuccaacaucaaagaaaacaaaugcaacggcaccgacgccaaagucaaacuaaucaaacaagaacucgacaaauacaaaaacgccgucacagaacuccaacuacuaaugcaaucaacacccgcuacaggaagcggcuccgccaucgccagcggcguagcugucugcaaaguccuccaccucgaaggugaagucaacaaaaucaaaucagcccuacucagcacaaacaaagccguuguaagccuauccaacggcgucuccguacuaacauucaaaguccuugaccucaagaacuacaucgacaaacaacuucucccaauccuaaacaaacaaagcugcucaauuuccaacaucgaaacaguaaucgaauuucaacaaaaaaacaaccgacuccucgaaaucacccgcgaauuuuccguuaacgccggcguuacaacccccgucuccaccuacaugcucaccaauuccgaacuacuaucacucauaaacgacaugccuaucacaaacgaccaaaaaaaacuaaugucaaacaauguccaaaucguccgccagcaaagcuauuccaucaugugcaucaucaaagaggaaguccucgccuacguaguccaacugccccucuacggcgucauugauacccccugcuggaaacuccacaccuccccccucugcaccacaaacaccaaagaagguuccaacaucugccuaacacgaaccgacagaggcugguacugcgacaacgccggcagcgucuccuucuucccccaagcagaaaccuguaaaguccagucuaaccgcgucuucugcgacacaaugaacucaagaacccuaccuuccgaaguaaaccucugcaacguagacaucuucaacccuaaauacgacugcaaaaucaugacuucaaaaacagacguaagcucuuccguaaucacuucccucggcgccaucguauccugcuacgguaaaaccaaaugcaccgccuccaacaaaaaccgagggaucauaaaaaccuucuccaacggcugcgacuacguaucuaacaaaggcgucgacaccgucuccgucggcaacacccucuauuacguaaacaaacaagagggcaaaucacuauacgucaaaggcgagccaaucauaaacuucuaugacccacucgucuucccuucagacgaauuugaugccagcaucagccaagucaacgaaaaaaucaaccaaucacucgccuucauccgcaaaagcgacgaacuccuucacaacgucaacgcaggcaaaucaaccaccaacaucaugaucaccaccaucaucaucgucaucaucguuauccuacucagccucaucgcaguuggucuucuccuuuacugcaaagcccgcuccacccccgucacccucaguaaagaccaacucagcggaaucaacaacauagcauucuccaacuaaggacuagugaagggaacacccaaauuuaauucagccuuaagcacaauuaauuaagagugaaacguaauuguacaagcaguuggucacccaccauagggcaugaucaacaccgcaaccuuuccuuuuucccccagugauucugaaaaaccccucuucccuucagcuugcuuagauguuccaaauuuaguaagcuuaaggcggccuacagaagaaaaagaaaaaaaaggccacaaaaguucccucucacuuucaguaaauaaaauaaaagcagcaacagaaauaaagaaauaaaugaaauucaaaaugaaauaaauauuguguugugcagcauuaaaaaaucaauaaaaauuaaaaaugagcaagaucuaaaaaaaaaaaaaaaaaaaaaaaaaaaaaaaaaaaaaaaaaaaaaaaaaaaaaaaaaaaaaaaaugcaucccccccccccccccccccccccccccccccaaaggcucuuuucagagccaccagaauu

SEQ ID NO: 4099 - RNA, 1956 nt, Artificial Sequence
  mRNA product Design f-5 comprising derived and/or modified sequence from HRSV(A2)__F_DSCav1_mut0 (opt1)
gggagacuuucccauucuguagcagaauuugguguugccuguggucuuggucccgcggagaagcuuaccauggagcugcucauccugaaggccaacgccaucaccaccauccugacggcggugaccuucugcuucgccagcggccagaacaucaccgaggaguucuaccaguccacgugcagcgccgucuccaagggguaccucagcgcccugcggaccggcugguacaccuccgugaucaccaucgagcugagcaacaucaaggagaacaagugcaacgggaccgacgccaaggugaagcucaucaagcaggagcuggacaaguacaagaacgcggucacggagcugcagcuccugaugcaguccaccccggcaaccggcuccggcuccgccaucgcgagcggcgucgccgugugcaaggugcugcaccucgagggggaggucaacaagaucaagagcgcccugcuguccaccaacaaggccguggugagccucuccaacggcgucagcgugcugaccuucaaggugcuggaccucaagaacuacaucgacaagcagcugcugcccauccugaacaagcagagcugcuccaucagcaacaucgagacggugaucgaguuccagcagaagaacaaccggcuccuggagaucacccgcgaguucagcgugaacgccggggucaccacccccguguccacguacaugcugaccaacagcgagcuccugucccugaucaacgacaugccgaucaccaacgaccagaagaagcucaugagcaacaacgugcagaucguccggcagcaguccuacagcaucaugugcaucaucaaggaggaggugcuggcguacgugguccagcugccccucuacggcgugaucgacacccccugcuggaagcugcacacgagcccccugugcaccaccaacaccaaggagggguccaacaucugccucacgcgcaccgaccggggcugguacugcgacaacgccggcagcgucuccuucuucccgcaggccgagaccugcaaggugcagagcaaccgcguguucugcgacaccaugaacucccggacgcugcccagcgagguaaaccucugcaacgucgacaucuucaaccccaaguacgacugcaagaucaugaccuccaagaccgacgugagcuccagcgugaucaccucccugggggccaucgucagcugcuacggcaagacgaagugcaccgccagcaacaagaaccgggggaucaucaagaccuucuccaacggcugcgacuacgugagcaacaagggcguggacaccguguccgucgggaacacccuguacuacgugaacaagcaggagggcaagagccucuacgugaagggggagcccaucaucaacuucuacgacccgcuggucuuccccuccgacgaguucgacgcgagcaucucccaggugaacgagaagaucaaccagagccuggccuucauccgcaaguccgacgagcugcuccacaacgugaacgccggcaagagcacgaccaacaucaugaucaccaccaucaucaucgucaucaucgugauccugcugucccucaucgccguggggcugcugcucuacugcaaggcccggagcacgcccgucacccuguccaaggaccagcugagcggcaucaacaacaucgcguucuccaacugaggacuaguacuggcugcaucucccuuuccucuguccuccauccuucucccaggauggugaagggggaccugguacccagugauccccaccccaggauccuaaaucaugacuuaccugcuaauaaaaacucauuggaaaagugagaagaucuaaaaaaaaaaaaaaaaaaaaaaaaaaaaaaaaaaaaaaaaaaaaaaaaaaaaaaaaaaaaaaaaugcaucccccccccccccccccccccccccccccccaaaggcucuuuucagagccaccagaauu

SEQ ID NO: 4100 - RNA, 1956 nt, Artificial Sequence
  mRNA product Design f-5 comprising derived and/or modified sequence from HRSV(A2)__F_DSCav1_mut0 (opt1)
gggagacuuucccauucuguagcagaauuugguguugccuguggucuuggucccgcggagaagcuuaccauggagcugcucauccugaaggccaacgccaucaccaccauccugacggcggugaccuucugcuucgccagcggccagaacaucaccgaggaguucuaccaguccacgugcagcgccgucuccaagggguaccucagcgcccugcgcaccggcugguacaccuccgugaucaccaucgagcugagcaacaucaaggagaacaagugcaacgggaccgacgccaaggugaagcucaucaagcaggagcuggacaaguacaagaacgcggucacggagcugcagcuccugaugcaguccacccccgccaccggcagcggguccgccaucgccagcggcguggcggugugcaagguccugcaccucgagggcgaggugaacaagaucaaguccgcccugcugagcaccaacaaggccguggucucccucagcaacgggguguccgugcugacguucaagguccuggaccucaagaacuacaucgacaagcagcugcugccgauccucaacaagcagagcugcuccaucagcaacaucgagaccgugaucgaguuccagcagaagaacaaccggcugcuggagaucacccgcgaguucuccgugaacgccggcgucaccacgcccgugagcaccuacaugcucaccaacagcgagcugcugucccucaucaacgacaugcccaucaccaacgaccagaagaagcugaugagcaacaacgugcagaucguccggcagcaguccuacagcaucaugugcaucaucaaggaggaggugcuggccuacgugguccagcucccccuguacggggugaucgacacgccgugcuggaagcugcacaccagcccccucugcaccaccaacacgaaggagggcuccaacaucugccugacccgcaccgaccgggggugguacugcgacaacgcgggcuccgugagcuucuucccccaggccgagaccugcaagguccaguccaaccgcguguucugcgacacgaugaacagccggacccuccccuccgaggucaaccugugcaacguggacaucuucaacccgaaguacgacugcaagaucaugaccagcaagaccgacguguccagcuccgucaucacgagccugggcgccaucguguccugcuacgggaagaccaagugcaccgccagcaacaagaaccggggcaucaucaagaccuucuccaacgggugcgacuacgugagcaacaagggcgucgacacggugagcgugggcaacacccucuacuacgucaacaagcaggaggggaagucccuguacgugaagggcgagcccaucaucaacuucuacgacccccugguguuccccagcgacgaguucgacgccuccaucagccaggucaacgagaagaucaaccagucccucgcguucauccgcaagagcgacgagcugcugcacaacgugaacgccgggaaguccaccaccaacaucaugaucaccacgaucaucaucgugaucaucgucauccuccugagccugaucgccgugggccuccugcuguacugcaaggcccgguccaccccggugacccugagcaaggaccagcucuccgggaucaacaacaucgccuucagcaacugaggacuaguacuggcugcaucucccuuuccucuguccuccauccuucucccaggauggugaagggggaccugguacccagugauccccaccccaggauccuaaaucaugacuuaccugcuaauaaaaacucauuggaaaagugagaagaucuaaaaaaaaaaaaaaaaaaaaaaaaaaaaaaaaaaaaaaaaaaaaaaaaaaaaaaaaaaaaaaaaugcaucccccccccccccccccccccccccccccccaaaggcucuuuucagagccaccagaauu

SEQ ID NO: 4101 - RNA, 1956 nt, Artificial Sequence
  mRNA product Design f-5 comprising derived and/or modified sequence from HRSV(A2)__F_DSCav1_mut0 (opt2)
gggagacuuucccauucuguagcagaauuugguguugccuguggucuuggucccgcggagaagcuuaccauggagcuccucauccucaaggccaacgccaucaccaccauccucaccgccgucaccuucugcuucgccuccggccagaacaucaccgaggaguucuaccaguccaccugcuccgccgucuccaagggcuaccucuccgcccuccgcaccggcugguacaccuccgucaucaccaucgagcucuccaacaucaaggagaacaagugcaacggcaccgacgccaaggucaagcucaucaagcaggagcucgacaaguacaagaacgccgucaccgagcuccagcuccucaugcaguccacccccgccaccggcuccggcuccgccaucgccuccggcgucgccgucugcaagguccuccaccucgagggcgaggucaacaagaucaaguccgcccuccucuccaccaacaaggccgucgucucccucuccaacggcgucuccguccucaccuucaagguccucgaccucaagaacuacaucgacaagcagcuccuccccauccucaacaagcaguccugcuccaucuccaacaucgagaccgucaucgaguuccagcagaagaacaaccgccuccucgagaucacccgcgaguucuccgucaacgccggcgucaccacccccgucuccaccuacaugcucaccaacuccgagcuccucucccucaucaacgacaugcccaucaccaacgaccagaagaagcucauguccaacaacguccagaucguccgccagcaguccuacuccaucaugugcaucaucaaggaggagguccucgccuacgucguccagcucccccucuacggcgucaucgacacccccugcuggaagcuccacaccuccccccucugcaccaccaacaccaaggagggcuccaacaucugccucacccgcaccgaccgcggcugguacugcgacaacgccggcuccgucuccuucuucccccaggccgagaccugcaagguccaguccaaccgcgucuucugcgacaccaugaacucccgcacccuccccuccgaggucaaccucugcaacgucgacaucuucaaccccaaguacgacugcaagaucaugaccuccaagaccgacgucuccuccuccgucaucaccucccucggcgccaucgucuccugcuacggcaagaccaagugcaccgccuccaacaagaaccgcggcaucaucaagaccuucuccaacggcugcgacuacgucuccaacaagggcgucgacaccgucuccgucggcaacacccucuacuacgucaacaagcaggagggcaagucccucuacgucaagggcgagcccaucaucaacuucuacgacccccucgucuuccccuccgacgaguucgacgccuccaucucccaggucaacgagaagaucaaccagucccucgccuucauccgcaaguccgacgagcuccuccacaacgucaacgccggcaaguccaccaccaacaucaugaucaccaccaucaucaucgucaucaucgucauccuccucucccucaucgccgucggccuccuccucuacugcaaggcccgcuccacccccgucacccucuccaaggaccagcucuccggcaucaacaacaucgccuucuccaacugaggacuaguacuggcugcaucucccuuuccucuguccuccauccuucucccaggauggugaagggggaccugguacccagugauccccaccccaggauccuaaaucaugacuuaccugcuaauaaaaacucauuggaaaagugagaagaucuaaaaaaaaaaaaaaaaaaaaaaaaaaaaaaaaaaaaaaaaaaaaaaaaaaaaaaaaaaaaaaaaugcaucccccccccccccccccccccccccccccccaaaggcucuuuucagagccaccagaauu

SEQ ID NO: 4102 - RNA, 1956 nt, Artificial Sequence
  mRNA product Design f-5 comprising derived and/or modified sequence from HRSV(A2)__F_DSCav1_mut0 (opt3)
gggagacuuucccauucuguagcagaauuugguguugccuguggucuuggucccgcggagaagcuuaccauggagcugcucauccuuaaggccaacgcuauuaccacaauacugacugcagugacguucugcuuugccagcggccagaauaucaccgaagaguucuaccaauccacauguucugcggucucaaaaggguauuugagugcuuuaagaacuggaugguacaccagcguuauuacaaucgaacuguccaacauuaaggagaauaaaugcaacgguaccgacgccaaggugaaacuaaucaagcaggaacucgauaaguauaaaaaugcaguaacugagcugcagcuucugaugcagucuacacccgccaccggcucggggucagcuauagcaagcggaguggccgucuguaagguguugcaccucgagggcgaaguuaacaaaaucaagagugcucugcuguccacgaauaaagccguggucucucucagcaacgguguguccguauuaacuuuuaagguucuggaccuuaagaauuacauugauaaacaauugcugccuauccuaaacaagcagucaugcaguauuagcaauaucgagaccgugauagaguuccagcagaaaaacaauaggcuccuggaaauuacacgggaguuuucugucaacgcgggggugacuaccccaguguccacauauaugcuuaccaauucagaacuguugagccucaucaacgacaugccgauuacgaacgaucaaaagaaacugaugaguaauaacguccagaucguucgccagcagucuuacuccaucauguguauuauaaaggaggaaguguuagcauauguagugcaacugccccucuacggagucaucgacacuccuugcuggaaacuucauacaagcccacuguguaccacuaauacaaaggagggcucgaacauuugcuugacccgaacggaucguggcugguacugugacaaugccgggucuguguccuucuuuccccaggcugaaaccugcaagguucagucaaacagaguguucugugauacaaugaauaguagaacucugccuagcgaggucaaccucugcaauguggacaucuuuaacccaaaauaugauugcaagauaaugaccuccaaaacagacguaucuagcucaguuauuaccagucugggagccaucguguccuguuacgguaagacuaaaugcacagcaagcaauaagaacaggggcaucauuaagaccuucucuaaugggugugauuaugucucaaacaaaggaguggacacugucagugugggcaauacgcuuuacuauguuaacaagcaagaggguaaaagccuguacgugaagggggaacccaucauuaacuuuuaugacccuuugguauucccauccgaugaguuugacgcuucuauaucgcaggucaaugagaaaaucaaccagagccucgccuucauucggaaguccgaugaacuguuacacaaugugaacgcgggaaagucaacaaccaauaucaugaucacuaccauuauaaucguuauuaucgugauucugcuaagucucaucgccgucggccugcuuuuguacugcaaagcacgcucuacaccggugacccugagcaaggaccagcucuccggcauaaacaauaucgcuuucucaaacugaggacuaguacuggcugcaucucccuuuccucuguccuccauccuucucccaggauggugaagggggaccugguacccagugauccccaccccaggauccuaaaucaugacuuaccugcuaauaaaaacucauuggaaaagugagaagaucuaaaaaaaaaaaaaaaaaaaaaaaaaaaaaaaaaaaaaaaaaaaaaaaaaaaaaaaaaaaaaaaaugcaucccccccccccccccccccccccccccccccaaaggcucuuuucagagccaccagaauu

SEQ ID NO: 4103 - RNA, 1956 nt, Artificial Sequence
  mRNA product Design f-5 comprising derived and/or modified sequence from HRSV(A2)__F_DSCav1_mut0 (opt4)
gggagacuuucccauucuguagcagaauuugguguugccuguggucuuggucccgcggagaagcuuaccauggagcugcugauccugaaggccaacgccaucaccaccauccugaccgccgugaccuucugcuucgccagcggccagaacaucaccgaggaguucuaccagagcaccugcagcgccgugagcaagggcuaccugagcgcccugagaaccggcugguacaccagcgugaucaccaucgagcugagcaacaucaaggagaacaagugcaacggcaccgacgccaaggugaagcugaucaagcaggagcuggacaaguacaagaacgccgugaccgagcugcagcugcugaugcagagcacccccgccaccggcagcggcagcgccaucgccagcggcguggccgugugcaaggugcugcaccuggagggcgaggugaacaagaucaagagcgcccugcugagcaccaacaaggccguggugagccugagcaacggcgugagcgugcugaccuucaaggugcuggaccugaagaacuacaucgacaagcagcugcugcccauccugaacaagcagagcugcagcaucagcaacaucgagaccgugaucgaguuccagcagaagaacaacagacugcuggagaucaccagagaguucagcgugaacgccggcgugaccacccccgugagcaccuacaugcugaccaacagcgagcugcugagccugaucaacgacaugcccaucaccaacgaccagaagaagcugaugagcaacaacgugcagaucgugagacagcagagcuacagcaucaugugcaucaucaaggaggaggugcuggccuacguggugcagcugccccuguacggcgugaucgacacccccugcuggaagcugcacaccagcccccugugcaccaccaacaccaaggagggcagcaacaucugccugaccagaaccgacagaggcugguacugcgacaacgccggcagcgugagcuucuucccccaggccgagaccugcaaggugcagagcaacagaguguucugcgacaccaugaacagcagaacccugcccagcgaggugaaccugugcaacguggacaucuucaaccccaaguacgacugcaagaucaugaccagcaagaccgacgugagcagcagcgugaucaccagccugggcgccaucgugagcugcuacggcaagaccaagugcaccgccagcaacaagaacagaggcaucaucaagaccuucagcaacggcugcgacuacgugagcaacaagggcguggacaccgugagcgugggcaacacccuguacuacgugaacaagcaggagggcaagagccuguacgugaagggcgagcccaucaucaacuucuacgacccccugguguuccccagcgacgaguucgacgccagcaucagccaggugaacgagaagaucaaccagagccuggccuucaucagaaagagcgacgagcugcugcacaacgugaacgccggcaagagcaccaccaacaucaugaucaccaccaucaucaucgugaucaucgugauccugcugagccugaucgccgugggccugcugcuguacugcaaggccagaagcacccccgugacccugagcaaggaccagcugagcggcaucaacaacaucgccuucagcaacugaggacuaguacuggcugcaucucccuuuccucuguccuccauccuucucccaggauggugaagggggaccugguacccagugauccccaccccaggauccuaaaucaugacuuaccugcuaauaaaaacucauuggaaaagugagaagaucuaaaaaaaaaaaaaaaaaaaaaaaaaaaaaaaaaaaaaaaaaaaaaaaaaaaaaaaaaaaaaaaaugcaucccccccccccccccccccccccccccccccaaaggcucuuuucagagccaccagaauu

SEQ ID NO: 4104 - RNA, 1956 nt, Artificial Sequence
  mRNA product Design f-5 comprising derived and/or modified sequence from HRSV(A2)__F_DSCav1_mut0 (opt5)
gggagacuuucccauucuguagcagaauuugguguugccuguggucuuggucccgcggagaagcuuaccauggagcugcucauccugaaggccaacgcuauuaccacaauccuuacggccgugaccuucugcuuugcgagcggccagaauauuacagaagaguucuaccaauccaccuguucugcugucagcaaaggguaucuguccgcccucagaacaggaugguacaccucuguuaucacaauugaacugagcaacaucaaggagaauaaaugcaacggcaccgacgccaaggugaaacuuaucaagcaggaacuggauaaguauaaaaaugcugugacggagcuccagcugcugaugcaguccacccccgccacagggucuggaagcgcuauugccuccggcgucgcgguguguaagguucuccaccuggagggggaagugaacaaaaucaagagcgcccuucugucuaccaauaaagcugucgugucccucagcaacggaguuucugugcugacauuuaagguccuugaccugaagaauuacauugauaaacaacuccugccuauccugaacaagcaguccugcagcauuucuaauaucgagaccgugauugaguuccagcagaaaaacaaucggcuccuggaaaucacgcgcgaguuuuccgugaacgccggcgucacaaccccgguuagcacauauaugcuuaccaauuccgaacugcucucucugaucaacgacaugcccauuaccaacgaucaaaagaaacuuaugagcaauaacgugcagaucgugagacagcaguccuacagcauuauguguaucauuaaggaggaaguccuggcuuaugugguucaacucccucuguacggcgugaucgacacacccugcuggaaacugcauacgucuccucucuguaccacaaauaccaaggagggguccaacaucugccugacacggaccgaucgcggaugguacugugacaaugccggcagcgucucuuucuuuccccaggcggaaacgugcaaggugcagagcaacagaguuuucugugauacaaugaacuccagaacccugccuucugaggugaaucucugcaaugucgacauuuuuaacccgaaauaugauugcaagaucaugaccagcaaaacagacguguccagcucugucauuaccucccugggggccaucgugagcuguuacggaaagacaaaaugcacggcuucuaauaagaaccggggcauuaucaagaccuucuccaaugggugugauuauguuagcaacaaaggaguggacacagucuccgugggcaauacccuuuacuauguuaacaagcaagagggcaaaucucuguacgugaagggggaacccaucauuaacuuuuaugacccucucgucuuccccagcgaugaguuugacgccuccaucucucaggugaaugagaaaauuaaccagagccuggcuuucauccgcaaguccgaugaacugcuccacaaugugaacgccggaaagagcacaaccaauauuaugaucacgaccauuaucaucguuauuaucgucauucugcuuucucugaucgccgugggccuccugcuguacugcaaagcuagauccacaccugugacccuuagcaaggaccagcucucugggauuaacaauaucgcguucuccaacugaggacuaguacuggcugcaucucccuuuccucuguccuccauccuucucccaggauggugaagggggaccugguacccagugauccccaccccaggauccuaaaucaugacuuaccugcuaauaaaaacucauuggaaaagugagaagaucuaaaaaaaaaaaaaaaaaaaaaaaaaaaaaaaaaaaaaaaaaaaaaaaaaaaaaaaaaaaaaaaaugcaucccccccccccccccccccccccccccccccaaaggcucuuuucagagccaccagaauu

SEQ ID NO: 4105 - RNA, 1956 nt, Artificial Sequence
  mRNA product Design f-5 comprising derived and/or modified sequence from HRSV(A2)__F_DSCav1_mut0 (opt6)
gggagacuuucccauucuguagcagaauuugguguugccuguggucuuggucccgcggagaagcuuaccauggaacuacuaauacuaaaagccaaugcaauaacaaccauacuaaccgccguaacauuuuguuucgcaucaggucaaaacauaaccgaagaauuuuaucaaucaacaugcucagcaguaucaaaaggauacuuauccgcucuaagaacaggaugguacacaaguguaauuacaauagagcucucaaacauaaaagaaaacaaaugcaauggaacugacgcaaaaguuaaacuuauaaaacaagaacuagauaaauauaaaaaugcaguaaccgaauuacaacuccuaaugcaauccacaccugcuaccgguuccggaucagccauagcaucuggaguagccguaugcaaaguccuccaccuagaaggagaaguaaauaaaaucaaaucagcacuauuaucuaccaauaaagcaguugucucacuauccaauggcguaucaguacuaacauucaaaguauuagaccuuaaaaacuacauagacaaacaacuauuaccaauucugaacaaacaauccuguucaauaucaaacaucgaaacgguaauagaauuucaacaaaaaaauaacagauuacuugaaauaacaagagaauuuucaguaaaugcaggaguuacaacacccgucuccaccuacaugcucacaaauucagaauuauuaucacuuauaaacgacaugccaauaacuaacgaccaaaaaaaacuaaugucaaacaauguccaaauaguccgacaacaauccuacucaauaaugugcauuauaaaagaagaaguccuagccuacguuguccaacuacccuuauauggaguaauagauaccccaugcuggaaacuucauaccuccccccuaugcacaacaaacacaaaagaaggcucaaacaucugcuuaacacguacagaccgagguugguacugugauaacgcaggauccguaucauuuuucccacaagcagaaacaugcaaaguacaaucaaaccgcguuuuuugugacaccaugaacagcagaacccucccuucagaaguaaaccuaugcaacgucgauauauuuaacccaaaauacgauugcaaaauaaugacaucaaaaaccgaugucucaucuucaguaauaaccucucuaggagcaauagucucauguuacggaaaaacaaaaugcacagcaaguaauaaaaauagaggaauaauaaaaacauucucuaauggcugcgacuacguauccaauaaaggcguugacacaguauccguaggcaacacacucuacuauguuaacaaacaagaaggaaaaaguuuauacguuaaaggagaaccaauuauaaacuuuuacgacccacucguauucccaucugaugaauuugacgcaucaaucucacaaguaaaugaaaaaaucaaucagucccuugccuuuauaagaaaaucagaugaacuuuuacacaacguuaacgccggaaaaucaacaaccaauauaaugaucacaaccauaauaauaguuauaauuguaauuuuauuauccuuaauagccgucggacuacuacuauacugcaaagcaagaucuacacccguaacccuaucaaaagaccaacuaaguggaauaaauaacauugcauucucaaauuaaggacuaguacuggcugcaucucccuuuccucuguccuccauccuucucccaggauggugaagggggaccugguacccagugauccccaccccaggauccuaaaucaugacuuaccugcuaauaaaaacucauuggaaaagugagaagaucuaaaaaaaaaaaaaaaaaaaaaaaaaaaaaaaaaaaaaaaaaaaaaaaaaaaaaaaaaaaaaaaaugcaucccccccccccccccccccccccccccccccaaaggcucuuuucagagccaccagaauu

SEQ ID NO: 4106 - RNA, 1956 nt, Artificial Sequence
  mRNA product Design f-5 comprising derived and/or modified sequence from HRSV(A2)__F_DSCav1_mut0 (opt11)
gggagacuuucccauucuguagcagaauuugguguugccuguggucuuggucccgcggagaagcuuaccauggaacuccuaauacuaaaggcaaacgcaaucacuacaauucuaaccgccgugacauucugcuucgccuccggacaaaacaucaccgaagaauuuuaccaauccacaugcucggccgucaguaaaggcuaccucucggcucuccgaaccggcugguacaccuccgucaucaccaucgaacucuccaacaucaaagaaaacaaaugcaacggcaccgacgccaaagucaaacuaaucaaacaagaacucgacaaauacaaaaacgccgucacagaacuccaacuacuaaugcaaucaacacccgcuacaggaagcggcuccgccaucgccagcggcguagcugucugcaaaguccuccaccucgaaggugaagucaacaaaaucaaaucagcccuacucagcacaaacaaagccguuguaagccuauccaacggcgucuccguacuaacauucaaaguccuugaccucaagaacuacaucgacaaacaacuucucccaauccuaaacaaacaaagcugcucaauuuccaacaucgaaacaguaaucgaauuucaacaaaaaaacaaccgacuccucgaaaucacccgcgaauuuuccguuaacgccggcguuacaacccccgucuccaccuacaugcucaccaauuccgaacuacuaucacucauaaacgacaugccuaucacaaacgaccaaaaaaaacuaaugucaaacaauguccaaaucguccgccagcaaagcuauuccaucaugugcaucaucaaagaggaaguccucgccuacguaguccaacugccccucuacggcgucauugauacccccugcuggaaacuccacaccuccccccucugcaccacaaacaccaaagaagguuccaacaucugccuaacacgaaccgacagaggcugguacugcgacaacgccggcagcgucuccuucuucccccaagcagaaaccuguaaaguccagucuaaccgcgucuucugcgacacaaugaacucaagaacccuaccuuccgaaguaaaccucugcaacguagacaucuucaacccuaaauacgacugcaaaaucaugacuucaaaaacagacguaagcucuuccguaaucacuucccucggcgccaucguauccugcuacgguaaaaccaaaugcaccgccuccaacaaaaaccgagggaucauaaaaaccuucuccaacggcugcgacuacguaucuaacaaaggcgucgacaccgucuccgucggcaacacccucuauuacguaaacaaacaagagggcaaaucacuauacgucaaaggcgagccaaucauaaacuucuaugacccacucgucuucccuucagacgaauuugaugccagcaucagccaagucaacgaaaaaaucaaccaaucacucgccuucauccgcaaaagcgacgaacuccuucacaacgucaacgcaggcaaaucaaccaccaacaucaugaucaccaccaucaucaucgucaucaucguuauccuacucagccucaucgcaguuggucuucuccuuuacugcaaagcccgcuccacccccgucacccucaguaaagaccaacucagcggaaucaacaacauagcauucuccaacuaaggacuaguacuggcugcaucucccuuuccucuguccuccauccuucucccaggauggugaagggggaccugguacccagugauccccaccccaggauccuaaaucaugacuuaccugcuaauaaaaacucauuggaaaagugagaagaucuaaaaaaaaaaaaaaaaaaaaaaaaaaaaaaaaaaaaaaaaaaaaaaaaaaaaaaaaaaaaaaaaugcaucccccccccccccccccccccccccccccccaaaggcucuuuucagagccaccagaauu

SEQ ID NO: 4107 - RNA, 1952 nt, Artificial Sequence
  mRNA product Design g-1 comprising derived and/or modified sequence from HRSV(A2)__F_DSCav1_mut0 (opt1)
gggagacuuucccauucuguagcagaauuugguguugccuguggucuuggucccgcggagaagcuuaccauggagcugcucauccugaaggccaacgccaucaccaccauccugacggcggugaccuucugcuucgccagcggccagaacaucaccgaggaguucuaccaguccacgugcagcgccgucuccaagggguaccucagcgcccugcggaccggcugguacaccuccgugaucaccaucgagcugagcaacaucaaggagaacaagugcaacgggaccgacgccaaggugaagcucaucaagcaggagcuggacaaguacaagaacgcggucacggagcugcagcuccugaugcaguccaccccggcaaccggcuccggcuccgccaucgcgagcggcgucgccgugugcaaggugcugcaccucgagggggaggucaacaagaucaagagcgcccugcuguccaccaacaaggccguggugagccucuccaacggcgucagcgugcugaccuucaaggugcuggaccucaagaacuacaucgacaagcagcugcugcccauccugaacaagcagagcugcuccaucagcaacaucgagacggugaucgaguuccagcagaagaacaaccggcuccuggagaucacccgcgaguucagcgugaacgccggggucaccacccccguguccacguacaugcugaccaacagcgagcuccugucccugaucaacgacaugccgaucaccaacgaccagaagaagcucaugagcaacaacgugcagaucguccggcagcaguccuacagcaucaugugcaucaucaaggaggaggugcuggcguacgugguccagcugccccucuacggcgugaucgacacccccugcuggaagcugcacacgagcccccugugcaccaccaacaccaaggagggguccaacaucugccucacgcgcaccgaccggggcugguacugcgacaacgccggcagcgucuccuucuucccgcaggccgagaccugcaaggugcagagcaaccgcguguucugcgacaccaugaacucccggacgcugcccagcgagguaaaccucugcaacgucgacaucuucaaccccaaguacgacugcaagaucaugaccuccaagaccgacgugagcuccagcgugaucaccucccugggggccaucgucagcugcuacggcaagacgaagugcaccgccagcaacaagaaccgggggaucaucaagaccuucuccaacggcugcgacuacgugagcaacaagggcguggacaccguguccgucgggaacacccuguacuacgugaacaagcaggagggcaagagccucuacgugaagggggagcccaucaucaacuucuacgacccgcuggucuuccccuccgacgaguucgacgcgagcaucucccaggugaacgagaagaucaaccagagccuggccuucauccgcaaguccgacgagcugcuccacaacgugaacgccggcaagagcacgaccaacaucaugaucaccaccaucaucaucgucaucaucgugauccugcugucccucaucgccguggggcugcugcucuacugcaaggcccggagcacgcccgucacccuguccaaggaccagcugagcggcaucaacaacaucgcguucuccaacugaggacuaguggaagcauuuuccuggcugauuaaaagaaauuacucagcuauggucaucuguuccuguuagaaggcuaugcagcauauuauauacuaugcgcauguuaugaaaugcauaauaaaaaauuuuaaaaaaucuaaaagaucuaaaaaaaaaaaaaaaaaaaaaaaaaaaaaaaaaaaaaaaaaaaaaaaaaaaaaaaaaaaaaaaaugcaucccccccccccccccccccccccccccccccaaaggcucuuuucagagccaccagaauu

SEQ ID NO: 4108 - RNA, 1952 nt, Artificial Sequence
  mRNA product Design g-1 comprising derived and/or modified sequence from HRSV(A2)__F_DSCav1_mut0 (opt1)
gggagacuuucccauucuguagcagaauuugguguugccuguggucuuggucccgcggagaagcuuaccauggagcugcucauccugaaggccaacgccaucaccaccauccugacggcggugaccuucugcuucgccagcggccagaacaucaccgaggaguucuaccaguccacgugcagcgccgucuccaagggguaccucagcgcccugcgcaccggcugguacaccuccgugaucaccaucgagcugagcaacaucaaggagaacaagugcaacgggaccgacgccaaggugaagcucaucaagcaggagcuggacaaguacaagaacgcggucacggagcugcagcuccugaugcaguccacccccgccaccggcagcggguccgccaucgccagcggcguggcggugugcaagguccugcaccucgagggcgaggugaacaagaucaaguccgcccugcugagcaccaacaaggccguggucucccucagcaacgggguguccgugcugacguucaagguccuggaccucaagaacuacaucgacaagcagcugcugccgauccucaacaagcagagcugcuccaucagcaacaucgagaccgugaucgaguuccagcagaagaacaaccggcugcuggagaucacccgcgaguucuccgugaacgccggcgucaccacgcccgugagcaccuacaugcucaccaacagcgagcugcugucccucaucaacgacaugcccaucaccaacgaccagaagaagcugaugagcaacaacgugcagaucguccggcagcaguccuacagcaucaugugcaucaucaaggaggaggugcuggccuacgugguccagcucccccuguacggggugaucgacacgccgugcuggaagcugcacaccagcccccucugcaccaccaacacgaaggagggcuccaacaucugccugacccgcaccgaccgggggugguacugcgacaacgcgggcuccgugagcuucuucccccaggccgagaccugcaagguccaguccaaccgcguguucugcgacacgaugaacagccggacccuccccuccgaggucaaccugugcaacguggacaucuucaacccgaaguacgacugcaagaucaugaccagcaagaccgacguguccagcuccgucaucacgagccugggcgccaucguguccugcuacgggaagaccaagugcaccgccagcaacaagaaccggggcaucaucaagaccuucuccaacgggugcgacuacgugagcaacaagggcgucgacacggugagcgugggcaacacccucuacuacgucaacaagcaggaggggaagucccuguacgugaagggcgagcccaucaucaacuucuacgacccccugguguuccccagcgacgaguucgacgccuccaucagccaggucaacgagaagaucaaccagucccucgcguucauccgcaagagcgacgagcugcugcacaacgugaacgccgggaaguccaccaccaacaucaugaucaccacgaucaucaucgugaucaucgucauccuccugagccugaucgccgugggccuccugcuguacugcaaggcccgguccaccccggugacccugagcaaggaccagcucuccgggaucaacaacaucgccuucagcaacugaggacuaguggaagcauuuuccuggcugauuaaaagaaauuacucagcuauggucaucuguuccuguuagaaggcuaugcagcauauuauauacuaugcgcauguuaugaaaugcauaauaaaaaauuuuaaaaaaucuaaaagaucuaaaaaaaaaaaaaaaaaaaaaaaaaaaaaaaaaaaaaaaaaaaaaaaaaaaaaaaaaaaaaaaaugcaucccccccccccccccccccccccccccccccaaaggcucuuuucagagccaccagaauu

SEQ ID NO: 4109 - RNA, 1952 nt, Artificial Sequence
  mRNA product Design g-1 comprising derived and/or modified sequence from HRSV(A2)__F_DSCav1_mut0 (opt2)
gggagacuuucccauucuguagcagaauuugguguugccuguggucuuggucccgcggagaagcuuaccauggagcuccucauccucaaggccaacgccaucaccaccauccucaccgccgucaccuucugcuucgccuccggccagaacaucaccgaggaguucuaccaguccaccugcuccgccgucuccaagggcuaccucuccgcccuccgcaccggcugguacaccuccgucaucaccaucgagcucuccaacaucaaggagaacaagugcaacggcaccgacgccaaggucaagcucaucaagcaggagcucgacaaguacaagaacgccgucaccgagcuccagcuccucaugcaguccacccccgccaccggcuccggcuccgccaucgccuccggcgucgccgucugcaagguccuccaccucgagggcgaggucaacaagaucaaguccgcccuccucuccaccaacaaggccgucgucucccucuccaacggcgucuccguccucaccuucaagguccucgaccucaagaacuacaucgacaagcagcuccuccccauccucaacaagcaguccugcuccaucuccaacaucgagaccgucaucgaguuccagcagaagaacaaccgccuccucgagaucacccgcgaguucuccgucaacgccggcgucaccacccccgucuccaccuacaugcucaccaacuccgagcuccucucccucaucaacgacaugcccaucaccaacgaccagaagaagcucauguccaacaacguccagaucguccgccagcaguccuacuccaucaugugcaucaucaaggaggagguccucgccuacgucguccagcucccccucuacggcgucaucgacacccccugcuggaagcuccacaccuccccccucugcaccaccaacaccaaggagggcuccaacaucugccucacccgcaccgaccgcggcugguacugcgacaacgccggcuccgucuccuucuucccccaggccgagaccugcaagguccaguccaaccgcgucuucugcgacaccaugaacucccgcacccuccccuccgaggucaaccucugcaacgucgacaucuucaaccccaaguacgacugcaagaucaugaccuccaagaccgacgucuccuccuccgucaucaccucccucggcgccaucgucuccugcuacggcaagaccaagugcaccgccuccaacaagaaccgcggcaucaucaagaccuucuccaacggcugcgacuacgucuccaacaagggcgucgacaccgucuccgucggcaacacccucuacuacgucaacaagcaggagggcaagucccucuacgucaagggcgagcccaucaucaacuucuacgacccccucgucuuccccuccgacgaguucgacgccuccaucucccaggucaacgagaagaucaaccagucccucgccuucauccgcaaguccgacgagcuccuccacaacgucaacgccggcaaguccaccaccaacaucaugaucaccaccaucaucaucgucaucaucgucauccuccucucccucaucgccgucggccuccuccucuacugcaaggcccgcuccacccccgucacccucuccaaggaccagcucuccggcaucaacaacaucgccuucuccaacugaggacuaguggaagcauuuuccuggcugauuaaaagaaauuacucagcuauggucaucuguuccuguuagaaggcuaugcagcauauuauauacuaugcgcauguuaugaaaugcauaauaaaaaauuuuaaaaaaucuaaaagaucuaaaaaaaaaaaaaaaaaaaaaaaaaaaaaaaaaaaaaaaaaaaaaaaaaaaaaaaaaaaaaaaaugcaucccccccccccccccccccccccccccccccaaaggcucuuuucagagccaccagaauu

SEQ ID NO: 4110 - RNA, 1952 nt, Artificial Sequence
  mRNA product Design g-1 comprising derived and/or modified sequence from HRSV(A2)__F_DSCav1_mut0 (opt3)
gggagacuuucccauucuguagcagaauuugguguugccuguggucuuggucccgcggagaagcuuaccauggagcugcucauccuuaaggccaacgcuauuaccacaauacugacugcagugacguucugcuuugccagcggccagaauaucaccgaagaguucuaccaauccacauguucugcggucucaaaaggguauuugagugcuuuaagaacuggaugguacaccagcguuauuacaaucgaacuguccaacauuaaggagaauaaaugcaacgguaccgacgccaaggugaaacuaaucaagcaggaacucgauaaguauaaaaaugcaguaacugagcugcagcuucugaugcagucuacacccgccaccggcucggggucagcuauagcaagcggaguggccgucuguaagguguugcaccucgagggcgaaguuaacaaaaucaagagugcucugcuguccacgaauaaagccguggucucucucagcaacgguguguccguauuaacuuuuaagguucuggaccuuaagaauuacauugauaaacaauugcugccuauccuaaacaagcagucaugcaguauuagcaauaucgagaccgugauagaguuccagcagaaaaacaauaggcuccuggaaauuacacgggaguuuucugucaacgcgggggugacuaccccaguguccacauauaugcuuaccaauucagaacuguugagccucaucaacgacaugccgauuacgaacgaucaaaagaaacugaugaguaauaacguccagaucguucgccagcagucuuacuccaucauguguauuauaaaggaggaaguguuagcauauguagugcaacugccccucuacggagucaucgacacuccuugcuggaaacuucauacaagcccacuguguaccacuaauacaaaggagggcucgaacauuugcuugacccgaacggaucguggcugguacugugacaaugccgggucuguguccuucuuuccccaggcugaaaccugcaagguucagucaaacagaguguucugugauacaaugaauaguagaacucugccuagcgaggucaaccucugcaauguggacaucuuuaacccaaaauaugauugcaagauaaugaccuccaaaacagacguaucuagcucaguuauuaccagucugggagccaucguguccuguuacgguaagacuaaaugcacagcaagcaauaagaacaggggcaucauuaagaccuucucuaaugggugugauuaugucucaaacaaaggaguggacacugucagugugggcaauacgcuuuacuauguuaacaagcaagaggguaaaagccuguacgugaagggggaacccaucauuaacuuuuaugacccuuugguauucccauccgaugaguuugacgcuucuauaucgcaggucaaugagaaaaucaaccagagccucgccuucauucggaaguccgaugaacuguuacacaaugugaacgcgggaaagucaacaaccaauaucaugaucacuaccauuauaaucguuauuaucgugauucugcuaagucucaucgccgucggccugcuuuuguacugcaaagcacgcucuacaccggugacccugagcaaggaccagcucuccggcauaaacaauaucgcuuucucaaacugaggacuaguggaagcauuuuccuggcugauuaaaagaaauuacucagcuauggucaucuguuccuguuagaaggcuaugcagcauauuauauacuaugcgcauguuaugaaaugcauaauaaaaaauuuuaaaaaaucuaaaagaucuaaaaaaaaaaaaaaaaaaaaaaaaaaaaaaaaaaaaaaaaaaaaaaaaaaaaaaaaaaaaaaaaugcaucccccccccccccccccccccccccccccccaaaggcucuuuucagagccaccagaauu

SEQ ID NO: 4111 - RNA, 1952 nt, Artificial Sequence
  mRNA product Design g-1 comprising derived and/or modified sequence from HRSV(A2)__F_DSCav1_mut0 (opt4)
gggagacuuucccauucuguagcagaauuugguguugccuguggucuuggucccgcggagaagcuuaccauggagcugcugauccugaaggccaacgccaucaccaccauccugaccgccgugaccuucugcuucgccagcggccagaacaucaccgaggaguucuaccagagcaccugcagcgccgugagcaagggcuaccugagcgcccugagaaccggcugguacaccagcgugaucaccaucgagcugagcaacaucaaggagaacaagugcaacggcaccgacgccaaggugaagcugaucaagcaggagcuggacaaguacaagaacgccgugaccgagcugcagcugcugaugcagagcacccccgccaccggcagcggcagcgccaucgccagcggcguggccgugugcaaggugcugcaccuggagggcgaggugaacaagaucaagagcgcccugcugagcaccaacaaggccguggugagccugagcaacggcgugagcgugcugaccuucaaggugcuggaccugaagaacuacaucgacaagcagcugcugcccauccugaacaagcagagcugcagcaucagcaacaucgagaccgugaucgaguuccagcagaagaacaacagacugcuggagaucaccagagaguucagcgugaacgccggcgugaccacccccgugagcaccuacaugcugaccaacagcgagcugcugagccugaucaacgacaugcccaucaccaacgaccagaagaagcugaugagcaacaacgugcagaucgugagacagcagagcuacagcaucaugugcaucaucaaggaggaggugcuggccuacguggugcagcugccccuguacggcgugaucgacacccccugcuggaagcugcacaccagcccccugugcaccaccaacaccaaggagggcagcaacaucugccugaccagaaccgacagaggcugguacugcgacaacgccggcagcgugagcuucuucccccaggccgagaccugcaaggugcagagcaacagaguguucugcgacaccaugaacagcagaacccugcccagcgaggugaaccugugcaacguggacaucuucaaccccaaguacgacugcaagaucaugaccagcaagaccgacgugagcagcagcgugaucaccagccugggcgccaucgugagcugcuacggcaagaccaagugcaccgccagcaacaagaacagaggcaucaucaagaccuucagcaacggcugcgacuacgugagcaacaagggcguggacaccgugagcgugggcaacacccuguacuacgugaacaagcaggagggcaagagccuguacgugaagggcgagcccaucaucaacuucuacgacccccugguguuccccagcgacgaguucgacgccagcaucagccaggugaacgagaagaucaaccagagccuggccuucaucagaaagagcgacgagcugcugcacaacgugaacgccggcaagagcaccaccaacaucaugaucaccaccaucaucaucgugaucaucgugauccugcugagccugaucgccgugggccugcugcuguacugcaaggccagaagcacccccgugacccugagcaaggaccagcugagcggcaucaacaacaucgccuucagcaacugaggacuaguggaagcauuuuccuggcugauuaaaagaaauuacucagcuauggucaucuguuccuguuagaaggcuaugcagcauauuauauacuaugcgcauguuaugaaaugcauaauaaaaaauuuuaaaaaaucuaaaagaucuaaaaaaaaaaaaaaaaaaaaaaaaaaaaaaaaaaaaaaaaaaaaaaaaaaaaaaaaaaaaaaaaugcaucccccccccccccccccccccccccccccccaaaggcucuuuucagagccaccagaauu

SEQ ID NO: 4112 - RNA, 1952 nt, Artificial Sequence
  mRNA product Design g-1 comprising derived and/or modified sequence from HRSV(A2)__F_DSCav1_mut0 (opt5)
gggagacuuucccauucuguagcagaauuugguguugccuguggucuuggucccgcggagaagcuuaccauggagcugcucauccugaaggccaacgcuauuaccacaauccuuacggccgugaccuucugcuuugcgagcggccagaauauuacagaagaguucuaccaauccaccuguucugcugucagcaaaggguaucuguccgcccucagaacaggaugguacaccucuguuaucacaauugaacugagcaacaucaaggagaauaaaugcaacggcaccgacgccaaggugaaacuuaucaagcaggaacuggauaaguauaaaaaugcugugacggagcuccagcugcugaugcaguccacccccgccacagggucuggaagcgcuauugccuccggcgucgcgguguguaagguucuccaccuggagggggaagugaacaaaaucaagagcgcccuucugucuaccaauaaagcugucgugucccucagcaacggaguuucugugcugacauuuaagguccuugaccugaagaauuacauugauaaacaacuccugccuauccugaacaagcaguccugcagcauuucuaauaucgagaccgugauugaguuccagcagaaaaacaaucggcuccuggaaaucacgcgcgaguuuuccgugaacgccggcgucacaaccccgguuagcacauauaugcuuaccaauuccgaacugcucucucugaucaacgacaugcccauuaccaacgaucaaaagaaacuuaugagcaauaacgugcagaucgugagacagcaguccuacagcauuauguguaucauuaaggaggaaguccuggcuuaugugguucaacucccucuguacggcgugaucgacacacccugcuggaaacugcauacgucuccucucuguaccacaaauaccaaggagggguccaacaucugccugacacggaccgaucgcggaugguacugugacaaugccggcagcgucucuuucuuuccccaggcggaaacgugcaaggugcagagcaacagaguuuucugugauacaaugaacuccagaacccugccuucugaggugaaucucugcaaugucgacauuuuuaacccgaaauaugauugcaagaucaugaccagcaaaacagacguguccagcucugucauuaccucccugggggccaucgugagcuguuacggaaagacaaaaugcacggcuucuaauaagaaccggggcauuaucaagaccuucuccaaugggugugauuauguuagcaacaaaggaguggacacagucuccgugggcaauacccuuuacuauguuaacaagcaagagggcaaaucucuguacgugaagggggaacccaucauuaacuuuuaugacccucucgucuuccccagcgaugaguuugacgccuccaucucucaggugaaugagaaaauuaaccagagccuggcuuucauccgcaaguccgaugaacugcuccacaaugugaacgccggaaagagcacaaccaauauuaugaucacgaccauuaucaucguuauuaucgucauucugcuuucucugaucgccgugggccuccugcuguacugcaaagcuagauccacaccugugacccuuagcaaggaccagcucucugggauuaacaauaucgcguucuccaacugaggacuaguggaagcauuuuccuggcugauuaaaagaaauuacucagcuauggucaucuguuccuguuagaaggcuaugcagcauauuauauacuaugcgcauguuaugaaaugcauaauaaaaaauuuuaaaaaaucuaaaagaucuaaaaaaaaaaaaaaaaaaaaaaaaaaaaaaaaaaaaaaaaaaaaaaaaaaaaaaaaaaaaaaaaugcaucccccccccccccccccccccccccccccccaaaggcucuuuucagagccaccagaauu

SEQ ID NO: 4113 - RNA, 1952 nt, Artificial Sequence
  mRNA product Design g-1 comprising derived and/or modified sequence from HRSV(A2)__F_DSCav1_mut0 (opt6)
gggagacuuucccauucuguagcagaauuugguguugccuguggucuuggucccgcggagaagcuuaccauggaacuacuaauacuaaaagccaaugcaauaacaaccauacuaaccgccguaacauuuuguuucgcaucaggucaaaacauaaccgaagaauuuuaucaaucaacaugcucagcaguaucaaaaggauacuuauccgcucuaagaacaggaugguacacaaguguaauuacaauagagcucucaaacauaaaagaaaacaaaugcaauggaacugacgcaaaaguuaaacuuauaaaacaagaacuagauaaauauaaaaaugcaguaaccgaauuacaacuccuaaugcaauccacaccugcuaccgguuccggaucagccauagcaucuggaguagccguaugcaaaguccuccaccuagaaggagaaguaaauaaaaucaaaucagcacuauuaucuaccaauaaagcaguugucucacuauccaauggcguaucaguacuaacauucaaaguauuagaccuuaaaaacuacauagacaaacaacuauuaccaauucugaacaaacaauccuguucaauaucaaacaucgaaacgguaauagaauuucaacaaaaaaauaacagauuacuugaaauaacaagagaauuuucaguaaaugcaggaguuacaacacccgucuccaccuacaugcucacaaauucagaauuauuaucacuuauaaacgacaugccaauaacuaacgaccaaaaaaaacuaaugucaaacaauguccaaauaguccgacaacaauccuacucaauaaugugcauuauaaaagaagaaguccuagccuacguuguccaacuacccuuauauggaguaauagauaccccaugcuggaaacuucauaccuccccccuaugcacaacaaacacaaaagaaggcucaaacaucugcuuaacacguacagaccgagguugguacugugauaacgcaggauccguaucauuuuucccacaagcagaaacaugcaaaguacaaucaaaccgcguuuuuugugacaccaugaacagcagaacccucccuucagaaguaaaccuaugcaacgucgauauauuuaacccaaaauacgauugcaaaauaaugacaucaaaaaccgaugucucaucuucaguaauaaccucucuaggagcaauagucucauguuacggaaaaacaaaaugcacagcaaguaauaaaaauagaggaauaauaaaaacauucucuaauggcugcgacuacguauccaauaaaggcguugacacaguauccguaggcaacacacucuacuauguuaacaaacaagaaggaaaaaguuuauacguuaaaggagaaccaauuauaaacuuuuacgacccacucguauucccaucugaugaauuugacgcaucaaucucacaaguaaaugaaaaaaucaaucagucccuugccuuuauaagaaaaucagaugaacuuuuacacaacguuaacgccggaaaaucaacaaccaauauaaugaucacaaccauaauaauaguuauaauuguaauuuuauuauccuuaauagccgucggacuacuacuauacugcaaagcaagaucuacacccguaacccuaucaaaagaccaacuaaguggaauaaauaacauugcauucucaaauuaaggacuaguggaagcauuuuccuggcugauuaaaagaaauuacucagcuauggucaucuguuccuguuagaaggcuaugcagcauauuauauacuaugcgcauguuaugaaaugcauaauaaaaaauuuuaaaaaaucuaaaagaucuaaaaaaaaaaaaaaaaaaaaaaaaaaaaaaaaaaaaaaaaaaaaaaaaaaaaaaaaaaaaaaaaugcaucccccccccccccccccccccccccccccccaaaggcucuuuucagagccaccagaauu

SEQ ID NO: 4114 - RNA, 1952 nt, Artificial Sequence
  mRNA product Design g-1 comprising derived and/or modified sequence from HRSV(A2)__F_DSCav1_mut0 (opt11)
gggagacuuucccauucuguagcagaauuugguguugccuguggucuuggucccgcggagaagcuuaccauggaacuccuaauacuaaaggcaaacgcaaucacuacaauucuaaccgccgugacauucugcuucgccuccggacaaaacaucaccgaagaauuuuaccaauccacaugcucggccgucaguaaaggcuaccucucggcucuccgaaccggcugguacaccuccgucaucaccaucgaacucuccaacaucaaagaaaacaaaugcaacggcaccgacgccaaagucaaacuaaucaaacaagaacucgacaaauacaaaaacgccgucacagaacuccaacuacuaaugcaaucaacacccgcuacaggaagcggcuccgccaucgccagcggcguagcugucugcaaaguccuccaccucgaaggugaagucaacaaaaucaaaucagcccuacucagcacaaacaaagccguuguaagccuauccaacggcgucuccguacuaacauucaaaguccuugaccucaagaacuacaucgacaaacaacuucucccaauccuaaacaaacaaagcugcucaauuuccaacaucgaaacaguaaucgaauuucaacaaaaaaacaaccgacuccucgaaaucacccgcgaauuuuccguuaacgccggcguuacaacccccgucuccaccuacaugcucaccaauuccgaacuacuaucacucauaaacgacaugccuaucacaaacgaccaaaaaaaacuaaugucaaacaauguccaaaucguccgccagcaaagcuauuccaucaugugcaucaucaaagaggaaguccucgccuacguaguccaacugccccucuacggcgucauugauacccccugcuggaaacuccacaccuccccccucugcaccacaaacaccaaagaagguuccaacaucugccuaacacgaaccgacagaggcugguacugcgacaacgccggcagcgucuccuucuucccccaagcagaaaccuguaaaguccagucuaaccgcgucuucugcgacacaaugaacucaagaacccuaccuuccgaaguaaaccucugcaacguagacaucuucaacccuaaauacgacugcaaaaucaugacuucaaaaacagacguaagcucuuccguaaucacuucccucggcgccaucguauccugcuacgguaaaaccaaaugcaccgccuccaacaaaaaccgagggaucauaaaaaccuucuccaacggcugcgacuacguaucuaacaaaggcgucgacaccgucuccgucggcaacacccucuauuacguaaacaaacaagagggcaaaucacuauacgucaaaggcgagccaaucauaaacuucuaugacccacucgucuucccuucagacgaauuugaugccagcaucagccaagucaacgaaaaaaucaaccaaucacucgccuucauccgcaaaagcgacgaacuccuucacaacgucaacgcaggcaaaucaaccaccaacaucaugaucaccaccaucaucaucgucaucaucguuauccuacucagccucaucgcaguuggucuucuccuuuacugcaaagcccgcuccacccccgucacccucaguaaagaccaacucagcggaaucaacaacauagcauucuccaacuaaggacuaguggaagcauuuuccuggcugauuaaaagaaauuacucagcuauggucaucuguuccuguuagaaggcuaugcagcauauuauauacuaugcgcauguuaugaaaugcauaauaaaaaauuuuaaaaaaucuaaaagaucuaaaaaaaaaaaaaaaaaaaaaaaaaaaaaaaaaaaaaaaaaaaaaaaaaaaaaaaaaaaaaaaaugcaucccccccccccccccccccccccccccccccaaaggcucuuuucagagccaccagaauu

SEQ ID NO: 4115 - RNA, 1967 nt, Artificial Sequence
  mRNA product Design g-2 comprising derived and/or modified sequence from HRSV(A2)__F_DSCav1_mut0 (opt1)
gggagaguccgcucagccagguugcagaagcggcuuagcguguguccuaaucuucucucugcguguagguaggccugugccgcaaacaagcuuaccauggagcugcucauccugaaggccaacgccaucaccaccauccugacggcggugaccuucugcuucgccagcggccagaacaucaccgaggaguucuaccaguccacgugcagcgccgucuccaagggguaccucagcgcccugcggaccggcugguacaccuccgugaucaccaucgagcugagcaacaucaaggagaacaagugcaacgggaccgacgccaaggugaagcucaucaagcaggagcuggacaaguacaagaacgcggucacggagcugcagcuccugaugcaguccaccccggcaaccggcuccggcuccgccaucgcgagcggcgucgccgugugcaaggugcugcaccucgagggggaggucaacaagaucaagagcgcccugcuguccaccaacaaggccguggugagccucuccaacggcgucagcgugcugaccuucaaggugcuggaccucaagaacuacaucgacaagcagcugcugcccauccugaacaagcagagcugcuccaucagcaacaucgagacggugaucgaguuccagcagaagaacaaccggcuccuggagaucacccgcgaguucagcgugaacgccggggucaccacccccguguccacguacaugcugaccaacagcgagcuccugucccugaucaacgacaugccgaucaccaacgaccagaagaagcucaugagcaacaacgugcagaucguccggcagcaguccuacagcaucaugugcaucaucaaggaggaggugcuggcguacgugguccagcugccccucuacggcgugaucgacacccccugcuggaagcugcacacgagcccccugugcaccaccaacaccaaggagggguccaacaucugccucacgcgcaccgaccggggcugguacugcgacaacgccggcagcgucuccuucuucccgcaggccgagaccugcaaggugcagagcaaccgcguguucugcgacaccaugaacucccggacgcugcccagcgagguaaaccucugcaacgucgacaucuucaaccccaaguacgacugcaagaucaugaccuccaagaccgacgugagcuccagcgugaucaccucccugggggccaucgucagcugcuacggcaagacgaagugcaccgccagcaacaagaaccgggggaucaucaagaccuucuccaacggcugcgacuacgugagcaacaagggcguggacaccguguccgucgggaacacccuguacuacgugaacaagcaggagggcaagagccucuacgugaagggggagcccaucaucaacuucuacgacccgcuggucuuccccuccgacgaguucgacgcgagcaucucccaggugaacgagaagaucaaccagagccuggccuucauccgcaaguccgacgagcugcuccacaacgugaacgccggcaagagcacgaccaacaucaugaucaccaccaucaucaucgucaucaucgugauccugcugucccucaucgccguggggcugcugcucuacugcaaggcccggagcacgcccgucacccuguccaaggaccagcugagcggcaucaacaacaucgcguucuccaacugaggacuaguaauaaggaaacuguaugaaugucugugggcaggaagugaagagauccuucuguaaagguuuuuggaauuaugucugcugaauaauaaacuuuuuugaaauaauaaaucugguagaaaaaugagaucuaaaaaaaaaaaaaaaaaaaaaaaaaaaaaaaaaaaaaaaaaaaaaaaaaaaaaaaaaaaaaaaaugcaucccccccccccccccccccccccccccccccaaaggcucuuuucagagccaccagaauu

SEQ ID NO: 4116 - RNA, 1967 nt, Artificial Sequence
  mRNA product Design g-2 comprising derived and/or modified sequence from HRSV(A2)__F_DSCav1_mut0 (opt1)
gggagaguccgcucagccagguugcagaagcggcuuagcguguguccuaaucuucucucugcguguagguaggccugugccgcaaacaagcuuaccauggagcugcucauccugaaggccaacgccaucaccaccauccugacggcggugaccuucugcuucgccagcggccagaacaucaccgaggaguucuaccaguccacgugcagcgccgucuccaagggguaccucagcgcccugcgcaccggcugguacaccuccgugaucaccaucgagcugagcaacaucaaggagaacaagugcaacgggaccgacgccaaggugaagcucaucaagcaggagcuggacaaguacaagaacgcggucacggagcugcagcuccugaugcaguccacccccgccaccggcagcggguccgccaucgccagcggcguggcggugugcaagguccugcaccucgagggcgaggugaacaagaucaaguccgcccugcugagcaccaacaaggccguggucucccucagcaacgggguguccgugcugacguucaagguccuggaccucaagaacuacaucgacaagcagcugcugccgauccucaacaagcagagcugcuccaucagcaacaucgagaccgugaucgaguuccagcagaagaacaaccggcugcuggagaucacccgcgaguucuccgugaacgccggcgucaccacgcccgugagcaccuacaugcucaccaacagcgagcugcugucccucaucaacgacaugcccaucaccaacgaccagaagaagcugaugagcaacaacgugcagaucguccggcagcaguccuacagcaucaugugcaucaucaaggaggaggugcuggccuacgugguccagcucccccuguacggggugaucgacacgccgugcuggaagcugcacaccagcccccucugcaccaccaacacgaaggagggcuccaacaucugccugacccgcaccgaccgggggugguacugcgacaacgcgggcuccgugagcuucuucccccaggccgagaccugcaagguccaguccaaccgcguguucugcgacacgaugaacagccggacccuccccuccgaggucaaccugugcaacguggacaucuucaacccgaaguacgacugcaagaucaugaccagcaagaccgacguguccagcuccgucaucacgagccugggcgccaucguguccugcuacgggaagaccaagugcaccgccagcaacaagaaccggggcaucaucaagaccuucuccaacgggugcgacuacgugagcaacaagggcgucgacacggugagcgugggcaacacccucuacuacgucaacaagcaggaggggaagucccuguacgugaagggcgagcccaucaucaacuucuacgacccccugguguuccccagcgacgaguucgacgccuccaucagccaggucaacgagaagaucaaccagucccucgcguucauccgcaagagcgacgagcugcugcacaacgugaacgccgggaaguccaccaccaacaucaugaucaccacgaucaucaucgugaucaucgucauccuccugagccugaucgccgugggccuccugcuguacugcaaggcccgguccaccccggugacccugagcaaggaccagcucuccgggaucaacaacaucgccuucagcaacugaggacuaguaauaaggaaacuguaugaaugucugugggcaggaagugaagagauccuucuguaaagguuuuuggaauuaugucugcugaauaauaaacuuuuuugaaauaauaaaucugguagaaaaaugagaucuaaaaaaaaaaaaaaaaaaaaaaaaaaaaaaaaaaaaaaaaaaaaaaaaaaaaaaaaaaaaaaaaugcaucccccccccccccccccccccccccccccccaaaggcucuuuucagagccaccagaauu

SEQ ID NO: 4117 - RNA, 1967 nt, Artificial Sequence
  mRNA product Design g-2 comprising derived and/or modified sequence from HRSV(A2)__F_DSCav1_mut0 (opt2)
gggagaguccgcucagccagguugcagaagcggcuuagcguguguccuaaucuucucucugcguguagguaggccugugccgcaaacaagcuuaccauggagcuccucauccucaaggccaacgccaucaccaccauccucaccgccgucaccuucugcuucgccuccggccagaacaucaccgaggaguucuaccaguccaccugcuccgccgucuccaagggcuaccucuccgcccuccgcaccggcugguacaccuccgucaucaccaucgagcucuccaacaucaaggagaacaagugcaacggcaccgacgccaaggucaagcucaucaagcaggagcucgacaaguacaagaacgccgucaccgagcuccagcuccucaugcaguccacccccgccaccggcuccggcuccgccaucgccuccggcgucgccgucugcaagguccuccaccucgagggcgaggucaacaagaucaaguccgcccuccucuccaccaacaaggccgucgucucccucuccaacggcgucuccguccucaccuucaagguccucgaccucaagaacuacaucgacaagcagcuccuccccauccucaacaagcaguccugcuccaucuccaacaucgagaccgucaucgaguuccagcagaagaacaaccgccuccucgagaucacccgcgaguucuccgucaacgccggcgucaccacccccgucuccaccuacaugcucaccaacuccgagcuccucucccucaucaacgacaugcccaucaccaacgaccagaagaagcucauguccaacaacguccagaucguccgccagcaguccuacuccaucaugugcaucaucaaggaggagguccucgccuacgucguccagcucccccucuacggcgucaucgacacccccugcuggaagcuccacaccuccccccucugcaccaccaacaccaaggagggcuccaacaucugccucacccgcaccgaccgcggcugguacugcgacaacgccggcuccgucuccuucuucccccaggccgagaccugcaagguccaguccaaccgcgucuucugcgacaccaugaacucccgcacccuccccuccgaggucaaccucugcaacgucgacaucuucaaccccaaguacgacugcaagaucaugaccuccaagaccgacgucuccuccuccgucaucaccucccucggcgccaucgucuccugcuacggcaagaccaagugcaccgccuccaacaagaaccgcggcaucaucaagaccuucuccaacggcugcgacuacgucuccaacaagggcgucgacaccgucuccgucggcaacacccucuacuacgucaacaagcaggagggcaagucccucuacgucaagggcgagcccaucaucaacuucuacgacccccucgucuuccccuccgacgaguucgacgccuccaucucccaggucaacgagaagaucaaccagucccucgccuucauccgcaaguccgacgagcuccuccacaacgucaacgccggcaaguccaccaccaacaucaugaucaccaccaucaucaucgucaucaucgucauccuccucucccucaucgccgucggccuccuccucuacugcaaggcccgcuccacccccgucacccucuccaaggaccagcucuccggcaucaacaacaucgccuucuccaacugaggacuaguaauaaggaaacuguaugaaugucugugggcaggaagugaagagauccuucuguaaagguuuuuggaauuaugucugcugaauaauaaacuuuuuugaaauaauaaaucugguagaaaaaugagaucuaaaaaaaaaaaaaaaaaaaaaaaaaaaaaaaaaaaaaaaaaaaaaaaaaaaaaaaaaaaaaaaaugcaucccccccccccccccccccccccccccccccaaaggcucuuuucagagccaccagaauu

SEQ ID NO: 4118 - RNA, 1967 nt, Artificial Sequence
  mRNA product Design g-2 comprising derived and/or modified sequence from HRSV(A2)__F_DSCav1_mut0 (opt3)
gggagaguccgcucagccagguugcagaagcggcuuagcguguguccuaaucuucucucugcguguagguaggccugugccgcaaacaagcuuaccauggagcugcucauccuuaaggccaacgcuauuaccacaauacugacugcagugacguucugcuuugccagcggccagaauaucaccgaagaguucuaccaauccacauguucugcggucucaaaaggguauuugagugcuuuaagaacuggaugguacaccagcguuauuacaaucgaacuguccaacauuaaggagaauaaaugcaacgguaccgacgccaaggugaaacuaaucaagcaggaacucgauaaguauaaaaaugcaguaacugagcugcagcuucugaugcagucuacacccgccaccggcucggggucagcuauagcaagcggaguggccgucuguaagguguugcaccucgagggcgaaguuaacaaaaucaagagugcucugcuguccacgaauaaagccguggucucucucagcaacgguguguccguauuaacuuuuaagguucuggaccuuaagaauuacauugauaaacaauugcugccuauccuaaacaagcagucaugcaguauuagcaauaucgagaccgugauagaguuccagcagaaaaacaauaggcuccuggaaauuacacgggaguuuucugucaacgcgggggugacuaccccaguguccacauauaugcuuaccaauucagaacuguugagccucaucaacgacaugccgauuacgaacgaucaaaagaaacugaugaguaauaacguccagaucguucgccagcagucuuacuccaucauguguauuauaaaggaggaaguguuagcauauguagugcaacugccccucuacggagucaucgacacuccuugcuggaaacuucauacaagcccacuguguaccacuaauacaaaggagggcucgaacauuugcuugacccgaacggaucguggcugguacugugacaaugccgggucuguguccuucuuuccccaggcugaaaccugcaagguucagucaaacagaguguucugugauacaaugaauaguagaacucugccuagcgaggucaaccucugcaauguggacaucuuuaacccaaaauaugauugcaagauaaugaccuccaaaacagacguaucuagcucaguuauuaccagucugggagccaucguguccuguuacgguaagacuaaaugcacagcaagcaauaagaacaggggcaucauuaagaccuucucuaaugggugugauuaugucucaaacaaaggaguggacacugucagugugggcaauacgcuuuacuauguuaacaagcaagaggguaaaagccuguacgugaagggggaacccaucauuaacuuuuaugacccuuugguauucccauccgaugaguuugacgcuucuauaucgcaggucaaugagaaaaucaaccagagccucgccuucauucggaaguccgaugaacuguuacacaaugugaacgcgggaaagucaacaaccaauaucaugaucacuaccauuauaaucguuauuaucgugauucugcuaagucucaucgccgucggccugcuuuuguacugcaaagcacgcucuacaccggugacccugagcaaggaccagcucuccggcauaaacaauaucgcuuucucaaacugaggacuaguaauaaggaaacuguaugaaugucugugggcaggaagugaagagauccuucuguaaagguuuuuggaauuaugucugcugaauaauaaacuuuuuugaaauaauaaaucugguagaaaaaugagaucuaaaaaaaaaaaaaaaaaaaaaaaaaaaaaaaaaaaaaaaaaaaaaaaaaaaaaaaaaaaaaaaaugcaucccccccccccccccccccccccccccccccaaaggcucuuuucagagccaccagaauu

SEQ ID NO: 4119 - RNA, 1967 nt, Artificial Sequence
  mRNA product Design g-2 comprising derived and/or modified sequence from HRSV(A2)__F_DSCav1_mut0 (opt4)
gggagaguccgcucagccagguugcagaagcggcuuagcguguguccuaaucuucucucugcguguagguaggccugugccgcaaacaagcuuaccauggagcugcugauccugaaggccaacgccaucaccaccauccugaccgccgugaccuucugcuucgccagcggccagaacaucaccgaggaguucuaccagagcaccugcagcgccgugagcaagggcuaccugagcgcccugagaaccggcugguacaccagcgugaucaccaucgagcugagcaacaucaaggagaacaagugcaacggcaccgacgccaaggugaagcugaucaagcaggagcuggacaaguacaagaacgccgugaccgagcugcagcugcugaugcagagcacccccgccaccggcagcggcagcgccaucgccagcggcguggccgugugcaaggugcugcaccuggagggcgaggugaacaagaucaagagcgcccugcugagcaccaacaaggccguggugagccugagcaacggcgugagcgugcugaccuucaaggugcuggaccugaagaacuacaucgacaagcagcugcugcccauccugaacaagcagagcugcagcaucagcaacaucgagaccgugaucgaguuccagcagaagaacaacagacugcuggagaucaccagagaguucagcgugaacgccggcgugaccacccccgugagcaccuacaugcugaccaacagcgagcugcugagccugaucaacgacaugcccaucaccaacgaccagaagaagcugaugagcaacaacgugcagaucgugagacagcagagcuacagcaucaugugcaucaucaaggaggaggugcuggccuacguggugcagcugccccuguacggcgugaucgacacccccugcuggaagcugcacaccagcccccugugcaccaccaacaccaaggagggcagcaacaucugccugaccagaaccgacagaggcugguacugcgacaacgccggcagcgugagcuucuucccccaggccgagaccugcaaggugcagagcaacagaguguucugcgacaccaugaacagcagaacccugcccagcgaggugaaccugugcaacguggacaucuucaaccccaaguacgacugcaagaucaugaccagcaagaccgacgugagcagcagcgugaucaccagccugggcgccaucgugagcugcuacggcaagaccaagugcaccgccagcaacaagaacagaggcaucaucaagaccuucagcaacggcugcgacuacgugagcaacaagggcguggacaccgugagcgugggcaacacccuguacuacgugaacaagcaggagggcaagagccuguacgugaagggcgagcccaucaucaacuucuacgacccccugguguuccccagcgacgaguucgacgccagcaucagccaggugaacgagaagaucaaccagagccuggccuucaucagaaagagcgacgagcugcugcacaacgugaacgccggcaagagcaccaccaacaucaugaucaccaccaucaucaucgugaucaucgugauccugcugagccugaucgccgugggccugcugcuguacugcaaggccagaagcacccccgugacccugagcaaggaccagcugagcggcaucaacaacaucgccuucagcaacugaggacuaguaauaaggaaacuguaugaaugucugugggcaggaagugaagagauccuucuguaaagguuuuuggaauuaugucugcugaauaauaaacuuuuuugaaauaauaaaucugguagaaaaaugagaucuaaaaaaaaaaaaaaaaaaaaaaaaaaaaaaaaaaaaaaaaaaaaaaaaaaaaaaaaaaaaaaaaugcaucccccccccccccccccccccccccccccccaaaggcucuuuucagagccaccagaauu

SEQ ID NO: 4120 - RNA, 1967 nt, Artificial Sequence
  mRNA product Design g-2 comprising derived and/or modified sequence from HRSV(A2)__F_DSCav1_mut0 (opt5)
gggagaguccgcucagccagguugcagaagcggcuuagcguguguccuaaucuucucucugcguguagguaggccugugccgcaaacaagcuuaccauggagcugcucauccugaaggccaacgcuauuaccacaauccuuacggccgugaccuucugcuuugcgagcggccagaauauuacagaagaguucuaccaauccaccuguucugcugucagcaaaggguaucuguccgcccucagaacaggaugguacaccucuguuaucacaauugaacugagcaacaucaaggagaauaaaugcaacggcaccgacgccaaggugaaacuuaucaagcaggaacuggauaaguauaaaaaugcugugacggagcuccagcugcugaugcaguccacccccgccacagggucuggaagcgcuauugccuccggcgucgcgguguguaagguucuccaccuggagggggaagugaacaaaaucaagagcgcccuucugucuaccaauaaagcugucgugucccucagcaacggaguuucugugcugacauuuaagguccuugaccugaagaauuacauugauaaacaacuccugccuauccugaacaagcaguccugcagcauuucuaauaucgagaccgugauugaguuccagcagaaaaacaaucggcuccuggaaaucacgcgcgaguuuuccgugaacgccggcgucacaaccccgguuagcacauauaugcuuaccaauuccgaacugcucucucugaucaacgacaugcccauuaccaacgaucaaaagaaacuuaugagcaauaacgugcagaucgugagacagcaguccuacagcauuauguguaucauuaaggaggaaguccuggcuuaugugguucaacucccucuguacggcgugaucgacacacccugcuggaaacugcauacgucuccucucuguaccacaaauaccaaggagggguccaacaucugccugacacggaccgaucgcggaugguacugugacaaugccggcagcgucucuuucuuuccccaggcggaaacgugcaaggugcagagcaacagaguuuucugugauacaaugaacuccagaacccugccuucugaggugaaucucugcaaugucgacauuuuuaacccgaaauaugauugcaagaucaugaccagcaaaacagacguguccagcucugucauuaccucccugggggccaucgugagcuguuacggaaagacaaaaugcacggcuucuaauaagaaccggggcauuaucaagaccuucuccaaugggugugauuauguuagcaacaaaggaguggacacagucuccgugggcaauacccuuuacuauguuaacaagcaagagggcaaaucucuguacgugaagggggaacccaucauuaacuuuuaugacccucucgucuuccccagcgaugaguuugacgccuccaucucucaggugaaugagaaaauuaaccagagccuggcuuucauccgcaaguccgaugaacugcuccacaaugugaacgccggaaagagcacaaccaauauuaugaucacgaccauuaucaucguuauuaucgucauucugcuuucucugaucgccgugggccuccugcuguacugcaaagcuagauccacaccugugacccuuagcaaggaccagcucucugggauuaacaauaucgcguucuccaacugaggacuaguaauaaggaaacuguaugaaugucugugggcaggaagugaagagauccuucuguaaagguuuuuggaauuaugucugcugaauaauaaacuuuuuugaaauaauaaaucugguagaaaaaugagaucuaaaaaaaaaaaaaaaaaaaaaaaaaaaaaaaaaaaaaaaaaaaaaaaaaaaaaaaaaaaaaaaaugcaucccccccccccccccccccccccccccccccaaaggcucuuuucagagccaccagaauu

SEQ ID NO: 4121 - RNA, 1967 nt, Artificial Sequence
  mRNA product Design g-2 comprising derived and/or modified sequence from HRSV(A2)__F_DSCav1_mut0 (opt6)
gggagaguccgcucagccagguugcagaagcggcuuagcguguguccuaaucuucucucugcguguagguaggccugugccgcaaacaagcuuaccauggaacuacuaauacuaaaagccaaugcaauaacaaccauacuaaccgccguaacauuuuguuucgcaucaggucaaaacauaaccgaagaauuuuaucaaucaacaugcucagcaguaucaaaaggauacuuauccgcucuaagaacaggaugguacacaaguguaauuacaauagagcucucaaacauaaaagaaaacaaaugcaauggaacugacgcaaaaguuaaacuuauaaaacaagaacuagauaaauauaaaaaugcaguaaccgaauuacaacuccuaaugcaauccacaccugcuaccgguuccggaucagccauagcaucuggaguagccguaugcaaaguccuccaccuagaaggagaaguaaauaaaaucaaaucagcacuauuaucuaccaauaaagcaguugucucacuauccaauggcguaucaguacuaacauucaaaguauuagaccuuaaaaacuacauagacaaacaacuauuaccaauucugaacaaacaauccuguucaauaucaaacaucgaaacgguaauagaauuucaacaaaaaaauaacagauuacuugaaauaacaagagaauuuucaguaaaugcaggaguuacaacacccgucuccaccuacaugcucacaaauucagaauuauuaucacuuauaaacgacaugccaauaacuaacgaccaaaaaaaacuaaugucaaacaauguccaaauaguccgacaacaauccuacucaauaaugugcauuauaaaagaagaaguccuagccuacguuguccaacuacccuuauauggaguaauagauaccccaugcuggaaacuucauaccuccccccuaugcacaacaaacacaaaagaaggcucaaacaucugcuuaacacguacagaccgagguugguacugugauaacgcaggauccguaucauuuuucccacaagcagaaacaugcaaaguacaaucaaaccgcguuuuuugugacaccaugaacagcagaacccucccuucagaaguaaaccuaugcaacgucgauauauuuaacccaaaauacgauugcaaaauaaugacaucaaaaaccgaugucucaucuucaguaauaaccucucuaggagcaauagucucauguuacggaaaaacaaaaugcacagcaaguaauaaaaauagaggaauaauaaaaacauucucuaauggcugcgacuacguauccaauaaaggcguugacacaguauccguaggcaacacacucuacuauguuaacaaacaagaaggaaaaaguuuauacguuaaaggagaaccaauuauaaacuuuuacgacccacucguauucccaucugaugaauuugacgcaucaaucucacaaguaaaugaaaaaaucaaucagucccuugccuuuauaagaaaaucagaugaacuuuuacacaacguuaacgccggaaaaucaacaaccaauauaaugaucacaaccauaauaauaguuauaauuguaauuuuauuauccuuaauagccgucggacuacuacuauacugcaaagcaagaucuacacccguaacccuaucaaaagaccaacuaaguggaauaaauaacauugcauucucaaauuaaggacuaguaauaaggaaacuguaugaaugucugugggcaggaagugaagagauccuucuguaaagguuuuuggaauuaugucugcugaauaauaaacuuuuuugaaauaauaaaucugguagaaaaaugagaucuaaaaaaaaaaaaaaaaaaaaaaaaaaaaaaaaaaaaaaaaaaaaaaaaaaaaaaaaaaaaaaaaugcaucccccccccccccccccccccccccccccccaaaggcucuuuucagagccaccagaauu

SEQ ID NO: 4122 - RNA, 1967 nt, Artificial Sequence
  mRNA product Design g-2 comprising derived and/or modified sequence from HRSV(A2)__F_DSCav1_mut0 (opt11)
gggagaguccgcucagccagguugcagaagcggcuuagcguguguccuaaucuucucucugcguguagguaggccugugccgcaaacaagcuuaccauggaacuccuaauacuaaaggcaaacgcaaucacuacaauucuaaccgccgugacauucugcuucgccuccggacaaaacaucaccgaagaauuuuaccaauccacaugcucggccgucaguaaaggcuaccucucggcucuccgaaccggcugguacaccuccgucaucaccaucgaacucuccaacaucaaagaaaacaaaugcaacggcaccgacgccaaagucaaacuaaucaaacaagaacucgacaaauacaaaaacgccgucacagaacuccaacuacuaaugcaaucaacacccgcuacaggaagcggcuccgccaucgccagcggcguagcugucugcaaaguccuccaccucgaaggugaagucaacaaaaucaaaucagcccuacucagcacaaacaaagccguuguaagccuauccaacggcgucuccguacuaacauucaaaguccuugaccucaagaacuacaucgacaaacaacuucucccaauccuaaacaaacaaagcugcucaauuuccaacaucgaaacaguaaucgaauuucaacaaaaaaacaaccgacuccucgaaaucacccgcgaauuuuccguuaacgccggcguuacaacccccgucuccaccuacaugcucaccaauuccgaacuacuaucacucauaaacgacaugccuaucacaaacgaccaaaaaaaacuaaugucaaacaauguccaaaucguccgccagcaaagcuauuccaucaugugcaucaucaaagaggaaguccucgccuacguaguccaacugccccucuacggcgucauugauacccccugcuggaaacuccacaccuccccccucugcaccacaaacaccaaagaagguuccaacaucugccuaacacgaaccgacagaggcugguacugcgacaacgccggcagcgucuccuucuucccccaagcagaaaccuguaaaguccagucuaaccgcgucuucugcgacacaaugaacucaagaacccuaccuuccgaaguaaaccucugcaacguagacaucuucaacccuaaauacgacugcaaaaucaugacuucaaaaacagacguaagcucuuccguaaucacuucccucggcgccaucguauccugcuacgguaaaaccaaaugcaccgccuccaacaaaaaccgagggaucauaaaaaccuucuccaacggcugcgacuacguaucuaacaaaggcgucgacaccgucuccgucggcaacacccucuauuacguaaacaaacaagagggcaaaucacuauacgucaaaggcgagccaaucauaaacuucuaugacccacucgucuucccuucagacgaauuugaugccagcaucagccaagucaacgaaaaaaucaaccaaucacucgccuucauccgcaaaagcgacgaacuccuucacaacgucaacgcaggcaaaucaaccaccaacaucaugaucaccaccaucaucaucgucaucaucguuauccuacucagccucaucgcaguuggucuucuccuuuacugcaaagcccgcuccacccccgucacccucaguaaagaccaacucagcggaaucaacaacauagcauucuccaacuaaggacuaguaauaaggaaacuguaugaaugucugugggcaggaagugaagagauccuucuguaaagguuuuuggaauuaugucugcugaauaauaaacuuuuuugaaauaauaaaucugguagaaaaaugagaucuaaaaaaaaaaaaaaaaaaaaaaaaaaaaaaaaaaaaaaaaaaaaaaaaaaaaaaaaaaaaaaaaugcaucccccccccccccccccccccccccccccccaaaggcucuuuucagagccaccagaauu

SEQ ID NO: 4123 - RNA, 2199 nt, Artificial Sequence
  mRNA product Design g-3 comprising derived and/or modified sequence from HRSV(A2)__F_DSCav1_mut0 (opt1)
gggagaguccgcucagccagguugcagaagcggcuuagcguguguccuaaucuucucucugcguguagguaggccugugccgcaaacaagcuuaccauggagcugcucauccugaaggccaacgccaucaccaccauccugacggcggugaccuucugcuucgccagcggccagaacaucaccgaggaguucuaccaguccacgugcagcgccgucuccaagggguaccucagcgcccugcggaccggcugguacaccuccgugaucaccaucgagcugagcaacaucaaggagaacaagugcaacgggaccgacgccaaggugaagcucaucaagcaggagcuggacaaguacaagaacgcggucacggagcugcagcuccugaugcaguccaccccggcaaccggcuccggcuccgccaucgcgagcggcgucgccgugugcaaggugcugcaccucgagggggaggucaacaagaucaagagcgcccugcuguccaccaacaaggccguggugagccucuccaacggcgucagcgugcugaccuucaaggugcuggaccucaagaacuacaucgacaagcagcugcugcccauccugaacaagcagagcugcuccaucagcaacaucgagacggugaucgaguuccagcagaagaacaaccggcuccuggagaucacccgcgaguucagcgugaacgccggggucaccacccccguguccacguacaugcugaccaacagcgagcuccugucccugaucaacgacaugccgaucaccaacgaccagaagaagcucaugagcaacaacgugcagaucguccggcagcaguccuacagcaucaugugcaucaucaaggaggaggugcuggcguacgugguccagcugccccucuacggcgugaucgacacccccugcuggaagcugcacacgagcccccugugcaccaccaacaccaaggagggguccaacaucugccucacgcgcaccgaccggggcugguacugcgacaacgccggcagcgucuccuucuucccgcaggccgagaccugcaaggugcagagcaaccgcguguucugcgacaccaugaacucccggacgcugcccagcgagguaaaccucugcaacgucgacaucuucaaccccaaguacgacugcaagaucaugaccuccaagaccgacgugagcuccagcgugaucaccucccugggggccaucgucagcugcuacggcaagacgaagugcaccgccagcaacaagaaccgggggaucaucaagaccuucuccaacggcugcgacuacgugagcaacaagggcguggacaccguguccgucgggaacacccuguacuacgugaacaagcaggagggcaagagccucuacgugaagggggagcccaucaucaacuucuacgacccgcuggucuuccccuccgacgaguucgacgcgagcaucucccaggugaacgagaagaucaaccagagccuggccuucauccgcaaguccgacgagcugcuccacaacgugaacgccggcaagagcacgaccaacaucaugaucaccaccaucaucaucgucaucaucgugauccugcugucccucaucgccguggggcugcugcucuacugcaaggcccggagcacgcccgucacccuguccaaggaccagcugagcggcaucaacaacaucgcguucuccaacugaggacuagugaagggaacacccaaauuuaauucagccuuaagcacaauuaauuaagagugaaacguaauuguacaagcaguuggucacccaccauagggcaugaucaacaccgcaaccuuuccuuuuucccccagugauucugaaaaaccccucuucccuucagcuugcuuagauguuccaaauuuaguaagcuuaaggcggccuacagaagaaaaagaaaaaaaaggccacaaaaguucccucucacuuucaguaaauaaaauaaaagcagcaacagaaauaaagaaauaaaugaaauucaaaaugaaauaaauauuguguugugcagcauuaaaaaaucaauaaaaauuaaaaaugagcaagaucuaaaaaaaaaaaaaaaaaaaaaaaaaaaaaaaaaaaaaaaaaaaaaaaaaaaaaaaaaaaaaaaaugcaucccccccccccccccccccccccccccccccaaaggcucuuuucagagccaccagaauu

SEQ ID NO: 4124 - RNA, 2199 nt, Artificial Sequence
  mRNA product Design g-3 comprising derived and/or modified sequence from HRSV(A2)__F_DSCav1_mut0 (opt1)
gggagaguccgcucagccagguugcagaagcggcuuagcguguguccuaaucuucucucugcguguagguaggccugugccgcaaacaagcuuaccauggagcugcucauccugaaggccaacgccaucaccaccauccugacggcggugaccuucugcuucgccagcggccagaacaucaccgaggaguucuaccaguccacgugcagcgccgucuccaagggguaccucagcgcccugcgcaccggcugguacaccuccgugaucaccaucgagcugagcaacaucaaggagaacaagugcaacgggaccgacgccaaggugaagcucaucaagcaggagcuggacaaguacaagaacgcggucacggagcugcagcuccugaugcaguccacccccgccaccggcagcggguccgccaucgccagcggcguggcggugugcaagguccugcaccucgagggcgaggugaacaagaucaaguccgcccugcugagcaccaacaaggccguggucucccucagcaacgggguguccgugcugacguucaagguccuggaccucaagaacuacaucgacaagcagcugcugccgauccucaacaagcagagcugcuccaucagcaacaucgagaccgugaucgaguuccagcagaagaacaaccggcugcuggagaucacccgcgaguucuccgugaacgccggcgucaccacgcccgugagcaccuacaugcucaccaacagcgagcugcugucccucaucaacgacaugcccaucaccaacgaccagaagaagcugaugagcaacaacgugcagaucguccggcagcaguccuacagcaucaugugcaucaucaaggaggaggugcuggccuacgugguccagcucccccuguacggggugaucgacacgccgugcuggaagcugcacaccagcccccucugcaccaccaacacgaaggagggcuccaacaucugccugacccgcaccgaccgggggugguacugcgacaacgcgggcuccgugagcuucuucccccaggccgagaccugcaagguccaguccaaccgcguguucugcgacacgaugaacagccggacccuccccuccgaggucaaccugugcaacguggacaucuucaacccgaaguacgacugcaagaucaugaccagcaagaccgacguguccagcuccgucaucacgagccugggcgccaucguguccugcuacgggaagaccaagugcaccgccagcaacaagaaccggggcaucaucaagaccuucuccaacgggugcgacuacgugagcaacaagggcgucgacacggugagcgugggcaacacccucuacuacgucaacaagcaggaggggaagucccuguacgugaagggcgagcccaucaucaacuucuacgacccccugguguuccccagcgacgaguucgacgccuccaucagccaggucaacgagaagaucaaccagucccucgcguucauccgcaagagcgacgagcugcugcacaacgugaacgccgggaaguccaccaccaacaucaugaucaccacgaucaucaucgugaucaucgucauccuccugagccugaucgccgugggccuccugcuguacugcaaggcccgguccaccccggugacccugagcaaggaccagcucuccgggaucaacaacaucgccuucagcaacugaggacuagugaagggaacacccaaauuuaauucagccuuaagcacaauuaauuaagagugaaacguaauuguacaagcaguuggucacccaccauagggcaugaucaacaccgcaaccuuuccuuuuucccccagugauucugaaaaaccccucuucccuucagcuugcuuagauguuccaaauuuaguaagcuuaaggcggccuacagaagaaaaagaaaaaaaaggccacaaaaguucccucucacuuucaguaaauaaaauaaaagcagcaacagaaauaaagaaauaaaugaaauucaaaaugaaauaaauauuguguugugcagcauuaaaaaaucaauaaaaauuaaaaaugagcaagaucuaaaaaaaaaaaaaaaaaaaaaaaaaaaaaaaaaaaaaaaaaaaaaaaaaaaaaaaaaaaaaaaaugcaucccccccccccccccccccccccccccccccaaaggcucuuuucagagccaccagaauu

SEQ ID NO: 4125 - RNA, 2199 nt, Artificial Sequence
  mRNA product Design g-3 comprising derived and/or modified sequence from HRSV(A2)__F_DSCav1_mut0 (opt2)
gggagaguccgcucagccagguugcagaagcggcuuagcguguguccuaaucuucucucugcguguagguaggccugugccgcaaacaagcuuaccauggagcuccucauccucaaggccaacgccaucaccaccauccucaccgccgucaccuucugcuucgccuccggccagaacaucaccgaggaguucuaccaguccaccugcuccgccgucuccaagggcuaccucuccgcccuccgcaccggcugguacaccuccgucaucaccaucgagcucuccaacaucaaggagaacaagugcaacggcaccgacgccaaggucaagcucaucaagcaggagcucgacaaguacaagaacgccgucaccgagcuccagcuccucaugcaguccacccccgccaccggcuccggcuccgccaucgccuccggcgucgccgucugcaagguccuccaccucgagggcgaggucaacaagaucaaguccgcccuccucuccaccaacaaggccgucgucucccucuccaacggcgucuccguccucaccuucaagguccucgaccucaagaacuacaucgacaagcagcuccuccccauccucaacaagcaguccugcuccaucuccaacaucgagaccgucaucgaguuccagcagaagaacaaccgccuccucgagaucacccgcgaguucuccgucaacgccggcgucaccacccccgucuccaccuacaugcucaccaacuccgagcuccucucccucaucaacgacaugcccaucaccaacgaccagaagaagcucauguccaacaacguccagaucguccgccagcaguccuacuccaucaugugcaucaucaaggaggagguccucgccuacgucguccagcucccccucuacggcgucaucgacacccccugcuggaagcuccacaccuccccccucugcaccaccaacaccaaggagggcuccaacaucugccucacccgcaccgaccgcggcugguacugcgacaacgccggcuccgucuccuucuucccccaggccgagaccugcaagguccaguccaaccgcgucuucugcgacaccaugaacucccgcacccuccccuccgaggucaaccucugcaacgucgacaucuucaaccccaaguacgacugcaagaucaugaccuccaagaccgacgucuccuccuccgucaucaccucccucggcgccaucgucuccugcuacggcaagaccaagugcaccgccuccaacaagaaccgcggcaucaucaagaccuucuccaacggcugcgacuacgucuccaacaagggcgucgacaccgucuccgucggcaacacccucuacuacgucaacaagcaggagggcaagucccucuacgucaagggcgagcccaucaucaacuucuacgacccccucgucuuccccuccgacgaguucgacgccuccaucucccaggucaacgagaagaucaaccagucccucgccuucauccgcaaguccgacgagcuccuccacaacgucaacgccggcaaguccaccaccaacaucaugaucaccaccaucaucaucgucaucaucgucauccuccucucccucaucgccgucggccuccuccucuacugcaaggcccgcuccacccccgucacccucuccaaggaccagcucuccggcaucaacaacaucgccuucuccaacugaggacuagugaagggaacacccaaauuuaauucagccuuaagcacaauuaauuaagagugaaacguaauuguacaagcaguuggucacccaccauagggcaugaucaacaccgcaaccuuuccuuuuucccccagugauucugaaaaaccccucuucccuucagcuugcuuagauguuccaaauuuaguaagcuuaaggcggccuacagaagaaaaagaaaaaaaaggccacaaaaguucccucucacuuucaguaaauaaaauaaaagcagcaacagaaauaaagaaauaaaugaaauucaaaaugaaauaaauauuguguugugcagcauuaaaaaaucaauaaaaauuaaaaaugagcaagaucuaaaaaaaaaaaaaaaaaaaaaaaaaaaaaaaaaaaaaaaaaaaaaaaaaaaaaaaaaaaaaaaaugcaucccccccccccccccccccccccccccccccaaaggcucuuuucagagccaccagaauu

SEQ ID NO: 4126 - RNA, 2199 nt, Artificial Sequence
  mRNA product Design g-3 comprising derived and/or modified sequence from HRSV(A2)__F_DSCav1_mut0 (opt3)
gggagaguccgcucagccagguugcagaagcggcuuagcguguguccuaaucuucucucugcguguagguaggccugugccgcaaacaagcuuaccauggagcugcucauccuuaaggccaacgcuauuaccacaauacugacugcagugacguucugcuuugccagcggccagaauaucaccgaagaguucuaccaauccacauguucugcggucucaaaaggguauuugagugcuuuaagaacuggaugguacaccagcguuauuacaaucgaacuguccaacauuaaggagaauaaaugcaacgguaccgacgccaaggugaaacuaaucaagcaggaacucgauaaguauaaaaaugcaguaacugagcugcagcuucugaugcagucuacacccgccaccggcucggggucagcuauagcaagcggaguggccgucuguaagguguugcaccucgagggcgaaguuaacaaaaucaagagugcucugcuguccacgaauaaagccguggucucucucagcaacgguguguccguauuaacuuuuaagguucuggaccuuaagaauuacauugauaaacaauugcugccuauccuaaacaagcagucaugcaguauuagcaauaucgagaccgugauagaguuccagcagaaaaacaauaggcuccuggaaauuacacgggaguuuucugucaacgcgggggugacuaccccaguguccacauauaugcuuaccaauucagaacuguugagccucaucaacgacaugccgauuacgaacgaucaaaagaaacugaugaguaauaacguccagaucguucgccagcagucuuacuccaucauguguauuauaaaggaggaaguguuagcauauguagugcaacugccccucuacggagucaucgacacuccuugcuggaaacuucauacaagcccacuguguaccacuaauacaaaggagggcucgaacauuugcuugacccgaacggaucguggcugguacugugacaaugccgggucuguguccuucuuuccccaggcugaaaccugcaagguucagucaaacagaguguucugugauacaaugaauaguagaacucugccuagcgaggucaaccucugcaauguggacaucuuuaacccaaaauaugauugcaagauaaugaccuccaaaacagacguaucuagcucaguuauuaccagucugggagccaucguguccuguuacgguaagacuaaaugcacagcaagcaauaagaacaggggcaucauuaagaccuucucuaaugggugugauuaugucucaaacaaaggaguggacacugucagugugggcaauacgcuuuacuauguuaacaagcaagaggguaaaagccuguacgugaagggggaacccaucauuaacuuuuaugacccuuugguauucccauccgaugaguuugacgcuucuauaucgcaggucaaugagaaaaucaaccagagccucgccuucauucggaaguccgaugaacuguuacacaaugugaacgcgggaaagucaacaaccaauaucaugaucacuaccauuauaaucguuauuaucgugauucugcuaagucucaucgccgucggccugcuuuuguacugcaaagcacgcucuacaccggugacccugagcaaggaccagcucuccggcauaaacaauaucgcuuucucaaacugaggacuagugaagggaacacccaaauuuaauucagccuuaagcacaauuaauuaagagugaaacguaauuguacaagcaguuggucacccaccauagggcaugaucaacaccgcaaccuuuccuuuuucccccagugauucugaaaaaccccucuucccuucagcuugcuuagauguuccaaauuuaguaagcuuaaggcggccuacagaagaaaaagaaaaaaaaggccacaaaaguucccucucacuuucaguaaauaaaauaaaagcagcaacagaaauaaagaaauaaaugaaauucaaaaugaaauaaauauuguguugugcagcauuaaaaaaucaauaaaaauuaaaaaugagcaagaucuaaaaaaaaaaaaaaaaaaaaaaaaaaaaaaaaaaaaaaaaaaaaaaaaaaaaaaaaaaaaaaaaugcaucccccccccccccccccccccccccccccccaaaggcucuuuucagagccaccagaauu

SEQ ID NO: 4127 - RNA, 2199 nt, Artificial Sequence
  mRNA product Design g-3 comprising derived and/or modified sequence from HRSV(A2)__F_DSCav1_mut0 (opt4)
gggagaguccgcucagccagguugcagaagcggcuuagcguguguccuaaucuucucucugcguguagguaggccugugccgcaaacaagcuuaccauggagcugcugauccugaaggccaacgccaucaccaccauccugaccgccgugaccuucugcuucgccagcggccagaacaucaccgaggaguucuaccagagcaccugcagcgccgugagcaagggcuaccugagcgcccugagaaccggcugguacaccagcgugaucaccaucgagcugagcaacaucaaggagaacaagugcaacggcaccgacgccaaggugaagcugaucaagcaggagcuggacaaguacaagaacgccgugaccgagcugcagcugcugaugcagagcacccccgccaccggcagcggcagcgccaucgccagcggcguggccgugugcaaggugcugcaccuggagggcgaggugaacaagaucaagagcgcccugcugagcaccaacaaggccguggugagccugagcaacggcgugagcgugcugaccuucaaggugcuggaccugaagaacuacaucgacaagcagcugcugcccauccugaacaagcagagcugcagcaucagcaacaucgagaccgugaucgaguuccagcagaagaacaacagacugcuggagaucaccagagaguucagcgugaacgccggcgugaccacccccgugagcaccuacaugcugaccaacagcgagcugcugagccugaucaacgacaugcccaucaccaacgaccagaagaagcugaugagcaacaacgugcagaucgugagacagcagagcuacagcaucaugugcaucaucaaggaggaggugcuggccuacguggugcagcugccccuguacggcgugaucgacacccccugcuggaagcugcacaccagcccccugugcaccaccaacaccaaggagggcagcaacaucugccugaccagaaccgacagaggcugguacugcgacaacgccggcagcgugagcuucuucccccaggccgagaccugcaaggugcagagcaacagaguguucugcgacaccaugaacagcagaacccugcccagcgaggugaaccugugcaacguggacaucuucaaccccaaguacgacugcaagaucaugaccagcaagaccgacgugagcagcagcgugaucaccagccugggcgccaucgugagcugcuacggcaagaccaagugcaccgccagcaacaagaacagaggcaucaucaagaccuucagcaacggcugcgacuacgugagcaacaagggcguggacaccgugagcgugggcaacacccuguacuacgugaacaagcaggagggcaagagccuguacgugaagggcgagcccaucaucaacuucuacgacccccugguguuccccagcgacgaguucgacgccagcaucagccaggugaacgagaagaucaaccagagccuggccuucaucagaaagagcgacgagcugcugcacaacgugaacgccggcaagagcaccaccaacaucaugaucaccaccaucaucaucgugaucaucgugauccugcugagccugaucgccgugggccugcugcuguacugcaaggccagaagcacccccgugacccugagcaaggaccagcugagcggcaucaacaacaucgccuucagcaacugaggacuagugaagggaacacccaaauuuaauucagccuuaagcacaauuaauuaagagugaaacguaauuguacaagcaguuggucacccaccauagggcaugaucaacaccgcaaccuuuccuuuuucccccagugauucugaaaaaccccucuucccuucagcuugcuuagauguuccaaauuuaguaagcuuaaggcggccuacagaagaaaaagaaaaaaaaggccacaaaaguucccucucacuuucaguaaauaaaauaaaagcagcaacagaaauaaagaaauaaaugaaauucaaaaugaaauaaauauuguguugugcagcauuaaaaaaucaauaaaaauuaaaaaugagcaagaucuaaaaaaaaaaaaaaaaaaaaaaaaaaaaaaaaaaaaaaaaaaaaaaaaaaaaaaaaaaaaaaaaugcaucccccccccccccccccccccccccccccccaaaggcucuuuucagagccaccagaauu

SEQ ID NO: 4128 - RNA, 2199 nt, Artificial Sequence
  mRNA product Design g-3 comprising derived and/or modified sequence from HRSV(A2)__F_DSCav1_mut0 (opt5)
gggagaguccgcucagccagguugcagaagcggcuuagcguguguccuaaucuucucucugcguguagguaggccugugccgcaaacaagcuuaccauggagcugcucauccugaaggccaacgcuauuaccacaauccuuacggccgugaccuucugcuuugcgagcggccagaauauuacagaagaguucuaccaauccaccuguucugcugucagcaaaggguaucuguccgcccucagaacaggaugguacaccucuguuaucacaauugaacugagcaacaucaaggagaauaaaugcaacggcaccgacgccaaggugaaacuuaucaagcaggaacuggauaaguauaaaaaugcugugacggagcuccagcugcugaugcaguccacccccgccacagggucuggaagcgcuauugccuccggcgucgcgguguguaagguucuccaccuggagggggaagugaacaaaaucaagagcgcccuucugucuaccaauaaagcugucgugucccucagcaacggaguuucugugcugacauuuaagguccuugaccugaagaauuacauugauaaacaacuccugccuauccugaacaagcaguccugcagcauuucuaauaucgagaccgugauugaguuccagcagaaaaacaaucggcuccuggaaaucacgcgcgaguuuuccgugaacgccggcgucacaaccccgguuagcacauauaugcuuaccaauuccgaacugcucucucugaucaacgacaugcccauuaccaacgaucaaaagaaacuuaugagcaauaacgugcagaucgugagacagcaguccuacagcauuauguguaucauuaaggaggaaguccuggcuuaugugguucaacucccucuguacggcgugaucgacacacccugcuggaaacugcauacgucuccucucuguaccacaaauaccaaggagggguccaacaucugccugacacggaccgaucgcggaugguacugugacaaugccggcagcgucucuuucuuuccccaggcggaaacgugcaaggugcagagcaacagaguuuucugugauacaaugaacuccagaacccugccuucugaggugaaucucugcaaugucgacauuuuuaacccgaaauaugauugcaagaucaugaccagcaaaacagacguguccagcucugucauuaccucccugggggccaucgugagcuguuacggaaagacaaaaugcacggcuucuaauaagaaccggggcauuaucaagaccuucuccaaugggugugauuauguuagcaacaaaggaguggacacagucuccgugggcaauacccuuuacuauguuaacaagcaagagggcaaaucucuguacgugaagggggaacccaucauuaacuuuuaugacccucucgucuuccccagcgaugaguuugacgccuccaucucucaggugaaugagaaaauuaaccagagccuggcuuucauccgcaaguccgaugaacugcuccacaaugugaacgccggaaagagcacaaccaauauuaugaucacgaccauuaucaucguuauuaucgucauucugcuuucucugaucgccgugggccuccugcuguacugcaaagcuagauccacaccugugacccuuagcaaggaccagcucucugggauuaacaauaucgcguucuccaacugaggacuagugaagggaacacccaaauuuaauucagccuuaagcacaauuaauuaagagugaaacguaauuguacaagcaguuggucacccaccauagggcaugaucaacaccgcaaccuuuccuuuuucccccagugauucugaaaaaccccucuucccuucagcuugcuuagauguuccaaauuuaguaagcuuaaggcggccuacagaagaaaaagaaaaaaaaggccacaaaaguucccucucacuuucaguaaauaaaauaaaagcagcaacagaaauaaagaaauaaaugaaauucaaaaugaaauaaauauuguguugugcagcauuaaaaaaucaauaaaaauuaaaaaugagcaagaucuaaaaaaaaaaaaaaaaaaaaaaaaaaaaaaaaaaaaaaaaaaaaaaaaaaaaaaaaaaaaaaaaugcaucccccccccccccccccccccccccccccccaaaggcucuuuucagagccaccagaauu

SEQ ID NO: 4129 - RNA, 2199 nt, Artificial Sequence
  mRNA product Design g-3 comprising derived and/or modified sequence from HRSV(A2)__F_DSCav1_mut0 (opt6)
gggagaguccgcucagccagguugcagaagcggcuuagcguguguccuaaucuucucucugcguguagguaggccugugccgcaaacaagcuuaccauggaacuacuaauacuaaaagccaaugcaauaacaaccauacuaaccgccguaacauuuuguuucgcaucaggucaaaacauaaccgaagaauuuuaucaaucaacaugcucagcaguaucaaaaggauacuuauccgcucuaagaacaggaugguacacaaguguaauuacaauagagcucucaaacauaaaagaaaacaaaugcaauggaacugacgcaaaaguuaaacuuauaaaacaagaacuagauaaauauaaaaaugcaguaaccgaauuacaacuccuaaugcaauccacaccugcuaccgguuccggaucagccauagcaucuggaguagccguaugcaaaguccuccaccuagaaggagaaguaaauaaaaucaaaucagcacuauuaucuaccaauaaagcaguugucucacuauccaauggcguaucaguacuaacauucaaaguauuagaccuuaaaaacuacauagacaaacaacuauuaccaauucugaacaaacaauccuguucaauaucaaacaucgaaacgguaauagaauuucaacaaaaaaauaacagauuacuugaaauaacaagagaauuuucaguaaaugcaggaguuacaacacccgucuccaccuacaugcucacaaauucagaauuauuaucacuuauaaacgacaugccaauaacuaacgaccaaaaaaaacuaaugucaaacaauguccaaauaguccgacaacaauccuacucaauaaugugcauuauaaaagaagaaguccuagccuacguuguccaacuacccuuauauggaguaauagauaccccaugcuggaaacuucauaccuccccccuaugcacaacaaacacaaaagaaggcucaaacaucugcuuaacacguacagaccgagguugguacugugauaacgcaggauccguaucauuuuucccacaagcagaaacaugcaaaguacaaucaaaccgcguuuuuugugacaccaugaacagcagaacccucccuucagaaguaaaccuaugcaacgucgauauauuuaacccaaaauacgauugcaaaauaaugacaucaaaaaccgaugucucaucuucaguaauaaccucucuaggagcaauagucucauguuacggaaaaacaaaaugcacagcaaguaauaaaaauagaggaauaauaaaaacauucucuaauggcugcgacuacguauccaauaaaggcguugacacaguauccguaggcaacacacucuacuauguuaacaaacaagaaggaaaaaguuuauacguuaaaggagaaccaauuauaaacuuuuacgacccacucguauucccaucugaugaauuugacgcaucaaucucacaaguaaaugaaaaaaucaaucagucccuugccuuuauaagaaaaucagaugaacuuuuacacaacguuaacgccggaaaaucaacaaccaauauaaugaucacaaccauaauaauaguuauaauuguaauuuuauuauccuuaauagccgucggacuacuacuauacugcaaagcaagaucuacacccguaacccuaucaaaagaccaacuaaguggaauaaauaacauugcauucucaaauuaaggacuagugaagggaacacccaaauuuaauucagccuuaagcacaauuaauuaagagugaaacguaauuguacaagcaguuggucacccaccauagggcaugaucaacaccgcaaccuuuccuuuuucccccagugauucugaaaaaccccucuucccuucagcuugcuuagauguuccaaauuuaguaagcuuaaggcggccuacagaagaaaaagaaaaaaaaggccacaaaaguucccucucacuuucaguaaauaaaauaaaagcagcaacagaaauaaagaaauaaaugaaauucaaaaugaaauaaauauuguguugugcagcauuaaaaaaucaauaaaaauuaaaaaugagcaagaucuaaaaaaaaaaaaaaaaaaaaaaaaaaaaaaaaaaaaaaaaaaaaaaaaaaaaaaaaaaaaaaaaugcaucccccccccccccccccccccccccccccccaaaggcucuuuucagagccaccagaauu

SEQ ID NO: 4130 - RNA, 2199 nt, Artificial Sequence
  mRNA product Design g-3 comprising derived and/or modified sequence from HRSV(A2)__F_DSCav1_mut0 (opt11)
gggagaguccgcucagccagguugcagaagcggcuuagcguguguccuaaucuucucucugcguguagguaggccugugccgcaaacaagcuuaccauggaacuccuaauacuaaaggcaaacgcaaucacuacaauucuaaccgccgugacauucugcuucgccuccggacaaaacaucaccgaagaauuuuaccaauccacaugcucggccgucaguaaaggcuaccucucggcucuccgaaccggcugguacaccuccgucaucaccaucgaacucuccaacaucaaagaaaacaaaugcaacggcaccgacgccaaagucaaacuaaucaaacaagaacucgacaaauacaaaaacgccgucacagaacuccaacuacuaaugcaaucaacacccgcuacaggaagcggcuccgccaucgccagcggcguagcugucugcaaaguccuccaccucgaaggugaagucaacaaaaucaaaucagcccuacucagcacaaacaaagccguuguaagccuauccaacggcgucuccguacuaacauucaaaguccuugaccucaagaacuacaucgacaaacaacuucucccaauccuaaacaaacaaagcugcucaauuuccaacaucgaaacaguaaucgaauuucaacaaaaaaacaaccgacuccucgaaaucacccgcgaauuuuccguuaacgccggcguuacaacccccgucuccaccuacaugcucaccaauuccgaacuacuaucacucauaaacgacaugccuaucacaaacgaccaaaaaaaacuaaugucaaacaauguccaaaucguccgccagcaaagcuauuccaucaugugcaucaucaaagaggaaguccucgccuacguaguccaacugccccucuacggcgucauugauacccccugcuggaaacuccacaccuccccccucugcaccacaaacaccaaagaagguuccaacaucugccuaacacgaaccgacagaggcugguacugcgacaacgccggcagcgucuccuucuucccccaagcagaaaccuguaaaguccagucuaaccgcgucuucugcgacacaaugaacucaagaacccuaccuuccgaaguaaaccucugcaacguagacaucuucaacccuaaauacgacugcaaaaucaugacuucaaaaacagacguaagcucuuccguaaucacuucccucggcgccaucguauccugcuacgguaaaaccaaaugcaccgccuccaacaaaaaccgagggaucauaaaaaccuucuccaacggcugcgacuacguaucuaacaaaggcgucgacaccgucuccgucggcaacacccucuauuacguaaacaaacaagagggcaaaucacuauacgucaaaggcgagccaaucauaaacuucuaugacccacucgucuucccuucagacgaauuugaugccagcaucagccaagucaacgaaaaaaucaaccaaucacucgccuucauccgcaaaagcgacgaacuccuucacaacgucaacgcaggcaaaucaaccaccaacaucaugaucaccaccaucaucaucgucaucaucguuauccuacucagccucaucgcaguuggucuucuccuuuacugcaaagcccgcuccacccccgucacccucaguaaagaccaacucagcggaaucaacaacauagcauucuccaacuaaggacuagugaagggaacacccaaauuuaauucagccuuaagcacaauuaauuaagagugaaacguaauuguacaagcaguuggucacccaccauagggcaugaucaacaccgcaaccuuuccuuuuucccccagugauucugaaaaaccccucuucccuucagcuugcuuagauguuccaaauuuaguaagcuuaaggcggccuacagaagaaaaagaaaaaaaaggccacaaaaguucccucucacuuucaguaaauaaaauaaaagcagcaacagaaauaaagaaauaaaugaaauucaaaaugaaauaaauauuguguugugcagcauuaaaaaaucaauaaaaauuaaaaaugagcaagaucuaaaaaaaaaaaaaaaaaaaaaaaaaaaaaaaaaaaaaaaaaaaaaaaaaaaaaaaaaaaaaaaaugcaucccccccccccccccccccccccccccccccaaaggcucuuuucagagccaccagaauu

SEQ ID NO: 4131 - RNA, 1994 nt, Artificial Sequence
  mRNA product Design g-4 comprising derived and/or modified sequence from HRSV(A2)__F_DSCav1_mut0 (opt1)
gggagacuccugucgggcggaaguaggaggaguagaguuuaaaaacaguacucuuuuuccgguucgggacguaguugaagcaacgacaagccggauaaccgcucuugagacaggaagcuuaccauggagcugcucauccugaaggccaacgccaucaccaccauccugacggcggugaccuucugcuucgccagcggccagaacaucaccgaggaguucuaccaguccacgugcagcgccgucuccaagggguaccucagcgcccugcggaccggcugguacaccuccgugaucaccaucgagcugagcaacaucaaggagaacaagugcaacgggaccgacgccaaggugaagcucaucaagcaggagcuggacaaguacaagaacgcggucacggagcugcagcuccugaugcaguccaccccggcaaccggcuccggcuccgccaucgcgagcggcgucgccgugugcaaggugcugcaccucgagggggaggucaacaagaucaagagcgcccugcuguccaccaacaaggccguggugagccucuccaacggcgucagcgugcugaccuucaaggugcuggaccucaagaacuacaucgacaagcagcugcugcccauccugaacaagcagagcugcuccaucagcaacaucgagacggugaucgaguuccagcagaagaacaaccggcuccuggagaucacccgcgaguucagcgugaacgccggggucaccacccccguguccacguacaugcugaccaacagcgagcuccugucccugaucaacgacaugccgaucaccaacgaccagaagaagcucaugagcaacaacgugcagaucguccggcagcaguccuacagcaucaugugcaucaucaaggaggaggugcuggcguacgugguccagcugccccucuacggcgugaucgacacccccugcuggaagcugcacacgagcccccugugcaccaccaacaccaaggagggguccaacaucugccucacgcgcaccgaccggggcugguacugcgacaacgccggcagcgucuccuucuucccgcaggccgagaccugcaaggugcagagcaaccgcguguucugcgacaccaugaacucccggacgcugcccagcgagguaaaccucugcaacgucgacaucuucaaccccaaguacgacugcaagaucaugaccuccaagaccgacgugagcuccagcgugaucaccucccugggggccaucgucagcugcuacggcaagacgaagugcaccgccagcaacaagaaccgggggaucaucaagaccuucuccaacggcugcgacuacgugagcaacaagggcguggacaccguguccgucgggaacacccuguacuacgugaacaagcaggagggcaagagccucuacgugaagggggagcccaucaucaacuucuacgacccgcuggucuuccccuccgacgaguucgacgcgagcaucucccaggugaacgagaagaucaaccagagccuggccuucauccgcaaguccgacgagcugcuccacaacgugaacgccggcaagagcacgaccaacaucaugaucaccaccaucaucaucgucaucaucgugauccugcugucccucaucgccguggggcugcugcucuacugcaaggcccggagcacgcccgucacccuguccaaggaccagcugagcggcaucaacaacaucgcguucuccaacugaggacuaguaauaaggaaacuguaugaaugucugugggcaggaagugaagagauccuucuguaaagguuuuuggaauuaugucugcugaauaauaaacuuuuuugaaauaauaaaucugguagaaaaaugagaucuaaaaaaaaaaaaaaaaaaaaaaaaaaaaaaaaaaaaaaaaaaaaaaaaaaaaaaaaaaaaaaaaugcaucccccccccccccccccccccccccccccccaaaggcucuuuucagagccaccagaauu

SEQ ID NO: 4132 - RNA, 1994 nt, Artificial Sequence
  mRNA product Design g-4 comprising derived and/or modified sequence from HRSV(A2)__F_DSCav1_mut0 (opt1)
gggagacuccugucgggcggaaguaggaggaguagaguuuaaaaacaguacucuuuuuccgguucgggacguaguugaagcaacgacaagccggauaaccgcucuugagacaggaagcuuaccauggagcugcucauccugaaggccaacgccaucaccaccauccugacggcggugaccuucugcuucgccagcggccagaacaucaccgaggaguucuaccaguccacgugcagcgccgucuccaagggguaccucagcgcccugcgcaccggcugguacaccuccgugaucaccaucgagcugagcaacaucaaggagaacaagugcaacgggaccgacgccaaggugaagcucaucaagcaggagcuggacaaguacaagaacgcggucacggagcugcagcuccugaugcaguccacccccgccaccggcagcggguccgccaucgccagcggcguggcggugugcaagguccugcaccucgagggcgaggugaacaagaucaaguccgcccugcugagcaccaacaaggccguggucucccucagcaacgggguguccgugcugacguucaagguccuggaccucaagaacuacaucgacaagcagcugcugccgauccucaacaagcagagcugcuccaucagcaacaucgagaccgugaucgaguuccagcagaagaacaaccggcugcuggagaucacccgcgaguucuccgugaacgccggcgucaccacgcccgugagcaccuacaugcucaccaacagcgagcugcugucccucaucaacgacaugcccaucaccaacgaccagaagaagcugaugagcaacaacgugcagaucguccggcagcaguccuacagcaucaugugcaucaucaaggaggaggugcuggccuacgugguccagcucccccuguacggggugaucgacacgccgugcuggaagcugcacaccagcccccucugcaccaccaacacgaaggagggcuccaacaucugccugacccgcaccgaccgggggugguacugcgacaacgcgggcuccgugagcuucuucccccaggccgagaccugcaagguccaguccaaccgcguguucugcgacacgaugaacagccggacccuccccuccgaggucaaccugugcaacguggacaucuucaacccgaaguacgacugcaagaucaugaccagcaagaccgacguguccagcuccgucaucacgagccugggcgccaucguguccugcuacgggaagaccaagugcaccgccagcaacaagaaccggggcaucaucaagaccuucuccaacgggugcgacuacgugagcaacaagggcgucgacacggugagcgugggcaacacccucuacuacgucaacaagcaggaggggaagucccuguacgugaagggcgagcccaucaucaacuucuacgacccccugguguuccccagcgacgaguucgacgccuccaucagccaggucaacgagaagaucaaccagucccucgcguucauccgcaagagcgacgagcugcugcacaacgugaacgccgggaaguccaccaccaacaucaugaucaccacgaucaucaucgugaucaucgucauccuccugagccugaucgccgugggccuccugcuguacugcaaggcccgguccaccccggugacccugagcaaggaccagcucuccgggaucaacaacaucgccuucagcaacugaggacuaguaauaaggaaacuguaugaaugucugugggcaggaagugaagagauccuucuguaaagguuuuuggaauuaugucugcugaauaauaaacuuuuuugaaauaauaaaucugguagaaaaaugagaucuaaaaaaaaaaaaaaaaaaaaaaaaaaaaaaaaaaaaaaaaaaaaaaaaaaaaaaaaaaaaaaaaugcaucccccccccccccccccccccccccccccccaaaggcucuuuucagagccaccagaauu

SEQ ID NO: 4133 - RNA, 1994 nt, Artificial Sequence
  mRNA product Design g-4 comprising derived and/or modified sequence from HRSV(A2)__F_DSCav1_mut0 (opt2)
gggagacuccugucgggcggaaguaggaggaguagaguuuaaaaacaguacucuuuuuccgguucgggacguaguugaagcaacgacaagccggauaaccgcucuugagacaggaagcuuaccauggagcuccucauccucaaggccaacgccaucaccaccauccucaccgccgucaccuucugcuucgccuccggccagaacaucaccgaggaguucuaccaguccaccugcuccgccgucuccaagggcuaccucuccgcccuccgcaccggcugguacaccuccgucaucaccaucgagcucuccaacaucaaggagaacaagugcaacggcaccgacgccaaggucaagcucaucaagcaggagcucgacaaguacaagaacgccgucaccgagcuccagcuccucaugcaguccacccccgccaccggcuccggcuccgccaucgccuccggcgucgccgucugcaagguccuccaccucgagggcgaggucaacaagaucaaguccgcccuccucuccaccaacaaggccgucgucucccucuccaacggcgucuccguccucaccuucaagguccucgaccucaagaacuacaucgacaagcagcuccuccccauccucaacaagcaguccugcuccaucuccaacaucgagaccgucaucgaguuccagcagaagaacaaccgccuccucgagaucacccgcgaguucuccgucaacgccggcgucaccacccccgucuccaccuacaugcucaccaacuccgagcuccucucccucaucaacgacaugcccaucaccaacgaccagaagaagcucauguccaacaacguccagaucguccgccagcaguccuacuccaucaugugcaucaucaaggaggagguccucgccuacgucguccagcucccccucuacggcgucaucgacacccccugcuggaagcuccacaccuccccccucugcaccaccaacaccaaggagggcuccaacaucugccucacccgcaccgaccgcggcugguacugcgacaacgccggcuccgucuccuucuucccccaggccgagaccugcaagguccaguccaaccgcgucuucugcgacaccaugaacucccgcacccuccccuccgaggucaaccucugcaacgucgacaucuucaaccccaaguacgacugcaagaucaugaccuccaagaccgacgucuccuccuccgucaucaccucccucggcgccaucgucuccugcuacggcaagaccaagugcaccgccuccaacaagaaccgcggcaucaucaagaccuucuccaacggcugcgacuacgucuccaacaagggcgucgacaccgucuccgucggcaacacccucuacuacgucaacaagcaggagggcaagucccucuacgucaagggcgagcccaucaucaacuucuacgacccccucgucuuccccuccgacgaguucgacgccuccaucucccaggucaacgagaagaucaaccagucccucgccuucauccgcaaguccgacgagcuccuccacaacgucaacgccggcaaguccaccaccaacaucaugaucaccaccaucaucaucgucaucaucgucauccuccucucccucaucgccgucggccuccuccucuacugcaaggcccgcuccacccccgucacccucuccaaggaccagcucuccggcaucaacaacaucgccuucuccaacugaggacuaguaauaaggaaacuguaugaaugucugugggcaggaagugaagagauccuucuguaaagguuuuuggaauuaugucugcugaauaauaaacuuuuuugaaauaauaaaucugguagaaaaaugagaucuaaaaaaaaaaaaaaaaaaaaaaaaaaaaaaaaaaaaaaaaaaaaaaaaaaaaaaaaaaaaaaaaugcaucccccccccccccccccccccccccccccccaaaggcucuuuucagagccaccagaauu

SEQ ID NO: 4134 - RNA, 1994 nt, Artificial Sequence
  mRNA product Design g-4 comprising derived and/or modified sequence from HRSV(A2)__F_DSCav1_mut0 (opt3)
gggagacuccugucgggcggaaguaggaggaguagaguuuaaaaacaguacucuuuuuccgguucgggacguaguugaagcaacgacaagccggauaaccgcucuugagacaggaagcuuaccauggagcugcucauccuuaaggccaacgcuauuaccacaauacugacugcagugacguucugcuuugccagcggccagaauaucaccgaagaguucuaccaauccacauguucugcggucucaaaaggguauuugagugcuuuaagaacuggaugguacaccagcguuauuacaaucgaacuguccaacauuaaggagaauaaaugcaacgguaccgacgccaaggugaaacuaaucaagcaggaacucgauaaguauaaaaaugcaguaacugagcugcagcuucugaugcagucuacacccgccaccggcucggggucagcuauagcaagcggaguggccgucuguaagguguugcaccucgagggcgaaguuaacaaaaucaagagugcucugcuguccacgaauaaagccguggucucucucagcaacgguguguccguauuaacuuuuaagguucuggaccuuaagaauuacauugauaaacaauugcugccuauccuaaacaagcagucaugcaguauuagcaauaucgagaccgugauagaguuccagcagaaaaacaauaggcuccuggaaauuacacgggaguuuucugucaacgcgggggugacuaccccaguguccacauauaugcuuaccaauucagaacuguugagccucaucaacgacaugccgauuacgaacgaucaaaagaaacugaugaguaauaacguccagaucguucgccagcagucuuacuccaucauguguauuauaaaggaggaaguguuagcauauguagugcaacugccccucuacggagucaucgacacuccuugcuggaaacuucauacaagcccacuguguaccacuaauacaaaggagggcucgaacauuugcuugacccgaacggaucguggcugguacugugacaaugccgggucuguguccuucuuuccccaggcugaaaccugcaagguucagucaaacagaguguucugugauacaaugaauaguagaacucugccuagcgaggucaaccucugcaauguggacaucuuuaacccaaaauaugauugcaagauaaugaccuccaaaacagacguaucuagcucaguuauuaccagucugggagccaucguguccuguuacgguaagacuaaaugcacagcaagcaauaagaacaggggcaucauuaagaccuucucuaaugggugugauuaugucucaaacaaaggaguggacacugucagugugggcaauacgcuuuacuauguuaacaagcaagaggguaaaagccuguacgugaagggggaacccaucauuaacuuuuaugacccuuugguauucccauccgaugaguuugacgcuucuauaucgcaggucaaugagaaaaucaaccagagccucgccuucauucggaaguccgaugaacuguuacacaaugugaacgcgggaaagucaacaaccaauaucaugaucacuaccauuauaaucguuauuaucgugauucugcuaagucucaucgccgucggccugcuuuuguacugcaaagcacgcucuacaccggugacccugagcaaggaccagcucuccggcauaaacaauaucgcuuucucaaacugaggacuaguaauaaggaaacuguaugaaugucugugggcaggaagugaagagauccuucuguaaagguuuuuggaauuaugucugcugaauaauaaacuuuuuugaaauaauaaaucugguagaaaaaugagaucuaaaaaaaaaaaaaaaaaaaaaaaaaaaaaaaaaaaaaaaaaaaaaaaaaaaaaaaaaaaaaaaaugcaucccccccccccccccccccccccccccccccaaaggcucuuuucagagccaccagaauu

SEQ ID NO: 4135 - RNA, 1994 nt, Artificial Sequence
  mRNA product Design g-4 comprising derived and/or modified sequence from HRSV(A2)__F_DSCav1_mut0 (opt4)
gggagacuccugucgggcggaaguaggaggaguagaguuuaaaaacaguacucuuuuuccgguucgggacguaguugaagcaacgacaagccggauaaccgcucuugagacaggaagcuuaccauggagcugcugauccugaaggccaacgccaucaccaccauccugaccgccgugaccuucugcuucgccagcggccagaacaucaccgaggaguucuaccagagcaccugcagcgccgugagcaagggcuaccugagcgcccugagaaccggcugguacaccagcgugaucaccaucgagcugagcaacaucaaggagaacaagugcaacggcaccgacgccaaggugaagcugaucaagcaggagcuggacaaguacaagaacgccgugaccgagcugcagcugcugaugcagagcacccccgccaccggcagcggcagcgccaucgccagcggcguggccgugugcaaggugcugcaccuggagggcgaggugaacaagaucaagagcgcccugcugagcaccaacaaggccguggugagccugagcaacggcgugagcgugcugaccuucaaggugcuggaccugaagaacuacaucgacaagcagcugcugcccauccugaacaagcagagcugcagcaucagcaacaucgagaccgugaucgaguuccagcagaagaacaacagacugcuggagaucaccagagaguucagcgugaacgccggcgugaccacccccgugagcaccuacaugcugaccaacagcgagcugcugagccugaucaacgacaugcccaucaccaacgaccagaagaagcugaugagcaacaacgugcagaucgugagacagcagagcuacagcaucaugugcaucaucaaggaggaggugcuggccuacguggugcagcugccccuguacggcgugaucgacacccccugcuggaagcugcacaccagcccccugugcaccaccaacaccaaggagggcagcaacaucugccugaccagaaccgacagaggcugguacugcgacaacgccggcagcgugagcuucuucccccaggccgagaccugcaaggugcagagcaacagaguguucugcgacaccaugaacagcagaacccugcccagcgaggugaaccugugcaacguggacaucuucaaccccaaguacgacugcaagaucaugaccagcaagaccgacgugagcagcagcgugaucaccagccugggcgccaucgugagcugcuacggcaagaccaagugcaccgccagcaacaagaacagaggcaucaucaagaccuucagcaacggcugcgacuacgugagcaacaagggcguggacaccgugagcgugggcaacacccuguacuacgugaacaagcaggagggcaagagccuguacgugaagggcgagcccaucaucaacuucuacgacccccugguguuccccagcgacgaguucgacgccagcaucagccaggugaacgagaagaucaaccagagccuggccuucaucagaaagagcgacgagcugcugcacaacgugaacgccggcaagagcaccaccaacaucaugaucaccaccaucaucaucgugaucaucgugauccugcugagccugaucgccgugggccugcugcuguacugcaaggccagaagcacccccgugacccugagcaaggaccagcugagcggcaucaacaacaucgccuucagcaacugaggacuaguaauaaggaaacuguaugaaugucugugggcaggaagugaagagauccuucuguaaagguuuuuggaauuaugucugcugaauaauaaacuuuuuugaaauaauaaaucugguagaaaaaugagaucuaaaaaaaaaaaaaaaaaaaaaaaaaaaaaaaaaaaaaaaaaaaaaaaaaaaaaaaaaaaaaaaaugcaucccccccccccccccccccccccccccccccaaaggcucuuuucagagccaccagaauu

SEQ ID NO: 4136 - RNA, 1994 nt, Artificial Sequence
  mRNA product Design g-4 comprising derived and/or modified sequence from HRSV(A2)__F_DSCav1_mut0 (opt5)
gggagacuccugucgggcggaaguaggaggaguagaguuuaaaaacaguacucuuuuuccgguucgggacguaguugaagcaacgacaagccggauaaccgcucuugagacaggaagcuuaccauggagcugcucauccugaaggccaacgcuauuaccacaauccuuacggccgugaccuucugcuuugcgagcggccagaauauuacagaagaguucuaccaauccaccuguucugcugucagcaaaggguaucuguccgcccucagaacaggaugguacaccucuguuaucacaauugaacugagcaacaucaaggagaauaaaugcaacggcaccgacgccaaggugaaacuuaucaagcaggaacuggauaaguauaaaaaugcugugacggagcuccagcugcugaugcaguccacccccgccacagggucuggaagcgcuauugccuccggcgucgcgguguguaagguucuccaccuggagggggaagugaacaaaaucaagagcgcccuucugucuaccaauaaagcugucgugucccucagcaacggaguuucugugcugacauuuaagguccuugaccugaagaauuacauugauaaacaacuccugccuauccugaacaagcaguccugcagcauuucuaauaucgagaccgugauugaguuccagcagaaaaacaaucggcuccuggaaaucacgcgcgaguuuuccgugaacgccggcgucacaaccccgguuagcacauauaugcuuaccaauuccgaacugcucucucugaucaacgacaugcccauuaccaacgaucaaaagaaacuuaugagcaauaacgugcagaucgugagacagcaguccuacagcauuauguguaucauuaaggaggaaguccuggcuuaugugguucaacucccucuguacggcgugaucgacacacccugcuggaaacugcauacgucuccucucuguaccacaaauaccaaggagggguccaacaucugccugacacggaccgaucgcggaugguacugugacaaugccggcagcgucucuuucuuuccccaggcggaaacgugcaaggugcagagcaacagaguuuucugugauacaaugaacuccagaacccugccuucugaggugaaucucugcaaugucgacauuuuuaacccgaaauaugauugcaagaucaugaccagcaaaacagacguguccagcucugucauuaccucccugggggccaucgugagcuguuacggaaagacaaaaugcacggcuucuaauaagaaccggggcauuaucaagaccuucuccaaugggugugauuauguuagcaacaaaggaguggacacagucuccgugggcaauacccuuuacuauguuaacaagcaagagggcaaaucucuguacgugaagggggaacccaucauuaacuuuuaugacccucucgucuuccccagcgaugaguuugacgccuccaucucucaggugaaugagaaaauuaaccagagccuggcuuucauccgcaaguccgaugaacugcuccacaaugugaacgccggaaagagcacaaccaauauuaugaucacgaccauuaucaucguuauuaucgucauucugcuuucucugaucgccgugggccuccugcuguacugcaaagcuagauccacaccugugacccuuagcaaggaccagcucucugggauuaacaauaucgcguucuccaacugaggacuaguaauaaggaaacuguaugaaugucugugggcaggaagugaagagauccuucuguaaagguuuuuggaauuaugucugcugaauaauaaacuuuuuugaaauaauaaaucugguagaaaaaugagaucuaaaaaaaaaaaaaaaaaaaaaaaaaaaaaaaaaaaaaaaaaaaaaaaaaaaaaaaaaaaaaaaaugcaucccccccccccccccccccccccccccccccaaaggcucuuuucagagccaccagaauu

SEQ ID NO: 4137 - RNA, 1994 nt, Artificial Sequence
  mRNA product Design g-4 comprising derived and/or modified sequence from HRSV(A2)__F_DSCav1_mut0 (opt6)
gggagacuccugucgggcggaaguaggaggaguagaguuuaaaaacaguacucuuuuuccgguucgggacguaguugaagcaacgacaagccggauaaccgcucuugagacaggaagcuuaccauggaacuacuaauacuaaaagccaaugcaauaacaaccauacuaaccgccguaacauuuuguuucgcaucaggucaaaacauaaccgaagaauuuuaucaaucaacaugcucagcaguaucaaaaggauacuuauccgcucuaagaacaggaugguacacaaguguaauuacaauagagcucucaaacauaaaagaaaacaaaugcaauggaacugacgcaaaaguuaaacuuauaaaacaagaacuagauaaauauaaaaaugcaguaaccgaauuacaacuccuaaugcaauccacaccugcuaccgguuccggaucagccauagcaucuggaguagccguaugcaaaguccuccaccuagaaggagaaguaaauaaaaucaaaucagcacuauuaucuaccaauaaagcaguugucucacuauccaauggcguaucaguacuaacauucaaaguauuagaccuuaaaaacuacauagacaaacaacuauuaccaauucugaacaaacaauccuguucaauaucaaacaucgaaacgguaauagaauuucaacaaaaaaauaacagauuacuugaaauaacaagagaauuuucaguaaaugcaggaguuacaacacccgucuccaccuacaugcucacaaauucagaauuauuaucacuuauaaacgacaugccaauaacuaacgaccaaaaaaaacuaaugucaaacaauguccaaauaguccgacaacaauccuacucaauaaugugcauuauaaaagaagaaguccuagccuacguuguccaacuacccuuauauggaguaauagauaccccaugcuggaaacuucauaccuccccccuaugcacaacaaacacaaaagaaggcucaaacaucugcuuaacacguacagaccgagguugguacugugauaacgcaggauccguaucauuuuucccacaagcagaaacaugcaaaguacaaucaaaccgcguuuuuugugacaccaugaacagcagaacccucccuucagaaguaaaccuaugcaacgucgauauauuuaacccaaaauacgauugcaaaauaaugacaucaaaaaccgaugucucaucuucaguaauaaccucucuaggagcaauagucucauguuacggaaaaacaaaaugcacagcaaguaauaaaaauagaggaauaauaaaaacauucucuaauggcugcgacuacguauccaauaaaggcguugacacaguauccguaggcaacacacucuacuauguuaacaaacaagaaggaaaaaguuuauacguuaaaggagaaccaauuauaaacuuuuacgacccacucguauucccaucugaugaauuugacgcaucaaucucacaaguaaaugaaaaaaucaaucagucccuugccuuuauaagaaaaucagaugaacuuuuacacaacguuaacgccggaaaaucaacaaccaauauaaugaucacaaccauaauaauaguuauaauuguaauuuuauuauccuuaauagccgucggacuacuacuauacugcaaagcaagaucuacacccguaacccuaucaaaagaccaacuaaguggaauaaauaacauugcauucucaaauuaaggacuaguaauaaggaaacuguaugaaugucugugggcaggaagugaagagauccuucuguaaagguuuuuggaauuaugucugcugaauaauaaacuuuuuugaaauaauaaaucugguagaaaaaugagaucuaaaaaaaaaaaaaaaaaaaaaaaaaaaaaaaaaaaaaaaaaaaaaaaaaaaaaaaaaaaaaaaaugcaucccccccccccccccccccccccccccccccaaaggcucuuuucagagccaccagaauu

SEQ ID NO: 4138 - RNA, 1994 nt, Artificial Sequence
  mRNA product Design g-4 comprising derived and/or modified sequence from HRSV(A2)__F_DSCav1_mut0 (opt11)
gggagacuccugucgggcggaaguaggaggaguagaguuuaaaaacaguacucuuuuuccgguucgggacguaguugaagcaacgacaagccggauaaccgcucuugagacaggaagcuuaccauggaacuccuaauacuaaaggcaaacgcaaucacuacaauucuaaccgccgugacauucugcuucgccuccggacaaaacaucaccgaagaauuuuaccaauccacaugcucggccgucaguaaaggcuaccucucggcucuccgaaccggcugguacaccuccgucaucaccaucgaacucuccaacaucaaagaaaacaaaugcaacggcaccgacgccaaagucaaacuaaucaaacaagaacucgacaaauacaaaaacgccgucacagaacuccaacuacuaaugcaaucaacacccgcuacaggaagcggcuccgccaucgccagcggcguagcugucugcaaaguccuccaccucgaaggugaagucaacaaaaucaaaucagcccuacucagcacaaacaaagccguuguaagccuauccaacggcgucuccguacuaacauucaaaguccuugaccucaagaacuacaucgacaaacaacuucucccaauccuaaacaaacaaagcugcucaauuuccaacaucgaaacaguaaucgaauuucaacaaaaaaacaaccgacuccucgaaaucacccgcgaauuuuccguuaacgccggcguuacaacccccgucuccaccuacaugcucaccaauuccgaacuacuaucacucauaaacgacaugccuaucacaaacgaccaaaaaaaacuaaugucaaacaauguccaaaucguccgccagcaaagcuauuccaucaugugcaucaucaaagaggaaguccucgccuacguaguccaacugccccucuacggcgucauugauacccccugcuggaaacuccacaccuccccccucugcaccacaaacaccaaagaagguuccaacaucugccuaacacgaaccgacagaggcugguacugcgacaacgccggcagcgucuccuucuucccccaagcagaaaccuguaaaguccagucuaaccgcgucuucugcgacacaaugaacucaagaacccuaccuuccgaaguaaaccucugcaacguagacaucuucaacccuaaauacgacugcaaaaucaugacuucaaaaacagacguaagcucuuccguaaucacuucccucggcgccaucguauccugcuacgguaaaaccaaaugcaccgccuccaacaaaaaccgagggaucauaaaaaccuucuccaacggcugcgacuacguaucuaacaaaggcgucgacaccgucuccgucggcaacacccucuauuacguaaacaaacaagagggcaaaucacuauacgucaaaggcgagccaaucauaaacuucuaugacccacucgucuucccuucagacgaauuugaugccagcaucagccaagucaacgaaaaaaucaaccaaucacucgccuucauccgcaaaagcgacgaacuccuucacaacgucaacgcaggcaaaucaaccaccaacaucaugaucaccaccaucaucaucgucaucaucguuauccuacucagccucaucgcaguuggucuucuccuuuacugcaaagcccgcuccacccccgucacccucaguaaagaccaacucagcggaaucaacaacauagcauucuccaacuaaggacuaguaauaaggaaacuguaugaaugucugugggcaggaagugaagagauccuucuguaaagguuuuuggaauuaugucugcugaauaauaaacuuuuuugaaauaauaaaucugguagaaaaaugagaucuaaaaaaaaaaaaaaaaaaaaaaaaaaaaaaaaaaaaaaaaaaaaaaaaaaaaaaaaaaaaaaaaugcaucccccccccccccccccccccccccccccccaaaggcucuuuucagagccaccagaauu

SEQ ID NO: 4139 - RNA, 1970 nt, Artificial Sequence
  mRNA product Design g-5 comprising derived and/or modified sequence from HRSV(A2)__F_DSCav1_mut0 (opt1)
gggagacccgugacccggaaguuguacggcuacgcgacuuucccucccacaaacccucgcgcccuuccuuuccuacuugggcccggcagaaagcuuaccauggagcugcucauccugaaggccaacgccaucaccaccauccugacggcggugaccuucugcuucgccagcggccagaacaucaccgaggaguucuaccaguccacgugcagcgccgucuccaagggguaccucagcgcccugcggaccggcugguacaccuccgugaucaccaucgagcugagcaacaucaaggagaacaagugcaacgggaccgacgccaaggugaagcucaucaagcaggagcuggacaaguacaagaacgcggucacggagcugcagcuccugaugcaguccaccccggcaaccggcuccggcuccgccaucgcgagcggcgucgccgugugcaaggugcugcaccucgagggggaggucaacaagaucaagagcgcccugcuguccaccaacaaggccguggugagccucuccaacggcgucagcgugcugaccuucaaggugcuggaccucaagaacuacaucgacaagcagcugcugcccauccugaacaagcagagcugcuccaucagcaacaucgagacggugaucgaguuccagcagaagaacaaccggcuccuggagaucacccgcgaguucagcgugaacgccggggucaccacccccguguccacguacaugcugaccaacagcgagcuccugucccugaucaacgacaugccgaucaccaacgaccagaagaagcucaugagcaacaacgugcagaucguccggcagcaguccuacagcaucaugugcaucaucaaggaggaggugcuggcguacgugguccagcugccccucuacggcgugaucgacacccccugcuggaagcugcacacgagcccccugugcaccaccaacaccaaggagggguccaacaucugccucacgcgcaccgaccggggcugguacugcgacaacgccggcagcgucuccuucuucccgcaggccgagaccugcaaggugcagagcaaccgcguguucugcgacaccaugaacucccggacgcugcccagcgagguaaaccucugcaacgucgacaucuucaaccccaaguacgacugcaagaucaugaccuccaagaccgacgugagcuccagcgugaucaccucccugggggccaucgucagcugcuacggcaagacgaagugcaccgccagcaacaagaaccgggggaucaucaagaccuucuccaacggcugcgacuacgugagcaacaagggcguggacaccguguccgucgggaacacccuguacuacgugaacaagcaggagggcaagagccucuacgugaagggggagcccaucaucaacuucuacgacccgcuggucuuccccuccgacgaguucgacgcgagcaucucccaggugaacgagaagaucaaccagagccuggccuucauccgcaaguccgacgagcugcuccacaacgugaacgccggcaagagcacgaccaacaucaugaucaccaccaucaucaucgucaucaucgugauccugcugucccucaucgccguggggcugcugcucuacugcaaggcccggagcacgcccgucacccuguccaaggaccagcugagcggcaucaacaacaucgcguucuccaacugaggacuaguaauaaggaaacuguaugaaugucugugggcaggaagugaagagauccuucuguaaagguuuuuggaauuaugucugcugaauaauaaacuuuuuugaaauaauaaaucugguagaaaaaugagaucuaaaaaaaaaaaaaaaaaaaaaaaaaaaaaaaaaaaaaaaaaaaaaaaaaaaaaaaaaaaaaaaaugcaucccccccccccccccccccccccccccccccaaaggcucuuuucagagccaccagaauu

SEQ ID NO: 4140 - RNA, 1970 nt, Artificial Sequence
  mRNA product Design g-5 comprising derived and/or modified sequence from HRSV(A2)__F_DSCav1_mut0 (opt1)
gggagacccgugacccggaaguuguacggcuacgcgacuuucccucccacaaacccucgcgcccuuccuuuccuacuugggcccggcagaaagcuuaccauggagcugcucauccugaaggccaacgccaucaccaccauccugacggcggugaccuucugcuucgccagcggccagaacaucaccgaggaguucuaccaguccacgugcagcgccgucuccaagggguaccucagcgcccugcgcaccggcugguacaccuccgugaucaccaucgagcugagcaacaucaaggagaacaagugcaacgggaccgacgccaaggugaagcucaucaagcaggagcuggacaaguacaagaacgcggucacggagcugcagcuccugaugcaguccacccccgccaccggcagcggguccgccaucgccagcggcguggcggugugcaagguccugcaccucgagggcgaggugaacaagaucaaguccgcccugcugagcaccaacaaggccguggucucccucagcaacgggguguccgugcugacguucaagguccuggaccucaagaacuacaucgacaagcagcugcugccgauccucaacaagcagagcugcuccaucagcaacaucgagaccgugaucgaguuccagcagaagaacaaccggcugcuggagaucacccgcgaguucuccgugaacgccggcgucaccacgcccgugagcaccuacaugcucaccaacagcgagcugcugucccucaucaacgacaugcccaucaccaacgaccagaagaagcugaugagcaacaacgugcagaucguccggcagcaguccuacagcaucaugugcaucaucaaggaggaggugcuggccuacgugguccagcucccccuguacggggugaucgacacgccgugcuggaagcugcacaccagcccccucugcaccaccaacacgaaggagggcuccaacaucugccugacccgcaccgaccgggggugguacugcgacaacgcgggcuccgugagcuucuucccccaggccgagaccugcaagguccaguccaaccgcguguucugcgacacgaugaacagccggacccuccccuccgaggucaaccugugcaacguggacaucuucaacccgaaguacgacugcaagaucaugaccagcaagaccgacguguccagcuccgucaucacgagccugggcgccaucguguccugcuacgggaagaccaagugcaccgccagcaacaagaaccggggcaucaucaagaccuucuccaacgggugcgacuacgugagcaacaagggcgucgacacggugagcgugggcaacacccucuacuacgucaacaagcaggaggggaagucccuguacgugaagggcgagcccaucaucaacuucuacgacccccugguguuccccagcgacgaguucgacgccuccaucagccaggucaacgagaagaucaaccagucccucgcguucauccgcaagagcgacgagcugcugcacaacgugaacgccgggaaguccaccaccaacaucaugaucaccacgaucaucaucgugaucaucgucauccuccugagccugaucgccgugggccuccugcuguacugcaaggcccgguccaccccggugacccugagcaaggaccagcucuccgggaucaacaacaucgccuucagcaacugaggacuaguaauaaggaaacuguaugaaugucugugggcaggaagugaagagauccuucuguaaagguuuuuggaauuaugucugcugaauaauaaacuuuuuugaaauaauaaaucugguagaaaaaugagaucuaaaaaaaaaaaaaaaaaaaaaaaaaaaaaaaaaaaaaaaaaaaaaaaaaaaaaaaaaaaaaaaaugcaucccccccccccccccccccccccccccccccaaaggcucuuuucagagccaccagaauu

SEQ ID NO: 4141 - RNA, 1970 nt, Artificial Sequence
  mRNA product Design g-5 comprising derived and/or modified sequence from HRSV(A2)__F_DSCav1_mut0 (opt2)
gggagacccgugacccggaaguuguacggcuacgcgacuuucccucccacaaacccucgcgcccuuccuuuccuacuugggcccggcagaaagcuuaccauggagcuccucauccucaaggccaacgccaucaccaccauccucaccgccgucaccuucugcuucgccuccggccagaacaucaccgaggaguucuaccaguccaccugcuccgccgucuccaagggcuaccucuccgcccuccgcaccggcugguacaccuccgucaucaccaucgagcucuccaacaucaaggagaacaagugcaacggcaccgacgccaaggucaagcucaucaagcaggagcucgacaaguacaagaacgccgucaccgagcuccagcuccucaugcaguccacccccgccaccggcuccggcuccgccaucgccuccggcgucgccgucugcaagguccuccaccucgagggcgaggucaacaagaucaaguccgcccuccucuccaccaacaaggccgucgucucccucuccaacggcgucuccguccucaccuucaagguccucgaccucaagaacuacaucgacaagcagcuccuccccauccucaacaagcaguccugcuccaucuccaacaucgagaccgucaucgaguuccagcagaagaacaaccgccuccucgagaucacccgcgaguucuccgucaacgccggcgucaccacccccgucuccaccuacaugcucaccaacuccgagcuccucucccucaucaacgacaugcccaucaccaacgaccagaagaagcucauguccaacaacguccagaucguccgccagcaguccuacuccaucaugugcaucaucaaggaggagguccucgccuacgucguccagcucccccucuacggcgucaucgacacccccugcuggaagcuccacaccuccccccucugcaccaccaacaccaaggagggcuccaacaucugccucacccgcaccgaccgcggcugguacugcgacaacgccggcuccgucuccuucuucccccaggccgagaccugcaagguccaguccaaccgcgucuucugcgacaccaugaacucccgcacccuccccuccgaggucaaccucugcaacgucgacaucuucaaccccaaguacgacugcaagaucaugaccuccaagaccgacgucuccuccuccgucaucaccucccucggcgccaucgucuccugcuacggcaagaccaagugcaccgccuccaacaagaaccgcggcaucaucaagaccuucuccaacggcugcgacuacgucuccaacaagggcgucgacaccgucuccgucggcaacacccucuacuacgucaacaagcaggagggcaagucccucuacgucaagggcgagcccaucaucaacuucuacgacccccucgucuuccccuccgacgaguucgacgccuccaucucccaggucaacgagaagaucaaccagucccucgccuucauccgcaaguccgacgagcuccuccacaacgucaacgccggcaaguccaccaccaacaucaugaucaccaccaucaucaucgucaucaucgucauccuccucucccucaucgccgucggccuccuccucuacugcaaggcccgcuccacccccgucacccucuccaaggaccagcucuccggcaucaacaacaucgccuucuccaacugaggacuaguaauaaggaaacuguaugaaugucugugggcaggaagugaagagauccuucuguaaagguuuuuggaauuaugucugcugaauaauaaacuuuuuugaaauaauaaaucugguagaaaaaugagaucuaaaaaaaaaaaaaaaaaaaaaaaaaaaaaaaaaaaaaaaaaaaaaaaaaaaaaaaaaaaaaaaaugcaucccccccccccccccccccccccccccccccaaaggcucuuuucagagccaccagaauu

SEQ ID NO: 4142 - RNA, 1970 nt, Artificial Sequence
  mRNA product Design g-5 comprising derived and/or modified sequence from HRSV(A2)__F_DSCav1_mut0 (opt3)
gggagacccgugacccggaaguuguacggcuacgcgacuuucccucccacaaacccucgcgcccuuccuuuccuacuugggcccggcagaaagcuuaccauggagcugcucauccuuaaggccaacgcuauuaccacaauacugacugcagugacguucugcuuugccagcggccagaauaucaccgaagaguucuaccaauccacauguucugcggucucaaaaggguauuugagugcuuuaagaacuggaugguacaccagcguuauuacaaucgaacuguccaacauuaaggagaauaaaugcaacgguaccgacgccaaggugaaacuaaucaagcaggaacucgauaaguauaaaaaugcaguaacugagcugcagcuucugaugcagucuacacccgccaccggcucggggucagcuauagcaagcggaguggccgucuguaagguguugcaccucgagggcgaaguuaacaaaaucaagagugcucugcuguccacgaauaaagccguggucucucucagcaacgguguguccguauuaacuuuuaagguucuggaccuuaagaauuacauugauaaacaauugcugccuauccuaaacaagcagucaugcaguauuagcaauaucgagaccgugauagaguuccagcagaaaaacaauaggcuccuggaaauuacacgggaguuuucugucaacgcgggggugacuaccccaguguccacauauaugcuuaccaauucagaacuguugagccucaucaacgacaugccgauuacgaacgaucaaaagaaacugaugaguaauaacguccagaucguucgccagcagucuuacuccaucauguguauuauaaaggaggaaguguuagcauauguagugcaacugccccucuacggagucaucgacacuccuugcuggaaacuucauacaagcccacuguguaccacuaauacaaaggagggcucgaacauuugcuugacccgaacggaucguggcugguacugugacaaugccgggucuguguccuucuuuccccaggcugaaaccugcaagguucagucaaacagaguguucugugauacaaugaauaguagaacucugccuagcgaggucaaccucugcaauguggacaucuuuaacccaaaauaugauugcaagauaaugaccuccaaaacagacguaucuagcucaguuauuaccagucugggagccaucguguccuguuacgguaagacuaaaugcacagcaagcaauaagaacaggggcaucauuaagaccuucucuaaugggugugauuaugucucaaacaaaggaguggacacugucagugugggcaauacgcuuuacuauguuaacaagcaagaggguaaaagccuguacgugaagggggaacccaucauuaacuuuuaugacccuuugguauucccauccgaugaguuugacgcuucuauaucgcaggucaaugagaaaaucaaccagagccucgccuucauucggaaguccgaugaacuguuacacaaugugaacgcgggaaagucaacaaccaauaucaugaucacuaccauuauaaucguuauuaucgugauucugcuaagucucaucgccgucggccugcuuuuguacugcaaagcacgcucuacaccggugacccugagcaaggaccagcucuccggcauaaacaauaucgcuuucucaaacugaggacuaguaauaaggaaacuguaugaaugucugugggcaggaagugaagagauccuucuguaaagguuuuuggaauuaugucugcugaauaauaaacuuuuuugaaauaauaaaucugguagaaaaaugagaucuaaaaaaaaaaaaaaaaaaaaaaaaaaaaaaaaaaaaaaaaaaaaaaaaaaaaaaaaaaaaaaaaugcaucccccccccccccccccccccccccccccccaaaggcucuuuucagagccaccagaauu

SEQ ID NO: 4143 - RNA, 1970 nt, Artificial Sequence
  mRNA product Design g-5 comprising derived and/or modified sequence from HRSV(A2)__F_DSCav1_mut0 (opt4)
gggagacccgugacccggaaguuguacggcuacgcgacuuucccucccacaaacccucgcgcccuuccuuuccuacuugggcccggcagaaagcuuaccauggagcugcugauccugaaggccaacgccaucaccaccauccugaccgccgugaccuucugcuucgccagcggccagaacaucaccgaggaguucuaccagagcaccugcagcgccgugagcaagggcuaccugagcgcccugagaaccggcugguacaccagcgugaucaccaucgagcugagcaacaucaaggagaacaagugcaacggcaccgacgccaaggugaagcugaucaagcaggagcuggacaaguacaagaacgccgugaccgagcugcagcugcugaugcagagcacccccgccaccggcagcggcagcgccaucgccagcggcguggccgugugcaaggugcugcaccuggagggcgaggugaacaagaucaagagcgcccugcugagcaccaacaaggccguggugagccugagcaacggcgugagcgugcugaccuucaaggugcuggaccugaagaacuacaucgacaagcagcugcugcccauccugaacaagcagagcugcagcaucagcaacaucgagaccgugaucgaguuccagcagaagaacaacagacugcuggagaucaccagagaguucagcgugaacgccggcgugaccacccccgugagcaccuacaugcugaccaacagcgagcugcugagccugaucaacgacaugcccaucaccaacgaccagaagaagcugaugagcaacaacgugcagaucgugagacagcagagcuacagcaucaugugcaucaucaaggaggaggugcuggccuacguggugcagcugccccuguacggcgugaucgacacccccugcuggaagcugcacaccagcccccugugcaccaccaacaccaaggagggcagcaacaucugccugaccagaaccgacagaggcugguacugcgacaacgccggcagcgugagcuucuucccccaggccgagaccugcaaggugcagagcaacagaguguucugcgacaccaugaacagcagaacccugcccagcgaggugaaccugugcaacguggacaucuucaaccccaaguacgacugcaagaucaugaccagcaagaccgacgugagcagcagcgugaucaccagccugggcgccaucgugagcugcuacggcaagaccaagugcaccgccagcaacaagaacagaggcaucaucaagaccuucagcaacggcugcgacuacgugagcaacaagggcguggacaccgugagcgugggcaacacccuguacuacgugaacaagcaggagggcaagagccuguacgugaagggcgagcccaucaucaacuucuacgacccccugguguuccccagcgacgaguucgacgccagcaucagccaggugaacgagaagaucaaccagagccuggccuucaucagaaagagcgacgagcugcugcacaacgugaacgccggcaagagcaccaccaacaucaugaucaccaccaucaucaucgugaucaucgugauccugcugagccugaucgccgugggccugcugcuguacugcaaggccagaagcacccccgugacccugagcaaggaccagcugagcggcaucaacaacaucgccuucagcaacugaggacuaguaauaaggaaacuguaugaaugucugugggcaggaagugaagagauccuucuguaaagguuuuuggaauuaugucugcugaauaauaaacuuuuuugaaauaauaaaucugguagaaaaaugagaucuaaaaaaaaaaaaaaaaaaaaaaaaaaaaaaaaaaaaaaaaaaaaaaaaaaaaaaaaaaaaaaaaugcaucccccccccccccccccccccccccccccccaaaggcucuuuucagagccaccagaauu

SEQ ID NO: 4144 - RNA, 1970 nt, Artificial Sequence
  mRNA product Design g-5 comprising derived and/or modified sequence from HRSV(A2)__F_DSCav1_mut0 (opt5)
gggagacccgugacccggaaguuguacggcuacgcgacuuucccucccacaaacccucgcgcccuuccuuuccuacuugggcccggcagaaagcuuaccauggagcugcucauccugaaggccaacgcuauuaccacaauccuuacggccgugaccuucugcuuugcgagcggccagaauauuacagaagaguucuaccaauccaccuguucugcugucagcaaaggguaucuguccgcccucagaacaggaugguacaccucuguuaucacaauugaacugagcaacaucaaggagaauaaaugcaacggcaccgacgccaaggugaaacuuaucaagcaggaacuggauaaguauaaaaaugcugugacggagcuccagcugcugaugcaguccacccccgccacagggucuggaagcgcuauugccuccggcgucgcgguguguaagguucuccaccuggagggggaagugaacaaaaucaagagcgcccuucugucuaccaauaaagcugucgugucccucagcaacggaguuucugugcugacauuuaagguccuugaccugaagaauuacauugauaaacaacuccugccuauccugaacaagcaguccugcagcauuucuaauaucgagaccgugauugaguuccagcagaaaaacaaucggcuccuggaaaucacgcgcgaguuuuccgugaacgccggcgucacaaccccgguuagcacauauaugcuuaccaauuccgaacugcucucucugaucaacgacaugcccauuaccaacgaucaaaagaaacuuaugagcaauaacgugcagaucgugagacagcaguccuacagcauuauguguaucauuaaggaggaaguccuggcuuaugugguucaacucccucuguacggcgugaucgacacacccugcuggaaacugcauacgucuccucucuguaccacaaauaccaaggagggguccaacaucugccugacacggaccgaucgcggaugguacugugacaaugccggcagcgucucuuucuuuccccaggcggaaacgugcaaggugcagagcaacagaguuuucugugauacaaugaacuccagaacccugccuucugaggugaaucucugcaaugucgacauuuuuaacccgaaauaugauugcaagaucaugaccagcaaaacagacguguccagcucugucauuaccucccugggggccaucgugagcuguuacggaaagacaaaaugcacggcuucuaauaagaaccggggcauuaucaagaccuucuccaaugggugugauuauguuagcaacaaaggaguggacacagucuccgugggcaauacccuuuacuauguuaacaagcaagagggcaaaucucuguacgugaagggggaacccaucauuaacuuuuaugacccucucgucuuccccagcgaugaguuugacgccuccaucucucaggugaaugagaaaauuaaccagagccuggcuuucauccgcaaguccgaugaacugcuccacaaugugaacgccggaaagagcacaaccaauauuaugaucacgaccauuaucaucguuauuaucgucauucugcuuucucugaucgccgugggccuccugcuguacugcaaagcuagauccacaccugugacccuuagcaaggaccagcucucugggauuaacaauaucgcguucuccaacugaggacuaguaauaaggaaacuguaugaaugucugugggcaggaagugaagagauccuucuguaaagguuuuuggaauuaugucugcugaauaauaaacuuuuuugaaauaauaaaucugguagaaaaaugagaucuaaaaaaaaaaaaaaaaaaaaaaaaaaaaaaaaaaaaaaaaaaaaaaaaaaaaaaaaaaaaaaaaugcaucccccccccccccccccccccccccccccccaaaggcucuuuucagagccaccagaauu

SEQ ID NO: 4145 - RNA, 1970 nt, Artificial Sequence
  mRNA product Design g-5 comprising derived and/or modified sequence from HRSV(A2)__F_DSCav1_mut0 (opt6)
gggagacccgugacccggaaguuguacggcuacgcgacuuucccucccacaaacccucgcgcccuuccuuuccuacuugggcccggcagaaagcuuaccauggaacuacuaauacuaaaagccaaugcaauaacaaccauacuaaccgccguaacauuuuguuucgcaucaggucaaaacauaaccgaagaauuuuaucaaucaacaugcucagcaguaucaaaaggauacuuauccgcucuaagaacaggaugguacacaaguguaauuacaauagagcucucaaacauaaaagaaaacaaaugcaauggaacugacgcaaaaguuaaacuuauaaaacaagaacuagauaaauauaaaaaugcaguaaccgaauuacaacuccuaaugcaauccacaccugcuaccgguuccggaucagccauagcaucuggaguagccguaugcaaaguccuccaccuagaaggagaaguaaauaaaaucaaaucagcacuauuaucuaccaauaaagcaguugucucacuauccaauggcguaucaguacuaacauucaaaguauuagaccuuaaaaacuacauagacaaacaacuauuaccaauucugaacaaacaauccuguucaauaucaaacaucgaaacgguaauagaauuucaacaaaaaaauaacagauuacuugaaauaacaagagaauuuucaguaaaugcaggaguuacaacacccgucuccaccuacaugcucacaaauucagaauuauuaucacuuauaaacgacaugccaauaacuaacgaccaaaaaaaacuaaugucaaacaauguccaaauaguccgacaacaauccuacucaauaaugugcauuauaaaagaagaaguccuagccuacguuguccaacuacccuuauauggaguaauagauaccccaugcuggaaacuucauaccuccccccuaugcacaacaaacacaaaagaaggcucaaacaucugcuuaacacguacagaccgagguugguacugugauaacgcaggauccguaucauuuuucccacaagcagaaacaugcaaaguacaaucaaaccgcguuuuuugugacaccaugaacagcagaacccucccuucagaaguaaaccuaugcaacgucgauauauuuaacccaaaauacgauugcaaaauaaugacaucaaaaaccgaugucucaucuucaguaauaaccucucuaggagcaauagucucauguuacggaaaaacaaaaugcacagcaaguaauaaaaauagaggaauaauaaaaacauucucuaauggcugcgacuacguauccaauaaaggcguugacacaguauccguaggcaacacacucuacuauguuaacaaacaagaaggaaaaaguuuauacguuaaaggagaaccaauuauaaacuuuuacgacccacucguauucccaucugaugaauuugacgcaucaaucucacaaguaaaugaaaaaaucaaucagucccuugccuuuauaagaaaaucagaugaacuuuuacacaacguuaacgccggaaaaucaacaaccaauauaaugaucacaaccauaauaauaguuauaauuguaauuuuauuauccuuaauagccgucggacuacuacuauacugcaaagcaagaucuacacccguaacccuaucaaaagaccaacuaaguggaauaaauaacauugcauucucaaauuaaggacuaguaauaaggaaacuguaugaaugucugugggcaggaagugaagagauccuucuguaaagguuuuuggaauuaugucugcugaauaauaaacuuuuuugaaauaauaaaucugguagaaaaaugagaucuaaaaaaaaaaaaaaaaaaaaaaaaaaaaaaaaaaaaaaaaaaaaaaaaaaaaaaaaaaaaaaaaugcaucccccccccccccccccccccccccccccccaaaggcucuuuucagagccaccagaauu

SEQ ID NO: 4146 - RNA, 1970 nt, Artificial Sequence
  mRNA product Design g-5 comprising derived and/or modified sequence from HRSV(A2)__F_DSCav1_mut0 (opt11)
gggagacccgugacccggaaguuguacggcuacgcgacuuucccucccacaaacccucgcgcccuuccuuuccuacuugggcccggcagaaagcuuaccauggaacuccuaauacuaaaggcaaacgcaaucacuacaauucuaaccgccgugacauucugcuucgccuccggacaaaacaucaccgaagaauuuuaccaauccacaugcucggccgucaguaaaggcuaccucucggcucuccgaaccggcugguacaccuccgucaucaccaucgaacucuccaacaucaaagaaaacaaaugcaacggcaccgacgccaaagucaaacuaaucaaacaagaacucgacaaauacaaaaacgccgucacagaacuccaacuacuaaugcaaucaacacccgcuacaggaagcggcuccgccaucgccagcggcguagcugucugcaaaguccuccaccucgaaggugaagucaacaaaaucaaaucagcccuacucagcacaaacaaagccguuguaagccuauccaacggcgucuccguacuaacauucaaaguccuugaccucaagaacuacaucgacaaacaacuucucccaauccuaaacaaacaaagcugcucaauuuccaacaucgaaacaguaaucgaauuucaacaaaaaaacaaccgacuccucgaaaucacccgcgaauuuuccguuaacgccggcguuacaacccccgucuccaccuacaugcucaccaauuccgaacuacuaucacucauaaacgacaugccuaucacaaacgaccaaaaaaaacuaaugucaaacaauguccaaaucguccgccagcaaagcuauuccaucaugugcaucaucaaagaggaaguccucgccuacguaguccaacugccccucuacggcgucauugauacccccugcuggaaacuccacaccuccccccucugcaccacaaacaccaaagaagguuccaacaucugccuaacacgaaccgacagaggcugguacugcgacaacgccggcagcgucuccuucuucccccaagcagaaaccuguaaaguccagucuaaccgcgucuucugcgacacaaugaacucaagaacccuaccuuccgaaguaaaccucugcaacguagacaucuucaacccuaaauacgacugcaaaaucaugacuucaaaaacagacguaagcucuuccguaaucacuucccucggcgccaucguauccugcuacgguaaaaccaaaugcaccgccuccaacaaaaaccgagggaucauaaaaaccuucuccaacggcugcgacuacguaucuaacaaaggcgucgacaccgucuccgucggcaacacccucuauuacguaaacaaacaagagggcaaaucacuauacgucaaaggcgagccaaucauaaacuucuaugacccacucgucuucccuucagacgaauuugaugccagcaucagccaagucaacgaaaaaaucaaccaaucacucgccuucauccgcaaaagcgacgaacuccuucacaacgucaacgcaggcaaaucaaccaccaacaucaugaucaccaccaucaucaucgucaucaucguuauccuacucagccucaucgcaguuggucuucuccuuuacugcaaagcccgcuccacccccgucacccucaguaaagaccaacucagcggaaucaacaacauagcauucuccaacuaaggacuaguaauaaggaaacuguaugaaugucugugggcaggaagugaagagauccuucuguaaagguuuuuggaauuaugucugcugaauaauaaacuuuuuugaaauaauaaaucugguagaaaaaugagaucuaaaaaaaaaaaaaaaaaaaaaaaaaaaaaaaaaaaaaaaaaaaaaaaaaaaaaaaaaaaaaaaaugcaucccccccccccccccccccccccccccccccaaaggcucuuuucagagccaccagaauu

SEQ ID NO: 4147 - RNA, 1986 nt, Artificial Sequence
  mRNA product Design h-1 comprising derived and/or modified sequence from HRSV(A2)__F_DSCav1_mut0 (opt1)
gggagacccgugacccggaaguuguacggcuacgcgacuuucccucccacaaacccucgcgcccuuccuuuccuacuugggcccggcagaaagcuuaccauggagcugcucauccugaaggccaacgccaucaccaccauccugacggcggugaccuucugcuucgccagcggccagaacaucaccgaggaguucuaccaguccacgugcagcgccgucuccaagggguaccucagcgcccugcggaccggcugguacaccuccgugaucaccaucgagcugagcaacaucaaggagaacaagugcaacgggaccgacgccaaggugaagcucaucaagcaggagcuggacaaguacaagaacgcggucacggagcugcagcuccugaugcaguccaccccggcaaccggcuccggcuccgccaucgcgagcggcgucgccgugugcaaggugcugcaccucgagggggaggucaacaagaucaagagcgcccugcuguccaccaacaaggccguggugagccucuccaacggcgucagcgugcugaccuucaaggugcuggaccucaagaacuacaucgacaagcagcugcugcccauccugaacaagcagagcugcuccaucagcaacaucgagacggugaucgaguuccagcagaagaacaaccggcuccuggagaucacccgcgaguucagcgugaacgccggggucaccacccccguguccacguacaugcugaccaacagcgagcuccugucccugaucaacgacaugccgaucaccaacgaccagaagaagcucaugagcaacaacgugcagaucguccggcagcaguccuacagcaucaugugcaucaucaaggaggaggugcuggcguacgugguccagcugccccucuacggcgugaucgacacccccugcuggaagcugcacacgagcccccugugcaccaccaacaccaaggagggguccaacaucugccucacgcgcaccgaccggggcugguacugcgacaacgccggcagcgucuccuucuucccgcaggccgagaccugcaaggugcagagcaaccgcguguucugcgacaccaugaacucccggacgcugcccagcgagguaaaccucugcaacgucgacaucuucaaccccaaguacgacugcaagaucaugaccuccaagaccgacgugagcuccagcgugaucaccucccugggggccaucgucagcugcuacggcaagacgaagugcaccgccagcaacaagaaccgggggaucaucaagaccuucuccaacggcugcgacuacgugagcaacaagggcguggacaccguguccgucgggaacacccuguacuacgugaacaagcaggagggcaagagccucuacgugaagggggagcccaucaucaacuucuacgacccgcuggucuuccccuccgacgaguucgacgcgagcaucucccaggugaacgagaagaucaaccagagccuggccuucauccgcaaguccgacgagcugcuccacaacgugaacgccggcaagagcacgaccaacaucaugaucaccaccaucaucaucgucaucaucgugauccugcugucccucaucgccguggggcugcugcucuacugcaaggcccggagcacgcccgucacccuguccaaggaccagcugagcggcaucaacaacaucgcguucuccaacugaggacuaguacuggcugcaucucccuuuccucuguccuccauccuucucccaggauggugaagggggaccugguacccagugauccccaccccaggauccuaaaucaugacuuaccugcuaauaaaaacucauuggaaaagugagaagaucuaaaaaaaaaaaaaaaaaaaaaaaaaaaaaaaaaaaaaaaaaaaaaaaaaaaaaaaaaaaaaaaaugcaucccccccccccccccccccccccccccccccaaaggcucuuuucagagccaccagaauu

SEQ ID NO: 4148 - RNA, 1986 nt, Artificial Sequence
  mRNA product Design h-1 comprising derived and/or modified sequence from HRSV(A2)__F_DSCav1_mut0 (opt1)
gggagacccgugacccggaaguuguacggcuacgcgacuuucccucccacaaacccucgcgcccuuccuuuccuacuugggcccggcagaaagcuuaccauggagcugcucauccugaaggccaacgccaucaccaccauccugacggcggugaccuucugcuucgccagcggccagaacaucaccgaggaguucuaccaguccacgugcagcgccgucuccaagggguaccucagcgcccugcgcaccggcugguacaccuccgugaucaccaucgagcugagcaacaucaaggagaacaagugcaacgggaccgacgccaaggugaagcucaucaagcaggagcuggacaaguacaagaacgcggucacggagcugcagcuccugaugcaguccacccccgccaccggcagcggguccgccaucgccagcggcguggcggugugcaagguccugcaccucgagggcgaggugaacaagaucaaguccgcccugcugagcaccaacaaggccguggucucccucagcaacgggguguccgugcugacguucaagguccuggaccucaagaacuacaucgacaagcagcugcugccgauccucaacaagcagagcugcuccaucagcaacaucgagaccgugaucgaguuccagcagaagaacaaccggcugcuggagaucacccgcgaguucuccgugaacgccggcgucaccacgcccgugagcaccuacaugcucaccaacagcgagcugcugucccucaucaacgacaugcccaucaccaacgaccagaagaagcugaugagcaacaacgugcagaucguccggcagcaguccuacagcaucaugugcaucaucaaggaggaggugcuggccuacgugguccagcucccccuguacggggugaucgacacgccgugcuggaagcugcacaccagcccccucugcaccaccaacacgaaggagggcuccaacaucugccugacccgcaccgaccgggggugguacugcgacaacgcgggcuccgugagcuucuucccccaggccgagaccugcaagguccaguccaaccgcguguucugcgacacgaugaacagccggacccuccccuccgaggucaaccugugcaacguggacaucuucaacccgaaguacgacugcaagaucaugaccagcaagaccgacguguccagcuccgucaucacgagccugggcgccaucguguccugcuacgggaagaccaagugcaccgccagcaacaagaaccggggcaucaucaagaccuucuccaacgggugcgacuacgugagcaacaagggcgucgacacggugagcgugggcaacacccucuacuacgucaacaagcaggaggggaagucccuguacgugaagggcgagcccaucaucaacuucuacgacccccugguguuccccagcgacgaguucgacgccuccaucagccaggucaacgagaagaucaaccagucccucgcguucauccgcaagagcgacgagcugcugcacaacgugaacgccgggaaguccaccaccaacaucaugaucaccacgaucaucaucgugaucaucgucauccuccugagccugaucgccgugggccuccugcuguacugcaaggcccgguccaccccggugacccugagcaaggaccagcucuccgggaucaacaacaucgccuucagcaacugaggacuaguacuggcugcaucucccuuuccucuguccuccauccuucucccaggauggugaagggggaccugguacccagugauccccaccccaggauccuaaaucaugacuuaccugcuaauaaaaacucauuggaaaagugagaagaucuaaaaaaaaaaaaaaaaaaaaaaaaaaaaaaaaaaaaaaaaaaaaaaaaaaaaaaaaaaaaaaaaugcaucccccccccccccccccccccccccccccccaaaggcucuuuucagagccaccagaauu

SEQ ID NO: 4149 - RNA, 1986 nt, Artificial Sequence
  mRNA product Design h-1 comprising derived and/or modified sequence from HRSV(A2)__F_DSCav1_mut0 (opt2)
gggagacccgugacccggaaguuguacggcuacgcgacuuucccucccacaaacccucgcgcccuuccuuuccuacuugggcccggcagaaagcuuaccauggagcuccucauccucaaggccaacgccaucaccaccauccucaccgccgucaccuucugcuucgccuccggccagaacaucaccgaggaguucuaccaguccaccugcuccgccgucuccaagggcuaccucuccgcccuccgcaccggcugguacaccuccgucaucaccaucgagcucuccaacaucaaggagaacaagugcaacggcaccgacgccaaggucaagcucaucaagcaggagcucgacaaguacaagaacgccgucaccgagcuccagcuccucaugcaguccacccccgccaccggcuccggcuccgccaucgccuccggcgucgccgucugcaagguccuccaccucgagggcgaggucaacaagaucaaguccgcccuccucuccaccaacaaggccgucgucucccucuccaacggcgucuccguccucaccuucaagguccucgaccucaagaacuacaucgacaagcagcuccuccccauccucaacaagcaguccugcuccaucuccaacaucgagaccgucaucgaguuccagcagaagaacaaccgccuccucgagaucacccgcgaguucuccgucaacgccggcgucaccacccccgucuccaccuacaugcucaccaacuccgagcuccucucccucaucaacgacaugcccaucaccaacgaccagaagaagcucauguccaacaacguccagaucguccgccagcaguccuacuccaucaugugcaucaucaaggaggagguccucgccuacgucguccagcucccccucuacggcgucaucgacacccccugcuggaagcuccacaccuccccccucugcaccaccaacaccaaggagggcuccaacaucugccucacccgcaccgaccgcggcugguacugcgacaacgccggcuccgucuccuucuucccccaggccgagaccugcaagguccaguccaaccgcgucuucugcgacaccaugaacucccgcacccuccccuccgaggucaaccucugcaacgucgacaucuucaaccccaaguacgacugcaagaucaugaccuccaagaccgacgucuccuccuccgucaucaccucccucggcgccaucgucuccugcuacggcaagaccaagugcaccgccuccaacaagaaccgcggcaucaucaagaccuucuccaacggcugcgacuacgucuccaacaagggcgucgacaccgucuccgucggcaacacccucuacuacgucaacaagcaggagggcaagucccucuacgucaagggcgagcccaucaucaacuucuacgacccccucgucuuccccuccgacgaguucgacgccuccaucucccaggucaacgagaagaucaaccagucccucgccuucauccgcaaguccgacgagcuccuccacaacgucaacgccggcaaguccaccaccaacaucaugaucaccaccaucaucaucgucaucaucgucauccuccucucccucaucgccgucggccuccuccucuacugcaaggcccgcuccacccccgucacccucuccaaggaccagcucuccggcaucaacaacaucgccuucuccaacugaggacuaguacuggcugcaucucccuuuccucuguccuccauccuucucccaggauggugaagggggaccugguacccagugauccccaccccaggauccuaaaucaugacuuaccugcuaauaaaaacucauuggaaaagugagaagaucuaaaaaaaaaaaaaaaaaaaaaaaaaaaaaaaaaaaaaaaaaaaaaaaaaaaaaaaaaaaaaaaaugcaucccccccccccccccccccccccccccccccaaaggcucuuuucagagccaccagaauu

SEQ ID NO: 4150 - RNA, 1986 nt, Artificial Sequence
  mRNA product Design h-1 comprising derived and/or modified sequence from HRSV(A2)__F_DSCav1_mut0 (opt3)
gggagacccgugacccggaaguuguacggcuacgcgacuuucccucccacaaacccucgcgcccuuccuuuccuacuugggcccggcagaaagcuuaccauggagcugcucauccuuaaggccaacgcuauuaccacaauacugacugcagugacguucugcuuugccagcggccagaauaucaccgaagaguucuaccaauccacauguucugcggucucaaaaggguauuugagugcuuuaagaacuggaugguacaccagcguuauuacaaucgaacuguccaacauuaaggagaauaaaugcaacgguaccgacgccaaggugaaacuaaucaagcaggaacucgauaaguauaaaaaugcaguaacugagcugcagcuucugaugcagucuacacccgccaccggcucggggucagcuauagcaagcggaguggccgucuguaagguguugcaccucgagggcgaaguuaacaaaaucaagagugcucugcuguccacgaauaaagccguggucucucucagcaacgguguguccguauuaacuuuuaagguucuggaccuuaagaauuacauugauaaacaauugcugccuauccuaaacaagcagucaugcaguauuagcaauaucgagaccgugauagaguuccagcagaaaaacaauaggcuccuggaaauuacacgggaguuuucugucaacgcgggggugacuaccccaguguccacauauaugcuuaccaauucagaacuguugagccucaucaacgacaugccgauuacgaacgaucaaaagaaacugaugaguaauaacguccagaucguucgccagcagucuuacuccaucauguguauuauaaaggaggaaguguuagcauauguagugcaacugccccucuacggagucaucgacacuccuugcuggaaacuucauacaagcccacuguguaccacuaauacaaaggagggcucgaacauuugcuugacccgaacggaucguggcugguacugugacaaugccgggucuguguccuucuuuccccaggcugaaaccugcaagguucagucaaacagaguguucugugauacaaugaauaguagaacucugccuagcgaggucaaccucugcaauguggacaucuuuaacccaaaauaugauugcaagauaaugaccuccaaaacagacguaucuagcucaguuauuaccagucugggagccaucguguccuguuacgguaagacuaaaugcacagcaagcaauaagaacaggggcaucauuaagaccuucucuaaugggugugauuaugucucaaacaaaggaguggacacugucagugugggcaauacgcuuuacuauguuaacaagcaagaggguaaaagccuguacgugaagggggaacccaucauuaacuuuuaugacccuuugguauucccauccgaugaguuugacgcuucuauaucgcaggucaaugagaaaaucaaccagagccucgccuucauucggaaguccgaugaacuguuacacaaugugaacgcgggaaagucaacaaccaauaucaugaucacuaccauuauaaucguuauuaucgugauucugcuaagucucaucgccgucggccugcuuuuguacugcaaagcacgcucuacaccggugacccugagcaaggaccagcucuccggcauaaacaauaucgcuuucucaaacugaggacuaguacuggcugcaucucccuuuccucuguccuccauccuucucccaggauggugaagggggaccugguacccagugauccccaccccaggauccuaaaucaugacuuaccugcuaauaaaaacucauuggaaaagugagaagaucuaaaaaaaaaaaaaaaaaaaaaaaaaaaaaaaaaaaaaaaaaaaaaaaaaaaaaaaaaaaaaaaaugcaucccccccccccccccccccccccccccccccaaaggcucuuuucagagccaccagaauu

SEQ ID NO: 4151 - RNA, 1986 nt, Artificial Sequence
  mRNA product Design h-1 comprising derived and/or modified sequence from HRSV(A2)__F_DSCav1_mut0 (opt4)
gggagacccgugacccggaaguuguacggcuacgcgacuuucccucccacaaacccucgcgcccuuccuuuccuacuugggcccggcagaaagcuuaccauggagcugcugauccugaaggccaacgccaucaccaccauccugaccgccgugaccuucugcuucgccagcggccagaacaucaccgaggaguucuaccagagcaccugcagcgccgugagcaagggcuaccugagcgcccugagaaccggcugguacaccagcgugaucaccaucgagcugagcaacaucaaggagaacaagugcaacggcaccgacgccaaggugaagcugaucaagcaggagcuggacaaguacaagaacgccgugaccgagcugcagcugcugaugcagagcacccccgccaccggcagcggcagcgccaucgccagcggcguggccgugugcaaggugcugcaccuggagggcgaggugaacaagaucaagagcgcccugcugagcaccaacaaggccguggugagccugagcaacggcgugagcgugcugaccuucaaggugcuggaccugaagaacuacaucgacaagcagcugcugcccauccugaacaagcagagcugcagcaucagcaacaucgagaccgugaucgaguuccagcagaagaacaacagacugcuggagaucaccagagaguucagcgugaacgccggcgugaccacccccgugagcaccuacaugcugaccaacagcgagcugcugagccugaucaacgacaugcccaucaccaacgaccagaagaagcugaugagcaacaacgugcagaucgugagacagcagagcuacagcaucaugugcaucaucaaggaggaggugcuggccuacguggugcagcugccccuguacggcgugaucgacacccccugcuggaagcugcacaccagcccccugugcaccaccaacaccaaggagggcagcaacaucugccugaccagaaccgacagaggcugguacugcgacaacgccggcagcgugagcuucuucccccaggccgagaccugcaaggugcagagcaacagaguguucugcgacaccaugaacagcagaacccugcccagcgaggugaaccugugcaacguggacaucuucaaccccaaguacgacugcaagaucaugaccagcaagaccgacgugagcagcagcgugaucaccagccugggcgccaucgugagcugcuacggcaagaccaagugcaccgccagcaacaagaacagaggcaucaucaagaccuucagcaacggcugcgacuacgugagcaacaagggcguggacaccgugagcgugggcaacacccuguacuacgugaacaagcaggagggcaagagccuguacgugaagggcgagcccaucaucaacuucuacgacccccugguguuccccagcgacgaguucgacgccagcaucagccaggugaacgagaagaucaaccagagccuggccuucaucagaaagagcgacgagcugcugcacaacgugaacgccggcaagagcaccaccaacaucaugaucaccaccaucaucaucgugaucaucgugauccugcugagccugaucgccgugggccugcugcuguacugcaaggccagaagcacccccgugacccugagcaaggaccagcugagcggcaucaacaacaucgccuucagcaacugaggacuaguacuggcugcaucucccuuuccucuguccuccauccuucucccaggauggugaagggggaccugguacccagugauccccaccccaggauccuaaaucaugacuuaccugcuaauaaaaacucauuggaaaagugagaagaucuaaaaaaaaaaaaaaaaaaaaaaaaaaaaaaaaaaaaaaaaaaaaaaaaaaaaaaaaaaaaaaaaugcaucccccccccccccccccccccccccccccccaaaggcucuuuucagagccaccagaauu

SEQ ID NO: 4152 - RNA, 1986 nt, Artificial Sequence
  mRNA product Design h-1 comprising derived and/or modified sequence from HRSV(A2)__F_DSCav1_mut0 (opt5)
gggagacccgugacccggaaguuguacggcuacgcgacuuucccucccacaaacccucgcgcccuuccuuuccuacuugggcccggcagaaagcuuaccauggagcugcucauccugaaggccaacgcuauuaccacaauccuuacggccgugaccuucugcuuugcgagcggccagaauauuacagaagaguucuaccaauccaccuguucugcugucagcaaaggguaucuguccgcccucagaacaggaugguacaccucuguuaucacaauugaacugagcaacaucaaggagaauaaaugcaacggcaccgacgccaaggugaaacuuaucaagcaggaacuggauaaguauaaaaaugcugugacggagcuccagcugcugaugcaguccacccccgccacagggucuggaagcgcuauugccuccggcgucgcgguguguaagguucuccaccuggagggggaagugaacaaaaucaagagcgcccuucugucuaccaauaaagcugucgugucccucagcaacggaguuucugugcugacauuuaagguccuugaccugaagaauuacauugauaaacaacuccugccuauccugaacaagcaguccugcagcauuucuaauaucgagaccgugauugaguuccagcagaaaaacaaucggcuccuggaaaucacgcgcgaguuuuccgugaacgccggcgucacaaccccgguuagcacauauaugcuuaccaauuccgaacugcucucucugaucaacgacaugcccauuaccaacgaucaaaagaaacuuaugagcaauaacgugcagaucgugagacagcaguccuacagcauuauguguaucauuaaggaggaaguccuggcuuaugugguucaacucccucuguacggcgugaucgacacacccugcuggaaacugcauacgucuccucucuguaccacaaauaccaaggagggguccaacaucugccugacacggaccgaucgcggaugguacugugacaaugccggcagcgucucuuucuuuccccaggcggaaacgugcaaggugcagagcaacagaguuuucugugauacaaugaacuccagaacccugccuucugaggugaaucucugcaaugucgacauuuuuaacccgaaauaugauugcaagaucaugaccagcaaaacagacguguccagcucugucauuaccucccugggggccaucgugagcuguuacggaaagacaaaaugcacggcuucuaauaagaaccggggcauuaucaagaccuucuccaaugggugugauuauguuagcaacaaaggaguggacacagucuccgugggcaauacccuuuacuauguuaacaagcaagagggcaaaucucuguacgugaagggggaacccaucauuaacuuuuaugacccucucgucuuccccagcgaugaguuugacgccuccaucucucaggugaaugagaaaauuaaccagagccuggcuuucauccgcaaguccgaugaacugcuccacaaugugaacgccggaaagagcacaaccaauauuaugaucacgaccauuaucaucguuauuaucgucauucugcuuucucugaucgccgugggccuccugcuguacugcaaagcuagauccacaccugugacccuuagcaaggaccagcucucugggauuaacaauaucgcguucuccaacugaggacuaguacuggcugcaucucccuuuccucuguccuccauccuucucccaggauggugaagggggaccugguacccagugauccccaccccaggauccuaaaucaugacuuaccugcuaauaaaaacucauuggaaaagugagaagaucuaaaaaaaaaaaaaaaaaaaaaaaaaaaaaaaaaaaaaaaaaaaaaaaaaaaaaaaaaaaaaaaaugcaucccccccccccccccccccccccccccccccaaaggcucuuuucagagccaccagaauu

SEQ ID NO: 4153 - RNA, 1986 nt, Artificial Sequence
  mRNA product Design h-1 comprising derived and/or modified sequence from HRSV(A2)__F_DSCav1_mut0 (opt6)
gggagacccgugacccggaaguuguacggcuacgcgacuuucccucccacaaacccucgcgcccuuccuuuccuacuugggcccggcagaaagcuuaccauggaacuacuaauacuaaaagccaaugcaauaacaaccauacuaaccgccguaacauuuuguuucgcaucaggucaaaacauaaccgaagaauuuuaucaaucaacaugcucagcaguaucaaaaggauacuuauccgcucuaagaacaggaugguacacaaguguaauuacaauagagcucucaaacauaaaagaaaacaaaugcaauggaacugacgcaaaaguuaaacuuauaaaacaagaacuagauaaauauaaaaaugcaguaaccgaauuacaacuccuaaugcaauccacaccugcuaccgguuccggaucagccauagcaucuggaguagccguaugcaaaguccuccaccuagaaggagaaguaaauaaaaucaaaucagcacuauuaucuaccaauaaagcaguugucucacuauccaauggcguaucaguacuaacauucaaaguauuagaccuuaaaaacuacauagacaaacaacuauuaccaauucugaacaaacaauccuguucaauaucaaacaucgaaacgguaauagaauuucaacaaaaaaauaacagauuacuugaaauaacaagagaauuuucaguaaaugcaggaguuacaacacccgucuccaccuacaugcucacaaauucagaauuauuaucacuuauaaacgacaugccaauaacuaacgaccaaaaaaaacuaaugucaaacaauguccaaauaguccgacaacaauccuacucaauaaugugcauuauaaaagaagaaguccuagccuacguuguccaacuacccuuauauggaguaauagauaccccaugcuggaaacuucauaccuccccccuaugcacaacaaacacaaaagaaggcucaaacaucugcuuaacacguacagaccgagguugguacugugauaacgcaggauccguaucauuuuucccacaagcagaaacaugcaaaguacaaucaaaccgcguuuuuugugacaccaugaacagcagaacccucccuucagaaguaaaccuaugcaacgucgauauauuuaacccaaaauacgauugcaaaauaaugacaucaaaaaccgaugucucaucuucaguaauaaccucucuaggagcaauagucucauguuacggaaaaacaaaaugcacagcaaguaauaaaaauagaggaauaauaaaaacauucucuaauggcugcgacuacguauccaauaaaggcguugacacaguauccguaggcaacacacucuacuauguuaacaaacaagaaggaaaaaguuuauacguuaaaggagaaccaauuauaaacuuuuacgacccacucguauucccaucugaugaauuugacgcaucaaucucacaaguaaaugaaaaaaucaaucagucccuugccuuuauaagaaaaucagaugaacuuuuacacaacguuaacgccggaaaaucaacaaccaauauaaugaucacaaccauaauaauaguuauaauuguaauuuuauuauccuuaauagccgucggacuacuacuauacugcaaagcaagaucuacacccguaacccuaucaaaagaccaacuaaguggaauaaauaacauugcauucucaaauuaaggacuaguacuggcugcaucucccuuuccucuguccuccauccuucucccaggauggugaagggggaccugguacccagugauccccaccccaggauccuaaaucaugacuuaccugcuaauaaaaacucauuggaaaagugagaagaucuaaaaaaaaaaaaaaaaaaaaaaaaaaaaaaaaaaaaaaaaaaaaaaaaaaaaaaaaaaaaaaaaugcaucccccccccccccccccccccccccccccccaaaggcucuuuucagagccaccagaauu

SEQ ID NO: 4154 - RNA, 1986 nt, Artificial Sequence
  mRNA product Design h-1 comprising derived and/or modified sequence from HRSV(A2)__F_DSCav1_mut0 (opt11)
gggagacccgugacccggaaguuguacggcuacgcgacuuucccucccacaaacccucgcgcccuuccuuuccuacuugggcccggcagaaagcuuaccauggaacuccuaauacuaaaggcaaacgcaaucacuacaauucuaaccgccgugacauucugcuucgccuccggacaaaacaucaccgaagaauuuuaccaauccacaugcucggccgucaguaaaggcuaccucucggcucuccgaaccggcugguacaccuccgucaucaccaucgaacucuccaacaucaaagaaaacaaaugcaacggcaccgacgccaaagucaaacuaaucaaacaagaacucgacaaauacaaaaacgccgucacagaacuccaacuacuaaugcaaucaacacccgcuacaggaagcggcuccgccaucgccagcggcguagcugucugcaaaguccuccaccucgaaggugaagucaacaaaaucaaaucagcccuacucagcacaaacaaagccguuguaagccuauccaacggcgucuccguacuaacauucaaaguccuugaccucaagaacuacaucgacaaacaacuucucccaauccuaaacaaacaaagcugcucaauuuccaacaucgaaacaguaaucgaauuucaacaaaaaaacaaccgacuccucgaaaucacccgcgaauuuuccguuaacgccggcguuacaacccccgucuccaccuacaugcucaccaauuccgaacuacuaucacucauaaacgacaugccuaucacaaacgaccaaaaaaaacuaaugucaaacaauguccaaaucguccgccagcaaagcuauuccaucaugugcaucaucaaagaggaaguccucgccuacguaguccaacugccccucuacggcgucauugauacccccugcuggaaacuccacaccuccccccucugcaccacaaacaccaaagaagguuccaacaucugccuaacacgaaccgacagaggcugguacugcgacaacgccggcagcgucuccuucuucccccaagcagaaaccuguaaaguccagucuaaccgcgucuucugcgacacaaugaacucaagaacccuaccuuccgaaguaaaccucugcaacguagacaucuucaacccuaaauacgacugcaaaaucaugacuucaaaaacagacguaagcucuuccguaaucacuucccucggcgccaucguauccugcuacgguaaaaccaaaugcaccgccuccaacaaaaaccgagggaucauaaaaaccuucuccaacggcugcgacuacguaucuaacaaaggcgucgacaccgucuccgucggcaacacccucuauuacguaaacaaacaagagggcaaaucacuauacgucaaaggcgagccaaucauaaacuucuaugacccacucgucuucccuucagacgaauuugaugccagcaucagccaagucaacgaaaaaaucaaccaaucacucgccuucauccgcaaaagcgacgaacuccuucacaacgucaacgcaggcaaaucaaccaccaacaucaugaucaccaccaucaucaucgucaucaucguuauccuacucagccucaucgcaguuggucuucuccuuuacugcaaagcccgcuccacccccgucacccucaguaaagaccaacucagcggaaucaacaacauagcauucuccaacuaaggacuaguacuggcugcaucucccuuuccucuguccuccauccuucucccaggauggugaagggggaccugguacccagugauccccaccccaggauccuaaaucaugacuuaccugcuaauaaaaacucauuggaaaagugagaagaucuaaaaaaaaaaaaaaaaaaaaaaaaaaaaaaaaaaaaaaaaaaaaaaaaaaaaaaaaaaaaaaaaugcaucccccccccccccccccccccccccccccccaaaggcucuuuucagagccaccagaauu

SEQ ID NO: 4155 - RNA, 2202 nt, Artificial Sequence
  mRNA product Design h-2 comprising derived and/or modified sequence from HRSV(A2)__F_DSCav1_mut0 (opt1)
gggagacccgugacccggaaguuguacggcuacgcgacuuucccucccacaaacccucgcgcccuuccuuuccuacuugggcccggcagaaagcuuaccauggagcugcucauccugaaggccaacgccaucaccaccauccugacggcggugaccuucugcuucgccagcggccagaacaucaccgaggaguucuaccaguccacgugcagcgccgucuccaagggguaccucagcgcccugcggaccggcugguacaccuccgugaucaccaucgagcugagcaacaucaaggagaacaagugcaacgggaccgacgccaaggugaagcucaucaagcaggagcuggacaaguacaagaacgcggucacggagcugcagcuccugaugcaguccaccccggcaaccggcuccggcuccgccaucgcgagcggcgucgccgugugcaaggugcugcaccucgagggggaggucaacaagaucaagagcgcccugcuguccaccaacaaggccguggugagccucuccaacggcgucagcgugcugaccuucaaggugcuggaccucaagaacuacaucgacaagcagcugcugcccauccugaacaagcagagcugcuccaucagcaacaucgagacggugaucgaguuccagcagaagaacaaccggcuccuggagaucacccgcgaguucagcgugaacgccggggucaccacccccguguccacguacaugcugaccaacagcgagcuccugucccugaucaacgacaugccgaucaccaacgaccagaagaagcucaugagcaacaacgugcagaucguccggcagcaguccuacagcaucaugugcaucaucaaggaggaggugcuggcguacgugguccagcugccccucuacggcgugaucgacacccccugcuggaagcugcacacgagcccccugugcaccaccaacaccaaggagggguccaacaucugccucacgcgcaccgaccggggcugguacugcgacaacgccggcagcgucuccuucuucccgcaggccgagaccugcaaggugcagagcaaccgcguguucugcgacaccaugaacucccggacgcugcccagcgagguaaaccucugcaacgucgacaucuucaaccccaaguacgacugcaagaucaugaccuccaagaccgacgugagcuccagcgugaucaccucccugggggccaucgucagcugcuacggcaagacgaagugcaccgccagcaacaagaaccgggggaucaucaagaccuucuccaacggcugcgacuacgugagcaacaagggcguggacaccguguccgucgggaacacccuguacuacgugaacaagcaggagggcaagagccucuacgugaagggggagcccaucaucaacuucuacgacccgcuggucuuccccuccgacgaguucgacgcgagcaucucccaggugaacgagaagaucaaccagagccuggccuucauccgcaaguccgacgagcugcuccacaacgugaacgccggcaagagcacgaccaacaucaugaucaccaccaucaucaucgucaucaucgugauccugcugucccucaucgccguggggcugcugcucuacugcaaggcccggagcacgcccgucacccuguccaaggaccagcugagcggcaucaacaacaucgcguucuccaacugaggacuagugaagggaacacccaaauuuaauucagccuuaagcacaauuaauuaagagugaaacguaauuguacaagcaguuggucacccaccauagggcaugaucaacaccgcaaccuuuccuuuuucccccagugauucugaaaaaccccucuucccuucagcuugcuuagauguuccaaauuuaguaagcuuaaggcggccuacagaagaaaaagaaaaaaaaggccacaaaaguucccucucacuuucaguaaauaaaauaaaagcagcaacagaaauaaagaaauaaaugaaauucaaaaugaaauaaauauuguguugugcagcauuaaaaaaucaauaaaaauuaaaaaugagcaagaucuaaaaaaaaaaaaaaaaaaaaaaaaaaaaaaaaaaaaaaaaaaaaaaaaaaaaaaaaaaaaaaaaugcaucccccccccccccccccccccccccccccccaaaggcucuuuucagagccaccagaauu

SEQ ID NO: 4156 - RNA, 2202 nt, Artificial Sequence
  mRNA product Design h-2 comprising derived and/or modified sequence from HRSV(A2)__F_DSCav1_mut0 (opt1)
gggagacccgugacccggaaguuguacggcuacgcgacuuucccucccacaaacccucgcgcccuuccuuuccuacuugggcccggcagaaagcuuaccauggagcugcucauccugaaggccaacgccaucaccaccauccugacggcggugaccuucugcuucgccagcggccagaacaucaccgaggaguucuaccaguccacgugcagcgccgucuccaagggguaccucagcgcccugcgcaccggcugguacaccuccgugaucaccaucgagcugagcaacaucaaggagaacaagugcaacgggaccgacgccaaggugaagcucaucaagcaggagcuggacaaguacaagaacgcggucacggagcugcagcuccugaugcaguccacccccgccaccggcagcggguccgccaucgccagcggcguggcggugugcaagguccugcaccucgagggcgaggugaacaagaucaaguccgcccugcugagcaccaacaaggccguggucucccucagcaacgggguguccgugcugacguucaagguccuggaccucaagaacuacaucgacaagcagcugcugccgauccucaacaagcagagcugcuccaucagcaacaucgagaccgugaucgaguuccagcagaagaacaaccggcugcuggagaucacccgcgaguucuccgugaacgccggcgucaccacgcccgugagcaccuacaugcucaccaacagcgagcugcugucccucaucaacgacaugcccaucaccaacgaccagaagaagcugaugagcaacaacgugcagaucguccggcagcaguccuacagcaucaugugcaucaucaaggaggaggugcuggccuacgugguccagcucccccuguacggggugaucgacacgccgugcuggaagcugcacaccagcccccucugcaccaccaacacgaaggagggcuccaacaucugccugacccgcaccgaccgggggugguacugcgacaacgcgggcuccgugagcuucuucccccaggccgagaccugcaagguccaguccaaccgcguguucugcgacacgaugaacagccggacccuccccuccgaggucaaccugugcaacguggacaucuucaacccgaaguacgacugcaagaucaugaccagcaagaccgacguguccagcuccgucaucacgagccugggcgccaucguguccugcuacgggaagaccaagugcaccgccagcaacaagaaccggggcaucaucaagaccuucuccaacgggugcgacuacgugagcaacaagggcgucgacacggugagcgugggcaacacccucuacuacgucaacaagcaggaggggaagucccuguacgugaagggcgagcccaucaucaacuucuacgacccccugguguuccccagcgacgaguucgacgccuccaucagccaggucaacgagaagaucaaccagucccucgcguucauccgcaagagcgacgagcugcugcacaacgugaacgccgggaaguccaccaccaacaucaugaucaccacgaucaucaucgugaucaucgucauccuccugagccugaucgccgugggccuccugcuguacugcaaggcccgguccaccccggugacccugagcaaggaccagcucuccgggaucaacaacaucgccuucagcaacugaggacuagugaagggaacacccaaauuuaauucagccuuaagcacaauuaauuaagagugaaacguaauuguacaagcaguuggucacccaccauagggcaugaucaacaccgcaaccuuuccuuuuucccccagugauucugaaaaaccccucuucccuucagcuugcuuagauguuccaaauuuaguaagcuuaaggcggccuacagaagaaaaagaaaaaaaaggccacaaaaguucccucucacuuucaguaaauaaaauaaaagcagcaacagaaauaaagaaauaaaugaaauucaaaaugaaauaaauauuguguugugcagcauuaaaaaaucaauaaaaauuaaaaaugagcaagaucuaaaaaaaaaaaaaaaaaaaaaaaaaaaaaaaaaaaaaaaaaaaaaaaaaaaaaaaaaaaaaaaaugcaucccccccccccccccccccccccccccccccaaaggcucuuuucagagccaccagaauu

SEQ ID NO: 4157 - RNA, 2202 nt, Artificial Sequence
  mRNA product Design h-2 comprising derived and/or modified sequence from HRSV(A2)__F_DSCav1_mut0 (opt2)
gggagacccgugacccggaaguuguacggcuacgcgacuuucccucccacaaacccucgcgcccuuccuuuccuacuugggcccggcagaaagcuuaccauggagcuccucauccucaaggccaacgccaucaccaccauccucaccgccgucaccuucugcuucgccuccggccagaacaucaccgaggaguucuaccaguccaccugcuccgccgucuccaagggcuaccucuccgcccuccgcaccggcugguacaccuccgucaucaccaucgagcucuccaacaucaaggagaacaagugcaacggcaccgacgccaaggucaagcucaucaagcaggagcucgacaaguacaagaacgccgucaccgagcuccagcuccucaugcaguccacccccgccaccggcuccggcuccgccaucgccuccggcgucgccgucugcaagguccuccaccucgagggcgaggucaacaagaucaaguccgcccuccucuccaccaacaaggccgucgucucccucuccaacggcgucuccguccucaccuucaagguccucgaccucaagaacuacaucgacaagcagcuccuccccauccucaacaagcaguccugcuccaucuccaacaucgagaccgucaucgaguuccagcagaagaacaaccgccuccucgagaucacccgcgaguucuccgucaacgccggcgucaccacccccgucuccaccuacaugcucaccaacuccgagcuccucucccucaucaacgacaugcccaucaccaacgaccagaagaagcucauguccaacaacguccagaucguccgccagcaguccuacuccaucaugugcaucaucaaggaggagguccucgccuacgucguccagcucccccucuacggcgucaucgacacccccugcuggaagcuccacaccuccccccucugcaccaccaacaccaaggagggcuccaacaucugccucacccgcaccgaccgcggcugguacugcgacaacgccggcuccgucuccuucuucccccaggccgagaccugcaagguccaguccaaccgcgucuucugcgacaccaugaacucccgcacccuccccuccgaggucaaccucugcaacgucgacaucuucaaccccaaguacgacugcaagaucaugaccuccaagaccgacgucuccuccuccgucaucaccucccucggcgccaucgucuccugcuacggcaagaccaagugcaccgccuccaacaagaaccgcggcaucaucaagaccuucuccaacggcugcgacuacgucuccaacaagggcgucgacaccgucuccgucggcaacacccucuacuacgucaacaagcaggagggcaagucccucuacgucaagggcgagcccaucaucaacuucuacgacccccucgucuuccccuccgacgaguucgacgccuccaucucccaggucaacgagaagaucaaccagucccucgccuucauccgcaaguccgacgagcuccuccacaacgucaacgccggcaaguccaccaccaacaucaugaucaccaccaucaucaucgucaucaucgucauccuccucucccucaucgccgucggccuccuccucuacugcaaggcccgcuccacccccgucacccucuccaaggaccagcucuccggcaucaacaacaucgccuucuccaacugaggacuagugaagggaacacccaaauuuaauucagccuuaagcacaauuaauuaagagugaaacguaauuguacaagcaguuggucacccaccauagggcaugaucaacaccgcaaccuuuccuuuuucccccagugauucugaaaaaccccucuucccuucagcuugcuuagauguuccaaauuuaguaagcuuaaggcggccuacagaagaaaaagaaaaaaaaggccacaaaaguucccucucacuuucaguaaauaaaauaaaagcagcaacagaaauaaagaaauaaaugaaauucaaaaugaaauaaauauuguguugugcagcauuaaaaaaucaauaaaaauuaaaaaugagcaagaucuaaaaaaaaaaaaaaaaaaaaaaaaaaaaaaaaaaaaaaaaaaaaaaaaaaaaaaaaaaaaaaaaugcaucccccccccccccccccccccccccccccccaaaggcucuuuucagagccaccagaauu

SEQ ID NO: 4158 - RNA, 2202 nt, Artificial Sequence
  mRNA product Design h-2 comprising derived and/or modified sequence from HRSV(A2)__F_DSCav1_mut0 (opt3)
gggagacccgugacccggaaguuguacggcuacgcgacuuucccucccacaaacccucgcgcccuuccuuuccuacuugggcccggcagaaagcuuaccauggagcugcucauccuuaaggccaacgcuauuaccacaauacugacugcagugacguucugcuuugccagcggccagaauaucaccgaagaguucuaccaauccacauguucugcggucucaaaaggguauuugagugcuuuaagaacuggaugguacaccagcguuauuacaaucgaacuguccaacauuaaggagaauaaaugcaacgguaccgacgccaaggugaaacuaaucaagcaggaacucgauaaguauaaaaaugcaguaacugagcugcagcuucugaugcagucuacacccgccaccggcucggggucagcuauagcaagcggaguggccgucuguaagguguugcaccucgagggcgaaguuaacaaaaucaagagugcucugcuguccacgaauaaagccguggucucucucagcaacgguguguccguauuaacuuuuaagguucuggaccuuaagaauuacauugauaaacaauugcugccuauccuaaacaagcagucaugcaguauuagcaauaucgagaccgugauagaguuccagcagaaaaacaauaggcuccuggaaauuacacgggaguuuucugucaacgcgggggugacuaccccaguguccacauauaugcuuaccaauucagaacuguugagccucaucaacgacaugccgauuacgaacgaucaaaagaaacugaugaguaauaacguccagaucguucgccagcagucuuacuccaucauguguauuauaaaggaggaaguguuagcauauguagugcaacugccccucuacggagucaucgacacuccuugcuggaaacuucauacaagcccacuguguaccacuaauacaaaggagggcucgaacauuugcuugacccgaacggaucguggcugguacugugacaaugccgggucuguguccuucuuuccccaggcugaaaccugcaagguucagucaaacagaguguucugugauacaaugaauaguagaacucugccuagcgaggucaaccucugcaauguggacaucuuuaacccaaaauaugauugcaagauaaugaccuccaaaacagacguaucuagcucaguuauuaccagucugggagccaucguguccuguuacgguaagacuaaaugcacagcaagcaauaagaacaggggcaucauuaagaccuucucuaaugggugugauuaugucucaaacaaaggaguggacacugucagugugggcaauacgcuuuacuauguuaacaagcaagaggguaaaagccuguacgugaagggggaacccaucauuaacuuuuaugacccuuugguauucccauccgaugaguuugacgcuucuauaucgcaggucaaugagaaaaucaaccagagccucgccuucauucggaaguccgaugaacuguuacacaaugugaacgcgggaaagucaacaaccaauaucaugaucacuaccauuauaaucguuauuaucgugauucugcuaagucucaucgccgucggccugcuuuuguacugcaaagcacgcucuacaccggugacccugagcaaggaccagcucuccggcauaaacaauaucgcuuucucaaacugaggacuagugaagggaacacccaaauuuaauucagccuuaagcacaauuaauuaagagugaaacguaauuguacaagcaguuggucacccaccauagggcaugaucaacaccgcaaccuuuccuuuuucccccagugauucugaaaaaccccucuucccuucagcuugcuuagauguuccaaauuuaguaagcuuaaggcggccuacagaagaaaaagaaaaaaaaggccacaaaaguucccucucacuuucaguaaauaaaauaaaagcagcaacagaaauaaagaaauaaaugaaauucaaaaugaaauaaauauuguguugugcagcauuaaaaaaucaauaaaaauuaaaaaugagcaagaucuaaaaaaaaaaaaaaaaaaaaaaaaaaaaaaaaaaaaaaaaaaaaaaaaaaaaaaaaaaaaaaaaugcaucccccccccccccccccccccccccccccccaaaggcucuuuucagagccaccagaauu

SEQ ID NO: 4159 - RNA, 2202 nt, Artificial Sequence
  mRNA product Design h-2 comprising derived and/or modified sequence from HRSV(A2)__F_DSCav1_mut0 (opt4)
gggagacccgugacccggaaguuguacggcuacgcgacuuucccucccacaaacccucgcgcccuuccuuuccuacuugggcccggcagaaagcuuaccauggagcugcugauccugaaggccaacgccaucaccaccauccugaccgccgugaccuucugcuucgccagcggccagaacaucaccgaggaguucuaccagagcaccugcagcgccgugagcaagggcuaccugagcgcccugagaaccggcugguacaccagcgugaucaccaucgagcugagcaacaucaaggagaacaagugcaacggcaccgacgccaaggugaagcugaucaagcaggagcuggacaaguacaagaacgccgugaccgagcugcagcugcugaugcagagcacccccgccaccggcagcggcagcgccaucgccagcggcguggccgugugcaaggugcugcaccuggagggcgaggugaacaagaucaagagcgcccugcugagcaccaacaaggccguggugagccugagcaacggcgugagcgugcugaccuucaaggugcuggaccugaagaacuacaucgacaagcagcugcugcccauccugaacaagcagagcugcagcaucagcaacaucgagaccgugaucgaguuccagcagaagaacaacagacugcuggagaucaccagagaguucagcgugaacgccggcgugaccacccccgugagcaccuacaugcugaccaacagcgagcugcugagccugaucaacgacaugcccaucaccaacgaccagaagaagcugaugagcaacaacgugcagaucgugagacagcagagcuacagcaucaugugcaucaucaaggaggaggugcuggccuacguggugcagcugccccuguacggcgugaucgacacccccugcuggaagcugcacaccagcccccugugcaccaccaacaccaaggagggcagcaacaucugccugaccagaaccgacagaggcugguacugcgacaacgccggcagcgugagcuucuucccccaggccgagaccugcaaggugcagagcaacagaguguucugcgacaccaugaacagcagaacccugcccagcgaggugaaccugugcaacguggacaucuucaaccccaaguacgacugcaagaucaugaccagcaagaccgacgugagcagcagcgugaucaccagccugggcgccaucgugagcugcuacggcaagaccaagugcaccgccagcaacaagaacagaggcaucaucaagaccuucagcaacggcugcgacuacgugagcaacaagggcguggacaccgugagcgugggcaacacccuguacuacgugaacaagcaggagggcaagagccuguacgugaagggcgagcccaucaucaacuucuacgacccccugguguuccccagcgacgaguucgacgccagcaucagccaggugaacgagaagaucaaccagagccuggccuucaucagaaagagcgacgagcugcugcacaacgugaacgccggcaagagcaccaccaacaucaugaucaccaccaucaucaucgugaucaucgugauccugcugagccugaucgccgugggccugcugcuguacugcaaggccagaagcacccccgugacccugagcaaggaccagcugagcggcaucaacaacaucgccuucagcaacugaggacuagugaagggaacacccaaauuuaauucagccuuaagcacaauuaauuaagagugaaacguaauuguacaagcaguuggucacccaccauagggcaugaucaacaccgcaaccuuuccuuuuucccccagugauucugaaaaaccccucuucccuucagcuugcuuagauguuccaaauuuaguaagcuuaaggcggccuacagaagaaaaagaaaaaaaaggccacaaaaguucccucucacuuucaguaaauaaaauaaaagcagcaacagaaauaaagaaauaaaugaaauucaaaaugaaauaaauauuguguugugcagcauuaaaaaaucaauaaaaauuaaaaaugagcaagaucuaaaaaaaaaaaaaaaaaaaaaaaaaaaaaaaaaaaaaaaaaaaaaaaaaaaaaaaaaaaaaaaaugcaucccccccccccccccccccccccccccccccaaaggcucuuuucagagccaccagaauu

SEQ ID NO: 4160 - RNA, 2202 nt, Artificial Sequence
  mRNA product Design h-2 comprising derived and/or modified sequence from HRSV(A2)__F_DSCav1_mut0 (opt5)
gggagacccgugacccggaaguuguacggcuacgcgacuuucccucccacaaacccucgcgcccuuccuuuccuacuugggcccggcagaaagcuuaccauggagcugcucauccugaaggccaacgcuauuaccacaauccuuacggccgugaccuucugcuuugcgagcggccagaauauuacagaagaguucuaccaauccaccuguucugcugucagcaaaggguaucuguccgcccucagaacaggaugguacaccucuguuaucacaauugaacugagcaacaucaaggagaauaaaugcaacggcaccgacgccaaggugaaacuuaucaagcaggaacuggauaaguauaaaaaugcugugacggagcuccagcugcugaugcaguccacccccgccacagggucuggaagcgcuauugccuccggcgucgcgguguguaagguucuccaccuggagggggaagugaacaaaaucaagagcgcccuucugucuaccaauaaagcugucgugucccucagcaacggaguuucugugcugacauuuaagguccuugaccugaagaauuacauugauaaacaacuccugccuauccugaacaagcaguccugcagcauuucuaauaucgagaccgugauugaguuccagcagaaaaacaaucggcuccuggaaaucacgcgcgaguuuuccgugaacgccggcgucacaaccccgguuagcacauauaugcuuaccaauuccgaacugcucucucugaucaacgacaugcccauuaccaacgaucaaaagaaacuuaugagcaauaacgugcagaucgugagacagcaguccuacagcauuauguguaucauuaaggaggaaguccuggcuuaugugguucaacucccucuguacggcgugaucgacacacccugcuggaaacugcauacgucuccucucuguaccacaaauaccaaggagggguccaacaucugccugacacggaccgaucgcggaugguacugugacaaugccggcagcgucucuuucuuuccccaggcggaaacgugcaaggugcagagcaacagaguuuucugugauacaaugaacuccagaacccugccuucugaggugaaucucugcaaugucgacauuuuuaacccgaaauaugauugcaagaucaugaccagcaaaacagacguguccagcucugucauuaccucccugggggccaucgugagcuguuacggaaagacaaaaugcacggcuucuaauaagaaccggggcauuaucaagaccuucuccaaugggugugauuauguuagcaacaaaggaguggacacagucuccgugggcaauacccuuuacuauguuaacaagcaagagggcaaaucucuguacgugaagggggaacccaucauuaacuuuuaugacccucucgucuuccccagcgaugaguuugacgccuccaucucucaggugaaugagaaaauuaaccagagccuggcuuucauccgcaaguccgaugaacugcuccacaaugugaacgccggaaagagcacaaccaauauuaugaucacgaccauuaucaucguuauuaucgucauucugcuuucucugaucgccgugggccuccugcuguacugcaaagcuagauccacaccugugacccuuagcaaggaccagcucucugggauuaacaauaucgcguucuccaacugaggacuagugaagggaacacccaaauuuaauucagccuuaagcacaauuaauuaagagugaaacguaauuguacaagcaguuggucacccaccauagggcaugaucaacaccgcaaccuuuccuuuuucccccagugauucugaaaaaccccucuucccuucagcuugcuuagauguuccaaauuuaguaagcuuaaggcggccuacagaagaaaaagaaaaaaaaggccacaaaaguucccucucacuuucaguaaauaaaauaaaagcagcaacagaaauaaagaaauaaaugaaauucaaaaugaaauaaauauuguguugugcagcauuaaaaaaucaauaaaaauuaaaaaugagcaagaucuaaaaaaaaaaaaaaaaaaaaaaaaaaaaaaaaaaaaaaaaaaaaaaaaaaaaaaaaaaaaaaaaugcaucccccccccccccccccccccccccccccccaaaggcucuuuucagagccaccagaauu

SEQ ID NO: 4161 - RNA, 2202 nt, Artificial Sequence
  mRNA product Design h-2 comprising derived and/or modified sequence from HRSV(A2)__F_DSCav1_mut0 (opt6)
gggagacccgugacccggaaguuguacggcuacgcgacuuucccucccacaaacccucgcgcccuuccuuuccuacuugggcccggcagaaagcuuaccauggaacuacuaauacuaaaagccaaugcaauaacaaccauacuaaccgccguaacauuuuguuucgcaucaggucaaaacauaaccgaagaauuuuaucaaucaacaugcucagcaguaucaaaaggauacuuauccgcucuaagaacaggaugguacacaaguguaauuacaauagagcucucaaacauaaaagaaaacaaaugcaauggaacugacgcaaaaguuaaacuuauaaaacaagaacuagauaaauauaaaaaugcaguaaccgaauuacaacuccuaaugcaauccacaccugcuaccgguuccggaucagccauagcaucuggaguagccguaugcaaaguccuccaccuagaaggagaaguaaauaaaaucaaaucagcacuauuaucuaccaauaaagcaguugucucacuauccaauggcguaucaguacuaacauucaaaguauuagaccuuaaaaacuacauagacaaacaacuauuaccaauucugaacaaacaauccuguucaauaucaaacaucgaaacgguaauagaauuucaacaaaaaaauaacagauuacuugaaauaacaagagaauuuucaguaaaugcaggaguuacaacacccgucuccaccuacaugcucacaaauucagaauuauuaucacuuauaaacgacaugccaauaacuaacgaccaaaaaaaacuaaugucaaacaauguccaaauaguccgacaacaauccuacucaauaaugugcauuauaaaagaagaaguccuagccuacguuguccaacuacccuuauauggaguaauagauaccccaugcuggaaacuucauaccuccccccuaugcacaacaaacacaaaagaaggcucaaacaucugcuuaacacguacagaccgagguugguacugugauaacgcaggauccguaucauuuuucccacaagcagaaacaugcaaaguacaaucaaaccgcguuuuuugugacaccaugaacagcagaacccucccuucagaaguaaaccuaugcaacgucgauauauuuaacccaaaauacgauugcaaaauaaugacaucaaaaaccgaugucucaucuucaguaauaaccucucuaggagcaauagucucauguuacggaaaaacaaaaugcacagcaaguaauaaaaauagaggaauaauaaaaacauucucuaauggcugcgacuacguauccaauaaaggcguugacacaguauccguaggcaacacacucuacuauguuaacaaacaagaaggaaaaaguuuauacguuaaaggagaaccaauuauaaacuuuuacgacccacucguauucccaucugaugaauuugacgcaucaaucucacaaguaaaugaaaaaaucaaucagucccuugccuuuauaagaaaaucagaugaacuuuuacacaacguuaacgccggaaaaucaacaaccaauauaaugaucacaaccauaauaauaguuauaauuguaauuuuauuauccuuaauagccgucggacuacuacuauacugcaaagcaagaucuacacccguaacccuaucaaaagaccaacuaaguggaauaaauaacauugcauucucaaauuaaggacuagugaagggaacacccaaauuuaauucagccuuaagcacaauuaauuaagagugaaacguaauuguacaagcaguuggucacccaccauagggcaugaucaacaccgcaaccuuuccuuuuucccccagugauucugaaaaaccccucuucccuucagcuugcuuagauguuccaaauuuaguaagcuuaaggcggccuacagaagaaaaagaaaaaaaaggccacaaaaguucccucucacuuucaguaaauaaaauaaaagcagcaacagaaauaaagaaauaaaugaaauucaaaaugaaauaaauauuguguugugcagcauuaaaaaaucaauaaaaauuaaaaaugagcaagaucuaaaaaaaaaaaaaaaaaaaaaaaaaaaaaaaaaaaaaaaaaaaaaaaaaaaaaaaaaaaaaaaaugcaucccccccccccccccccccccccccccccccaaaggcucuuuucagagccaccagaauu

SEQ ID NO: 4162 - RNA, 2202 nt, Artificial Sequence
  mRNA product Design h-2 comprising derived and/or modified sequence from HRSV(A2)__F_DSCav1_mut0 (opt11)
gggagacccgugacccggaaguuguacggcuacgcgacuuucccucccacaaacccucgcgcccuuccuuuccuacuugggcccggcagaaagcuuaccauggaacuccuaauacuaaaggcaaacgcaaucacuacaauucuaaccgccgugacauucugcuucgccuccggacaaaacaucaccgaagaauuuuaccaauccacaugcucggccgucaguaaaggcuaccucucggcucuccgaaccggcugguacaccuccgucaucaccaucgaacucuccaacaucaaagaaaacaaaugcaacggcaccgacgccaaagucaaacuaaucaaacaagaacucgacaaauacaaaaacgccgucacagaacuccaacuacuaaugcaaucaacacccgcuacaggaagcggcuccgccaucgccagcggcguagcugucugcaaaguccuccaccucgaaggugaagucaacaaaaucaaaucagcccuacucagcacaaacaaagccguuguaagccuauccaacggcgucuccguacuaacauucaaaguccuugaccucaagaacuacaucgacaaacaacuucucccaauccuaaacaaacaaagcugcucaauuuccaacaucgaaacaguaaucgaauuucaacaaaaaaacaaccgacuccucgaaaucacccgcgaauuuuccguuaacgccggcguuacaacccccgucuccaccuacaugcucaccaauuccgaacuacuaucacucauaaacgacaugccuaucacaaacgaccaaaaaaaacuaaugucaaacaauguccaaaucguccgccagcaaagcuauuccaucaugugcaucaucaaagaggaaguccucgccuacguaguccaacugccccucuacggcgucauugauacccccugcuggaaacuccacaccuccccccucugcaccacaaacaccaaagaagguuccaacaucugccuaacacgaaccgacagaggcugguacugcgacaacgccggcagcgucuccuucuucccccaagcagaaaccuguaaaguccagucuaaccgcgucuucugcgacacaaugaacucaagaacccuaccuuccgaaguaaaccucugcaacguagacaucuucaacccuaaauacgacugcaaaaucaugacuucaaaaacagacguaagcucuuccguaaucacuucccucggcgccaucguauccugcuacgguaaaaccaaaugcaccgccuccaacaaaaaccgagggaucauaaaaaccuucuccaacggcugcgacuacguaucuaacaaaggcgucgacaccgucuccgucggcaacacccucuauuacguaaacaaacaagagggcaaaucacuauacgucaaaggcgagccaaucauaaacuucuaugacccacucgucuucccuucagacgaauuugaugccagcaucagccaagucaacgaaaaaaucaaccaaucacucgccuucauccgcaaaagcgacgaacuccuucacaacgucaacgcaggcaaaucaaccaccaacaucaugaucaccaccaucaucaucgucaucaucguuauccuacucagccucaucgcaguuggucuucuccuuuacugcaaagcccgcuccacccccgucacccucaguaaagaccaacucagcggaaucaacaacauagcauucuccaacuaaggacuagugaagggaacacccaaauuuaauucagccuuaagcacaauuaauuaagagugaaacguaauuguacaagcaguuggucacccaccauagggcaugaucaacaccgcaaccuuuccuuuuucccccagugauucugaaaaaccccucuucccuucagcuugcuuagauguuccaaauuuaguaagcuuaaggcggccuacagaagaaaaagaaaaaaaaggccacaaaaguucccucucacuuucaguaaauaaaauaaaagcagcaacagaaauaaagaaauaaaugaaauucaaaaugaaauaaauauuguguugugcagcauuaaaaaaucaauaaaaauuaaaaaugagcaagaucuaaaaaaaaaaaaaaaaaaaaaaaaaaaaaaaaaaaaaaaaaaaaaaaaaaaaaaaaaaaaaaaaugcaucccccccccccccccccccccccccccccccaaaggcucuuuucagagccaccagaauu

SEQ ID NO: 4163 - RNA, 1982 nt, Artificial Sequence
  mRNA product Design h-3 comprising derived and/or modified sequence from HRSV(A2)__F_DSCav1_mut0 (opt1)
gggagacccgugacccggaaguuguacggcuacgcgacuuucccucccacaaacccucgcgcccuuccuuuccuacuugggcccggcagaaagcuuaccauggagcugcucauccugaaggccaacgccaucaccaccauccugacggcggugaccuucugcuucgccagcggccagaacaucaccgaggaguucuaccaguccacgugcagcgccgucuccaagggguaccucagcgcccugcggaccggcugguacaccuccgugaucaccaucgagcugagcaacaucaaggagaacaagugcaacgggaccgacgccaaggugaagcucaucaagcaggagcuggacaaguacaagaacgcggucacggagcugcagcuccugaugcaguccaccccggcaaccggcuccggcuccgccaucgcgagcggcgucgccgugugcaaggugcugcaccucgagggggaggucaacaagaucaagagcgcccugcuguccaccaacaaggccguggugagccucuccaacggcgucagcgugcugaccuucaaggugcuggaccucaagaacuacaucgacaagcagcugcugcccauccugaacaagcagagcugcuccaucagcaacaucgagacggugaucgaguuccagcagaagaacaaccggcuccuggagaucacccgcgaguucagcgugaacgccggggucaccacccccguguccacguacaugcugaccaacagcgagcuccugucccugaucaacgacaugccgaucaccaacgaccagaagaagcucaugagcaacaacgugcagaucguccggcagcaguccuacagcaucaugugcaucaucaaggaggaggugcuggcguacgugguccagcugccccucuacggcgugaucgacacccccugcuggaagcugcacacgagcccccugugcaccaccaacaccaaggagggguccaacaucugccucacgcgcaccgaccggggcugguacugcgacaacgccggcagcgucuccuucuucccgcaggccgagaccugcaaggugcagagcaaccgcguguucugcgacaccaugaacucccggacgcugcccagcgagguaaaccucugcaacgucgacaucuucaaccccaaguacgacugcaagaucaugaccuccaagaccgacgugagcuccagcgugaucaccucccugggggccaucgucagcugcuacggcaagacgaagugcaccgccagcaacaagaaccgggggaucaucaagaccuucuccaacggcugcgacuacgugagcaacaagggcguggacaccguguccgucgggaacacccuguacuacgugaacaagcaggagggcaagagccucuacgugaagggggagcccaucaucaacuucuacgacccgcuggucuuccccuccgacgaguucgacgcgagcaucucccaggugaacgagaagaucaaccagagccuggccuucauccgcaaguccgacgagcugcuccacaacgugaacgccggcaagagcacgaccaacaucaugaucaccaccaucaucaucgucaucaucgugauccugcugucccucaucgccguggggcugcugcucuacugcaaggcccggagcacgcccgucacccuguccaaggaccagcugagcggcaucaacaacaucgcguucuccaacugaggacuaguggaagcauuuuccuggcugauuaaaagaaauuacucagcuauggucaucuguuccuguuagaaggcuaugcagcauauuauauacuaugcgcauguuaugaaaugcauaauaaaaaauuuuaaaaaaucuaaaagaucuaaaaaaaaaaaaaaaaaaaaaaaaaaaaaaaaaaaaaaaaaaaaaaaaaaaaaaaaaaaaaaaaugcaucccccccccccccccccccccccccccccccaaaggcucuuuucagagccaccagaauu

SEQ ID NO: 4164 - RNA, 1982 nt, Artificial Sequence
  mRNA product Design h-3 comprising derived and/or modified sequence from HRSV(A2)__F_DSCav1_mut0 (opt1)
gggagacccgugacccggaaguuguacggcuacgcgacuuucccucccacaaacccucgcgcccuuccuuuccuacuugggcccggcagaaagcuuaccauggagcugcucauccugaaggccaacgccaucaccaccauccugacggcggugaccuucugcuucgccagcggccagaacaucaccgaggaguucuaccaguccacgugcagcgccgucuccaagggguaccucagcgcccugcgcaccggcugguacaccuccgugaucaccaucgagcugagcaacaucaaggagaacaagugcaacgggaccgacgccaaggugaagcucaucaagcaggagcuggacaaguacaagaacgcggucacggagcugcagcuccugaugcaguccacccccgccaccggcagcggguccgccaucgccagcggcguggcggugugcaagguccugcaccucgagggcgaggugaacaagaucaaguccgcccugcugagcaccaacaaggccguggucucccucagcaacgggguguccgugcugacguucaagguccuggaccucaagaacuacaucgacaagcagcugcugccgauccucaacaagcagagcugcuccaucagcaacaucgagaccgugaucgaguuccagcagaagaacaaccggcugcuggagaucacccgcgaguucuccgugaacgccggcgucaccacgcccgugagcaccuacaugcucaccaacagcgagcugcugucccucaucaacgacaugcccaucaccaacgaccagaagaagcugaugagcaacaacgugcagaucguccggcagcaguccuacagcaucaugugcaucaucaaggaggaggugcuggccuacgugguccagcucccccuguacggggugaucgacacgccgugcuggaagcugcacaccagcccccucugcaccaccaacacgaaggagggcuccaacaucugccugacccgcaccgaccgggggugguacugcgacaacgcgggcuccgugagcuucuucccccaggccgagaccugcaagguccaguccaaccgcguguucugcgacacgaugaacagccggacccuccccuccgaggucaaccugugcaacguggacaucuucaacccgaaguacgacugcaagaucaugaccagcaagaccgacguguccagcuccgucaucacgagccugggcgccaucguguccugcuacgggaagaccaagugcaccgccagcaacaagaaccggggcaucaucaagaccuucuccaacgggugcgacuacgugagcaacaagggcgucgacacggugagcgugggcaacacccucuacuacgucaacaagcaggaggggaagucccuguacgugaagggcgagcccaucaucaacuucuacgacccccugguguuccccagcgacgaguucgacgccuccaucagccaggucaacgagaagaucaaccagucccucgcguucauccgcaagagcgacgagcugcugcacaacgugaacgccgggaaguccaccaccaacaucaugaucaccacgaucaucaucgugaucaucgucauccuccugagccugaucgccgugggccuccugcuguacugcaaggcccgguccaccccggugacccugagcaaggaccagcucuccgggaucaacaacaucgccuucagcaacugaggacuaguggaagcauuuuccuggcugauuaaaagaaauuacucagcuauggucaucuguuccuguuagaaggcuaugcagcauauuauauacuaugcgcauguuaugaaaugcauaauaaaaaauuuuaaaaaaucuaaaagaucuaaaaaaaaaaaaaaaaaaaaaaaaaaaaaaaaaaaaaaaaaaaaaaaaaaaaaaaaaaaaaaaaugcaucccccccccccccccccccccccccccccccaaaggcucuuuucagagccaccagaauu

SEQ ID NO: 4165 - RNA, 1982 nt, Artificial Sequence
  mRNA product Design h-3 comprising derived and/or modified sequence from HRSV(A2)__F_DSCav1_mut0 (opt2)
gggagacccgugacccggaaguuguacggcuacgcgacuuucccucccacaaacccucgcgcccuuccuuuccuacuugggcccggcagaaagcuuaccauggagcuccucauccucaaggccaacgccaucaccaccauccucaccgccgucaccuucugcuucgccuccggccagaacaucaccgaggaguucuaccaguccaccugcuccgccgucuccaagggcuaccucuccgcccuccgcaccggcugguacaccuccgucaucaccaucgagcucuccaacaucaaggagaacaagugcaacggcaccgacgccaaggucaagcucaucaagcaggagcucgacaaguacaagaacgccgucaccgagcuccagcuccucaugcaguccacccccgccaccggcuccggcuccgccaucgccuccggcgucgccgucugcaagguccuccaccucgagggcgaggucaacaagaucaaguccgcccuccucuccaccaacaaggccgucgucucccucuccaacggcgucuccguccucaccuucaagguccucgaccucaagaacuacaucgacaagcagcuccuccccauccucaacaagcaguccugcuccaucuccaacaucgagaccgucaucgaguuccagcagaagaacaaccgccuccucgagaucacccgcgaguucuccgucaacgccggcgucaccacccccgucuccaccuacaugcucaccaacuccgagcuccucucccucaucaacgacaugcccaucaccaacgaccagaagaagcucauguccaacaacguccagaucguccgccagcaguccuacuccaucaugugcaucaucaaggaggagguccucgccuacgucguccagcucccccucuacggcgucaucgacacccccugcuggaagcuccacaccuccccccucugcaccaccaacaccaaggagggcuccaacaucugccucacccgcaccgaccgcggcugguacugcgacaacgccggcuccgucuccuucuucccccaggccgagaccugcaagguccaguccaaccgcgucuucugcgacaccaugaacucccgcacccuccccuccgaggucaaccucugcaacgucgacaucuucaaccccaaguacgacugcaagaucaugaccuccaagaccgacgucuccuccuccgucaucaccucccucggcgccaucgucuccugcuacggcaagaccaagugcaccgccuccaacaagaaccgcggcaucaucaagaccuucuccaacggcugcgacuacgucuccaacaagggcgucgacaccgucuccgucggcaacacccucuacuacgucaacaagcaggagggcaagucccucuacgucaagggcgagcccaucaucaacuucuacgacccccucgucuuccccuccgacgaguucgacgccuccaucucccaggucaacgagaagaucaaccagucccucgccuucauccgcaaguccgacgagcuccuccacaacgucaacgccggcaaguccaccaccaacaucaugaucaccaccaucaucaucgucaucaucgucauccuccucucccucaucgccgucggccuccuccucuacugcaaggcccgcuccacccccgucacccucuccaaggaccagcucuccggcaucaacaacaucgccuucuccaacugaggacuaguggaagcauuuuccuggcugauuaaaagaaauuacucagcuauggucaucuguuccuguuagaaggcuaugcagcauauuauauacuaugcgcauguuaugaaaugcauaauaaaaaauuuuaaaaaaucuaaaagaucuaaaaaaaaaaaaaaaaaaaaaaaaaaaaaaaaaaaaaaaaaaaaaaaaaaaaaaaaaaaaaaaaugcaucccccccccccccccccccccccccccccccaaaggcucuuuucagagccaccagaauu

SEQ ID NO: 4166 - RNA, 1982 nt, Artificial Sequence
  mRNA product Design h-3 comprising derived and/or modified sequence from HRSV(A2)__F_DSCav1_mut0 (opt3)
gggagacccgugacccggaaguuguacggcuacgcgacuuucccucccacaaacccucgcgcccuuccuuuccuacuugggcccggcagaaagcuuaccauggagcugcucauccuuaaggccaacgcuauuaccacaauacugacugcagugacguucugcuuugccagcggccagaauaucaccgaagaguucuaccaauccacauguucugcggucucaaaaggguauuugagugcuuuaagaacuggaugguacaccagcguuauuacaaucgaacuguccaacauuaaggagaauaaaugcaacgguaccgacgccaaggugaaacuaaucaagcaggaacucgauaaguauaaaaaugcaguaacugagcugcagcuucugaugcagucuacacccgccaccggcucggggucagcuauagcaagcggaguggccgucuguaagguguugcaccucgagggcgaaguuaacaaaaucaagagugcucugcuguccacgaauaaagccguggucucucucagcaacgguguguccguauuaacuuuuaagguucuggaccuuaagaauuacauugauaaacaauugcugccuauccuaaacaagcagucaugcaguauuagcaauaucgagaccgugauagaguuccagcagaaaaacaauaggcuccuggaaauuacacgggaguuuucugucaacgcgggggugacuaccccaguguccacauauaugcuuaccaauucagaacuguugagccucaucaacgacaugccgauuacgaacgaucaaaagaaacugaugaguaauaacguccagaucguucgccagcagucuuacuccaucauguguauuauaaaggaggaaguguuagcauauguagugcaacugccccucuacggagucaucgacacuccuugcuggaaacuucauacaagcccacuguguaccacuaauacaaaggagggcucgaacauuugcuugacccgaacggaucguggcugguacugugacaaugccgggucuguguccuucuuuccccaggcugaaaccugcaagguucagucaaacagaguguucugugauacaaugaauaguagaacucugccuagcgaggucaaccucugcaauguggacaucuuuaacccaaaauaugauugcaagauaaugaccuccaaaacagacguaucuagcucaguuauuaccagucugggagccaucguguccuguuacgguaagacuaaaugcacagcaagcaauaagaacaggggcaucauuaagaccuucucuaaugggugugauuaugucucaaacaaaggaguggacacugucagugugggcaauacgcuuuacuauguuaacaagcaagaggguaaaagccuguacgugaagggggaacccaucauuaacuuuuaugacccuuugguauucccauccgaugaguuugacgcuucuauaucgcaggucaaugagaaaaucaaccagagccucgccuucauucggaaguccgaugaacuguuacacaaugugaacgcgggaaagucaacaaccaauaucaugaucacuaccauuauaaucguuauuaucgugauucugcuaagucucaucgccgucggccugcuuuuguacugcaaagcacgcucuacaccggugacccugagcaaggaccagcucuccggcauaaacaauaucgcuuucucaaacugaggacuaguggaagcauuuuccuggcugauuaaaagaaauuacucagcuauggucaucuguuccuguuagaaggcuaugcagcauauuauauacuaugcgcauguuaugaaaugcauaauaaaaaauuuuaaaaaaucuaaaagaucuaaaaaaaaaaaaaaaaaaaaaaaaaaaaaaaaaaaaaaaaaaaaaaaaaaaaaaaaaaaaaaaaugcaucccccccccccccccccccccccccccccccaaaggcucuuuucagagccaccagaauu

SEQ ID NO: 4167 - RNA, 1982 nt, Artificial Sequence
  mRNA product Design h-3 comprising derived and/or modified sequence from HRSV(A2)__F_DSCav1_mut0 (opt4)
gggagacccgugacccggaaguuguacggcuacgcgacuuucccucccacaaacccucgcgcccuuccuuuccuacuugggcccggcagaaagcuuaccauggagcugcugauccugaaggccaacgccaucaccaccauccugaccgccgugaccuucugcuucgccagcggccagaacaucaccgaggaguucuaccagagcaccugcagcgccgugagcaagggcuaccugagcgcccugagaaccggcugguacaccagcgugaucaccaucgagcugagcaacaucaaggagaacaagugcaacggcaccgacgccaaggugaagcugaucaagcaggagcuggacaaguacaagaacgccgugaccgagcugcagcugcugaugcagagcacccccgccaccggcagcggcagcgccaucgccagcggcguggccgugugcaaggugcugcaccuggagggcgaggugaacaagaucaagagcgcccugcugagcaccaacaaggccguggugagccugagcaacggcgugagcgugcugaccuucaaggugcuggaccugaagaacuacaucgacaagcagcugcugcccauccugaacaagcagagcugcagcaucagcaacaucgagaccgugaucgaguuccagcagaagaacaacagacugcuggagaucaccagagaguucagcgugaacgccggcgugaccacccccgugagcaccuacaugcugaccaacagcgagcugcugagccugaucaacgacaugcccaucaccaacgaccagaagaagcugaugagcaacaacgugcagaucgugagacagcagagcuacagcaucaugugcaucaucaaggaggaggugcuggccuacguggugcagcugccccuguacggcgugaucgacacccccugcuggaagcugcacaccagcccccugugcaccaccaacaccaaggagggcagcaacaucugccugaccagaaccgacagaggcugguacugcgacaacgccggcagcgugagcuucuucccccaggccgagaccugcaaggugcagagcaacagaguguucugcgacaccaugaacagcagaacccugcccagcgaggugaaccugugcaacguggacaucuucaaccccaaguacgacugcaagaucaugaccagcaagaccgacgugagcagcagcgugaucaccagccugggcgccaucgugagcugcuacggcaagaccaagugcaccgccagcaacaagaacagaggcaucaucaagaccuucagcaacggcugcgacuacgugagcaacaagggcguggacaccgugagcgugggcaacacccuguacuacgugaacaagcaggagggcaagagccuguacgugaagggcgagcccaucaucaacuucuacgacccccugguguuccccagcgacgaguucgacgccagcaucagccaggugaacgagaagaucaaccagagccuggccuucaucagaaagagcgacgagcugcugcacaacgugaacgccggcaagagcaccaccaacaucaugaucaccaccaucaucaucgugaucaucgugauccugcugagccugaucgccgugggccugcugcuguacugcaaggccagaagcacccccgugacccugagcaaggaccagcugagcggcaucaacaacaucgccuucagcaacugaggacuaguggaagcauuuuccuggcugauuaaaagaaauuacucagcuauggucaucuguuccuguuagaaggcuaugcagcauauuauauacuaugcgcauguuaugaaaugcauaauaaaaaauuuuaaaaaaucuaaaagaucuaaaaaaaaaaaaaaaaaaaaaaaaaaaaaaaaaaaaaaaaaaaaaaaaaaaaaaaaaaaaaaaaugcaucccccccccccccccccccccccccccccccaaaggcucuuuucagagccaccagaauu

SEQ ID NO: 4168 - RNA, 1982 nt, Artificial Sequence
  mRNA product Design h-3 comprising derived and/or modified sequence from HRSV(A2)__F_DSCav1_mut0 (opt5)
gggagacccgugacccggaaguuguacggcuacgcgacuuucccucccacaaacccucgcgcccuuccuuuccuacuugggcccggcagaaagcuuaccauggagcugcucauccugaaggccaacgcuauuaccacaauccuuacggccgugaccuucugcuuugcgagcggccagaauauuacagaagaguucuaccaauccaccuguucugcugucagcaaaggguaucuguccgcccucagaacaggaugguacaccucuguuaucacaauugaacugagcaacaucaaggagaauaaaugcaacggcaccgacgccaaggugaaacuuaucaagcaggaacuggauaaguauaaaaaugcugugacggagcuccagcugcugaugcaguccacccccgccacagggucuggaagcgcuauugccuccggcgucgcgguguguaagguucuccaccuggagggggaagugaacaaaaucaagagcgcccuucugucuaccaauaaagcugucgugucccucagcaacggaguuucugugcugacauuuaagguccuugaccugaagaauuacauugauaaacaacuccugccuauccugaacaagcaguccugcagcauuucuaauaucgagaccgugauugaguuccagcagaaaaacaaucggcuccuggaaaucacgcgcgaguuuuccgugaacgccggcgucacaaccccgguuagcacauauaugcuuaccaauuccgaacugcucucucugaucaacgacaugcccauuaccaacgaucaaaagaaacuuaugagcaauaacgugcagaucgugagacagcaguccuacagcauuauguguaucauuaaggaggaaguccuggcuuaugugguucaacucccucuguacggcgugaucgacacacccugcuggaaacugcauacgucuccucucuguaccacaaauaccaaggagggguccaacaucugccugacacggaccgaucgcggaugguacugugacaaugccggcagcgucucuuucuuuccccaggcggaaacgugcaaggugcagagcaacagaguuuucugugauacaaugaacuccagaacccugccuucugaggugaaucucugcaaugucgacauuuuuaacccgaaauaugauugcaagaucaugaccagcaaaacagacguguccagcucugucauuaccucccugggggccaucgugagcuguuacggaaagacaaaaugcacggcuucuaauaagaaccggggcauuaucaagaccuucuccaaugggugugauuauguuagcaacaaaggaguggacacagucuccgugggcaauacccuuuacuauguuaacaagcaagagggcaaaucucuguacgugaagggggaacccaucauuaacuuuuaugacccucucgucuuccccagcgaugaguuugacgccuccaucucucaggugaaugagaaaauuaaccagagccuggcuuucauccgcaaguccgaugaacugcuccacaaugugaacgccggaaagagcacaaccaauauuaugaucacgaccauuaucaucguuauuaucgucauucugcuuucucugaucgccgugggccuccugcuguacugcaaagcuagauccacaccugugacccuuagcaaggaccagcucucugggauuaacaauaucgcguucuccaacugaggacuaguggaagcauuuuccuggcugauuaaaagaaauuacucagcuauggucaucuguuccuguuagaaggcuaugcagcauauuauauacuaugcgcauguuaugaaaugcauaauaaaaaauuuuaaaaaaucuaaaagaucuaaaaaaaaaaaaaaaaaaaaaaaaaaaaaaaaaaaaaaaaaaaaaaaaaaaaaaaaaaaaaaaaugcaucccccccccccccccccccccccccccccccaaaggcucuuuucagagccaccagaauu

SEQ ID NO: 4169 - RNA, 1982 nt, Artificial Sequence
  mRNA product Design h-3 comprising derived and/or modified sequence from HRSV(A2)__F_DSCav1_mut0 (opt6)
gggagacccgugacccggaaguuguacggcuacgcgacuuucccucccacaaacccucgcgcccuuccuuuccuacuugggcccggcagaaagcuuaccauggaacuacuaauacuaaaagccaaugcaauaacaaccauacuaaccgccguaacauuuuguuucgcaucaggucaaaacauaaccgaagaauuuuaucaaucaacaugcucagcaguaucaaaaggauacuuauccgcucuaagaacaggaugguacacaaguguaauuacaauagagcucucaaacauaaaagaaaacaaaugcaauggaacugacgcaaaaguuaaacuuauaaaacaagaacuagauaaauauaaaaaugcaguaaccgaauuacaacuccuaaugcaauccacaccugcuaccgguuccggaucagccauagcaucuggaguagccguaugcaaaguccuccaccuagaaggagaaguaaauaaaaucaaaucagcacuauuaucuaccaauaaagcaguugucucacuauccaauggcguaucaguacuaacauucaaaguauuagaccuuaaaaacuacauagacaaacaacuauuaccaauucugaacaaacaauccuguucaauaucaaacaucgaaacgguaauagaauuucaacaaaaaaauaacagauuacuugaaauaacaagagaauuuucaguaaaugcaggaguuacaacacccgucuccaccuacaugcucacaaauucagaauuauuaucacuuauaaacgacaugccaauaacuaacgaccaaaaaaaacuaaugucaaacaauguccaaauaguccgacaacaauccuacucaauaaugugcauuauaaaagaagaaguccuagccuacguuguccaacuacccuuauauggaguaauagauaccccaugcuggaaacuucauaccuccccccuaugcacaacaaacacaaaagaaggcucaaacaucugcuuaacacguacagaccgagguugguacugugauaacgcaggauccguaucauuuuucccacaagcagaaacaugcaaaguacaaucaaaccgcguuuuuugugacaccaugaacagcagaacccucccuucagaaguaaaccuaugcaacgucgauauauuuaacccaaaauacgauugcaaaauaaugacaucaaaaaccgaugucucaucuucaguaauaaccucucuaggagcaauagucucauguuacggaaaaacaaaaugcacagcaaguaauaaaaauagaggaauaauaaaaacauucucuaauggcugcgacuacguauccaauaaaggcguugacacaguauccguaggcaacacacucuacuauguuaacaaacaagaaggaaaaaguuuauacguuaaaggagaaccaauuauaaacuuuuacgacccacucguauucccaucugaugaauuugacgcaucaaucucacaaguaaaugaaaaaaucaaucagucccuugccuuuauaagaaaaucagaugaacuuuuacacaacguuaacgccggaaaaucaacaaccaauauaaugaucacaaccauaauaauaguuauaauuguaauuuuauuauccuuaauagccgucggacuacuacuauacugcaaagcaagaucuacacccguaacccuaucaaaagaccaacuaaguggaauaaauaacauugcauucucaaauuaaggacuaguggaagcauuuuccuggcugauuaaaagaaauuacucagcuauggucaucuguuccuguuagaaggcuaugcagcauauuauauacuaugcgcauguuaugaaaugcauaauaaaaaauuuuaaaaaaucuaaaagaucuaaaaaaaaaaaaaaaaaaaaaaaaaaaaaaaaaaaaaaaaaaaaaaaaaaaaaaaaaaaaaaaaugcaucccccccccccccccccccccccccccccccaaaggcucuuuucagagccaccagaauu

SEQ ID NO: 4170 - RNA, 1982 nt, Artificial Sequence
  mRNA product Design h-3 comprising derived and/or modified sequence from HRSV(A2)__F_DSCav1_mut0 (opt11)
gggagacccgugacccggaaguuguacggcuacgcgacuuucccucccacaaacccucgcgcccuuccuuuccuacuugggcccggcagaaagcuuaccauggaacuccuaauacuaaaggcaaacgcaaucacuacaauucuaaccgccgugacauucugcuucgccuccggacaaaacaucaccgaagaauuuuaccaauccacaugcucggccgucaguaaaggcuaccucucggcucuccgaaccggcugguacaccuccgucaucaccaucgaacucuccaacaucaaagaaaacaaaugcaacggcaccgacgccaaagucaaacuaaucaaacaagaacucgacaaauacaaaaacgccgucacagaacuccaacuacuaaugcaaucaacacccgcuacaggaagcggcuccgccaucgccagcggcguagcugucugcaaaguccuccaccucgaaggugaagucaacaaaaucaaaucagcccuacucagcacaaacaaagccguuguaagccuauccaacggcgucuccguacuaacauucaaaguccuugaccucaagaacuacaucgacaaacaacuucucccaauccuaaacaaacaaagcugcucaauuuccaacaucgaaacaguaaucgaauuucaacaaaaaaacaaccgacuccucgaaaucacccgcgaauuuuccguuaacgccggcguuacaacccccgucuccaccuacaugcucaccaauuccgaacuacuaucacucauaaacgacaugccuaucacaaacgaccaaaaaaaacuaaugucaaacaauguccaaaucguccgccagcaaagcuauuccaucaugugcaucaucaaagaggaaguccucgccuacguaguccaacugccccucuacggcgucauugauacccccugcuggaaacuccacaccuccccccucugcaccacaaacaccaaagaagguuccaacaucugccuaacacgaaccgacagaggcugguacugcgacaacgccggcagcgucuccuucuucccccaagcagaaaccuguaaaguccagucuaaccgcgucuucugcgacacaaugaacucaagaacccuaccuuccgaaguaaaccucugcaacguagacaucuucaacccuaaauacgacugcaaaaucaugacuucaaaaacagacguaagcucuuccguaaucacuucccucggcgccaucguauccugcuacgguaaaaccaaaugcaccgccuccaacaaaaaccgagggaucauaaaaaccuucuccaacggcugcgacuacguaucuaacaaaggcgucgacaccgucuccgucggcaacacccucuauuacguaaacaaacaagagggcaaaucacuauacgucaaaggcgagccaaucauaaacuucuaugacccacucgucuucccuucagacgaauuugaugccagcaucagccaagucaacgaaaaaaucaaccaaucacucgccuucauccgcaaaagcgacgaacuccuucacaacgucaacgcaggcaaaucaaccaccaacaucaugaucaccaccaucaucaucgucaucaucguuauccuacucagccucaucgcaguuggucuucuccuuuacugcaaagcccgcuccacccccgucacccucaguaaagaccaacucagcggaaucaacaacauagcauucuccaacuaaggacuaguggaagcauuuuccuggcugauuaaaagaaauuacucagcuauggucaucuguuccuguuagaaggcuaugcagcauauuauauacuaugcgcauguuaugaaaugcauaauaaaaaauuuuaaaaaaucuaaaagaucuaaaaaaaaaaaaaaaaaaaaaaaaaaaaaaaaaaaaaaaaaaaaaaaaaaaaaaaaaaaaaaaaugcaucccccccccccccccccccccccccccccccaaaggcucuuuucagagccaccagaauu

SEQ ID NO: 4171 - RNA, 2045 nt, Artificial Sequence
  mRNA product Design h-4 comprising derived and/or modified sequence from HRSV(A2)__F_DSCav1_mut0 (opt1)
gggagagggcgcuuggcuugcaaggacccugagcugcggcauugaagcacacccaacccaacucgacugaagucagccucacugaaccggaucugagaaucuucucucucugggcuugccagggcucuccgaaccuagcuagcauccucuucaauuccaacuagaaagcuuaccauggagcugcucauccugaaggccaacgccaucaccaccauccugacggcggugaccuucugcuucgccagcggccagaacaucaccgaggaguucuaccaguccacgugcagcgccgucuccaagggguaccucagcgcccugcggaccggcugguacaccuccgugaucaccaucgagcugagcaacaucaaggagaacaagugcaacgggaccgacgccaaggugaagcucaucaagcaggagcuggacaaguacaagaacgcggucacggagcugcagcuccugaugcaguccaccccggcaaccggcuccggcuccgccaucgcgagcggcgucgccgugugcaaggugcugcaccucgagggggaggucaacaagaucaagagcgcccugcuguccaccaacaaggccguggugagccucuccaacggcgucagcgugcugaccuucaaggugcuggaccucaagaacuacaucgacaagcagcugcugcccauccugaacaagcagagcugcuccaucagcaacaucgagacggugaucgaguuccagcagaagaacaaccggcuccuggagaucacccgcgaguucagcgugaacgccggggucaccacccccguguccacguacaugcugaccaacagcgagcuccugucccugaucaacgacaugccgaucaccaacgaccagaagaagcucaugagcaacaacgugcagaucguccggcagcaguccuacagcaucaugugcaucaucaaggaggaggugcuggcguacgugguccagcugccccucuacggcgugaucgacacccccugcuggaagcugcacacgagcccccugugcaccaccaacaccaaggagggguccaacaucugccucacgcgcaccgaccggggcugguacugcgacaacgccggcagcgucuccuucuucccgcaggccgagaccugcaaggugcagagcaaccgcguguucugcgacaccaugaacucccggacgcugcccagcgagguaaaccucugcaacgucgacaucuucaaccccaaguacgacugcaagaucaugaccuccaagaccgacgugagcuccagcgugaucaccucccugggggccaucgucagcugcuacggcaagacgaagugcaccgccagcaacaagaaccgggggaucaucaagaccuucuccaacggcugcgacuacgugagcaacaagggcguggacaccguguccgucgggaacacccuguacuacgugaacaagcaggagggcaagagccucuacgugaagggggagcccaucaucaacuucuacgacccgcuggucuuccccuccgacgaguucgacgcgagcaucucccaggugaacgagaagaucaaccagagccuggccuucauccgcaaguccgacgagcugcuccacaacgugaacgccggcaagagcacgaccaacaucaugaucaccaccaucaucaucgucaucaucgugauccugcugucccucaucgccguggggcugcugcucuacugcaaggcccggagcacgcccgucacccuguccaaggaccagcugagcggcaucaacaacaucgcguucuccaacugaggacuaguaauaaggaaacuguaugaaugucugugggcaggaagugaagagauccuucuguaaagguuuuuggaauuaugucugcugaauaauaaacuuuuuugaaauaauaaaucugguagaaaaaugagaucuaaaaaaaaaaaaaaaaaaaaaaaaaaaaaaaaaaaaaaaaaaaaaaaaaaaaaaaaaaaaaaaaugcaucccccccccccccccccccccccccccccccaaaggcucuuuucagagccaccagaauu

SEQ ID NO: 4172 - RNA, 2045 nt, Artificial Sequence
  mRNA product Design h-4 comprising derived and/or modified sequence from HRSV(A2)__F_DSCav1_mut0 (opt1)
gggagagggcgcuuggcuugcaaggacccugagcugcggcauugaagcacacccaacccaacucgacugaagucagccucacugaaccggaucugagaaucuucucucucugggcuugccagggcucuccgaaccuagcuagcauccucuucaauuccaacuagaaagcuuaccauggagcugcucauccugaaggccaacgccaucaccaccauccugacggcggugaccuucugcuucgccagcggccagaacaucaccgaggaguucuaccaguccacgugcagcgccgucuccaagggguaccucagcgcccugcgcaccggcugguacaccuccgugaucaccaucgagcugagcaacaucaaggagaacaagugcaacgggaccgacgccaaggugaagcucaucaagcaggagcuggacaaguacaagaacgcggucacggagcugcagcuccugaugcaguccacccccgccaccggcagcggguccgccaucgccagcggcguggcggugugcaagguccugcaccucgagggcgaggugaacaagaucaaguccgcccugcugagcaccaacaaggccguggucucccucagcaacgggguguccgugcugacguucaagguccuggaccucaagaacuacaucgacaagcagcugcugccgauccucaacaagcagagcugcuccaucagcaacaucgagaccgugaucgaguuccagcagaagaacaaccggcugcuggagaucacccgcgaguucuccgugaacgccggcgucaccacgcccgugagcaccuacaugcucaccaacagcgagcugcugucccucaucaacgacaugcccaucaccaacgaccagaagaagcugaugagcaacaacgugcagaucguccggcagcaguccuacagcaucaugugcaucaucaaggaggaggugcuggccuacgugguccagcucccccuguacggggugaucgacacgccgugcuggaagcugcacaccagcccccucugcaccaccaacacgaaggagggcuccaacaucugccugacccgcaccgaccgggggugguacugcgacaacgcgggcuccgugagcuucuucccccaggccgagaccugcaagguccaguccaaccgcguguucugcgacacgaugaacagccggacccuccccuccgaggucaaccugugcaacguggacaucuucaacccgaaguacgacugcaagaucaugaccagcaagaccgacguguccagcuccgucaucacgagccugggcgccaucguguccugcuacgggaagaccaagugcaccgccagcaacaagaaccggggcaucaucaagaccuucuccaacgggugcgacuacgugagcaacaagggcgucgacacggugagcgugggcaacacccucuacuacgucaacaagcaggaggggaagucccuguacgugaagggcgagcccaucaucaacuucuacgacccccugguguuccccagcgacgaguucgacgccuccaucagccaggucaacgagaagaucaaccagucccucgcguucauccgcaagagcgacgagcugcugcacaacgugaacgccgggaaguccaccaccaacaucaugaucaccacgaucaucaucgugaucaucgucauccuccugagccugaucgccgugggccuccugcuguacugcaaggcccgguccaccccggugacccugagcaaggaccagcucuccgggaucaacaacaucgccuucagcaacugaggacuaguaauaaggaaacuguaugaaugucugugggcaggaagugaagagauccuucuguaaagguuuuuggaauuaugucugcugaauaauaaacuuuuuugaaauaauaaaucugguagaaaaaugagaucuaaaaaaaaaaaaaaaaaaaaaaaaaaaaaaaaaaaaaaaaaaaaaaaaaaaaaaaaaaaaaaaaugcaucccccccccccccccccccccccccccccccaaaggcucuuuucagagccaccagaauu

SEQ ID NO: 4173 - RNA, 2045 nt, Artificial Sequence
  mRNA product Design h-4 comprising derived and/or modified sequence from HRSV(A2)__F_DSCav1_mut0 (opt2)
gggagagggcgcuuggcuugcaaggacccugagcugcggcauugaagcacacccaacccaacucgacugaagucagccucacugaaccggaucugagaaucuucucucucugggcuugccagggcucuccgaaccuagcuagcauccucuucaauuccaacuagaaagcuuaccauggagcuccucauccucaaggccaacgccaucaccaccauccucaccgccgucaccuucugcuucgccuccggccagaacaucaccgaggaguucuaccaguccaccugcuccgccgucuccaagggcuaccucuccgcccuccgcaccggcugguacaccuccgucaucaccaucgagcucuccaacaucaaggagaacaagugcaacggcaccgacgccaaggucaagcucaucaagcaggagcucgacaaguacaagaacgccgucaccgagcuccagcuccucaugcaguccacccccgccaccggcuccggcuccgccaucgccuccggcgucgccgucugcaagguccuccaccucgagggcgaggucaacaagaucaaguccgcccuccucuccaccaacaaggccgucgucucccucuccaacggcgucuccguccucaccuucaagguccucgaccucaagaacuacaucgacaagcagcuccuccccauccucaacaagcaguccugcuccaucuccaacaucgagaccgucaucgaguuccagcagaagaacaaccgccuccucgagaucacccgcgaguucuccgucaacgccggcgucaccacccccgucuccaccuacaugcucaccaacuccgagcuccucucccucaucaacgacaugcccaucaccaacgaccagaagaagcucauguccaacaacguccagaucguccgccagcaguccuacuccaucaugugcaucaucaaggaggagguccucgccuacgucguccagcucccccucuacggcgucaucgacacccccugcuggaagcuccacaccuccccccucugcaccaccaacaccaaggagggcuccaacaucugccucacccgcaccgaccgcggcugguacugcgacaacgccggcuccgucuccuucuucccccaggccgagaccugcaagguccaguccaaccgcgucuucugcgacaccaugaacucccgcacccuccccuccgaggucaaccucugcaacgucgacaucuucaaccccaaguacgacugcaagaucaugaccuccaagaccgacgucuccuccuccgucaucaccucccucggcgccaucgucuccugcuacggcaagaccaagugcaccgccuccaacaagaaccgcggcaucaucaagaccuucuccaacggcugcgacuacgucuccaacaagggcgucgacaccgucuccgucggcaacacccucuacuacgucaacaagcaggagggcaagucccucuacgucaagggcgagcccaucaucaacuucuacgacccccucgucuuccccuccgacgaguucgacgccuccaucucccaggucaacgagaagaucaaccagucccucgccuucauccgcaaguccgacgagcuccuccacaacgucaacgccggcaaguccaccaccaacaucaugaucaccaccaucaucaucgucaucaucgucauccuccucucccucaucgccgucggccuccuccucuacugcaaggcccgcuccacccccgucacccucuccaaggaccagcucuccggcaucaacaacaucgccuucuccaacugaggacuaguaauaaggaaacuguaugaaugucugugggcaggaagugaagagauccuucuguaaagguuuuuggaauuaugucugcugaauaauaaacuuuuuugaaauaauaaaucugguagaaaaaugagaucuaaaaaaaaaaaaaaaaaaaaaaaaaaaaaaaaaaaaaaaaaaaaaaaaaaaaaaaaaaaaaaaaugcaucccccccccccccccccccccccccccccccaaaggcucuuuucagagccaccagaauu

SEQ ID NO: 4174 - RNA, 2045 nt, Artificial Sequence
  mRNA product Design h-4 comprising derived and/or modified sequence from HRSV(A2)__F_DSCav1_mut0 (opt3)
gggagagggcgcuuggcuugcaaggacccugagcugcggcauugaagcacacccaacccaacucgacugaagucagccucacugaaccggaucugagaaucuucucucucugggcuugccagggcucuccgaaccuagcuagcauccucuucaauuccaacuagaaagcuuaccauggagcugcucauccuuaaggccaacgcuauuaccacaauacugacugcagugacguucugcuuugccagcggccagaauaucaccgaagaguucuaccaauccacauguucugcggucucaaaaggguauuugagugcuuuaagaacuggaugguacaccagcguuauuacaaucgaacuguccaacauuaaggagaauaaaugcaacgguaccgacgccaaggugaaacuaaucaagcaggaacucgauaaguauaaaaaugcaguaacugagcugcagcuucugaugcagucuacacccgccaccggcucggggucagcuauagcaagcggaguggccgucuguaagguguugcaccucgagggcgaaguuaacaaaaucaagagugcucugcuguccacgaauaaagccguggucucucucagcaacgguguguccguauuaacuuuuaagguucuggaccuuaagaauuacauugauaaacaauugcugccuauccuaaacaagcagucaugcaguauuagcaauaucgagaccgugauagaguuccagcagaaaaacaauaggcuccuggaaauuacacgggaguuuucugucaacgcgggggugacuaccccaguguccacauauaugcuuaccaauucagaacuguugagccucaucaacgacaugccgauuacgaacgaucaaaagaaacugaugaguaauaacguccagaucguucgccagcagucuuacuccaucauguguauuauaaaggaggaaguguuagcauauguagugcaacugccccucuacggagucaucgacacuccuugcuggaaacuucauacaagcccacuguguaccacuaauacaaaggagggcucgaacauuugcuugacccgaacggaucguggcugguacugugacaaugccgggucuguguccuucuuuccccaggcugaaaccugcaagguucagucaaacagaguguucugugauacaaugaauaguagaacucugccuagcgaggucaaccucugcaauguggacaucuuuaacccaaaauaugauugcaagauaaugaccuccaaaacagacguaucuagcucaguuauuaccagucugggagccaucguguccuguuacgguaagacuaaaugcacagcaagcaauaagaacaggggcaucauuaagaccuucucuaaugggugugauuaugucucaaacaaaggaguggacacugucagugugggcaauacgcuuuacuauguuaacaagcaagaggguaaaagccuguacgugaagggggaacccaucauuaacuuuuaugacccuuugguauucccauccgaugaguuugacgcuucuauaucgcaggucaaugagaaaaucaaccagagccucgccuucauucggaaguccgaugaacuguuacacaaugugaacgcgggaaagucaacaaccaauaucaugaucacuaccauuauaaucguuauuaucgugauucugcuaagucucaucgccgucggccugcuuuuguacugcaaagcacgcucuacaccggugacccugagcaaggaccagcucuccggcauaaacaauaucgcuuucucaaacugaggacuaguaauaaggaaacuguaugaaugucugugggcaggaagugaagagauccuucuguaaagguuuuuggaauuaugucugcugaauaauaaacuuuuuugaaauaauaaaucugguagaaaaaugagaucuaaaaaaaaaaaaaaaaaaaaaaaaaaaaaaaaaaaaaaaaaaaaaaaaaaaaaaaaaaaaaaaaugcaucccccccccccccccccccccccccccccccaaaggcucuuuucagagccaccagaauu

SEQ ID NO: 4175 - RNA, 2045 nt, Artificial Sequence
  mRNA product Design h-4 comprising derived and/or modified sequence from HRSV(A2)__F_DSCav1_mut0 (opt4)
gggagagggcgcuuggcuugcaaggacccugagcugcggcauugaagcacacccaacccaacucgacugaagucagccucacugaaccggaucugagaaucuucucucucugggcuugccagggcucuccgaaccuagcuagcauccucuucaauuccaacuagaaagcuuaccauggagcugcugauccugaaggccaacgccaucaccaccauccugaccgccgugaccuucugcuucgccagcggccagaacaucaccgaggaguucuaccagagcaccugcagcgccgugagcaagggcuaccugagcgcccugagaaccggcugguacaccagcgugaucaccaucgagcugagcaacaucaaggagaacaagugcaacggcaccgacgccaaggugaagcugaucaagcaggagcuggacaaguacaagaacgccgugaccgagcugcagcugcugaugcagagcacccccgccaccggcagcggcagcgccaucgccagcggcguggccgugugcaaggugcugcaccuggagggcgaggugaacaagaucaagagcgcccugcugagcaccaacaaggccguggugagccugagcaacggcgugagcgugcugaccuucaaggugcuggaccugaagaacuacaucgacaagcagcugcugcccauccugaacaagcagagcugcagcaucagcaacaucgagaccgugaucgaguuccagcagaagaacaacagacugcuggagaucaccagagaguucagcgugaacgccggcgugaccacccccgugagcaccuacaugcugaccaacagcgagcugcugagccugaucaacgacaugcccaucaccaacgaccagaagaagcugaugagcaacaacgugcagaucgugagacagcagagcuacagcaucaugugcaucaucaaggaggaggugcuggccuacguggugcagcugccccuguacggcgugaucgacacccccugcuggaagcugcacaccagcccccugugcaccaccaacaccaaggagggcagcaacaucugccugaccagaaccgacagaggcugguacugcgacaacgccggcagcgugagcuucuucccccaggccgagaccugcaaggugcagagcaacagaguguucugcgacaccaugaacagcagaacccugcccagcgaggugaaccugugcaacguggacaucuucaaccccaaguacgacugcaagaucaugaccagcaagaccgacgugagcagcagcgugaucaccagccugggcgccaucgugagcugcuacggcaagaccaagugcaccgccagcaacaagaacagaggcaucaucaagaccuucagcaacggcugcgacuacgugagcaacaagggcguggacaccgugagcgugggcaacacccuguacuacgugaacaagcaggagggcaagagccuguacgugaagggcgagcccaucaucaacuucuacgacccccugguguuccccagcgacgaguucgacgccagcaucagccaggugaacgagaagaucaaccagagccuggccuucaucagaaagagcgacgagcugcugcacaacgugaacgccggcaagagcaccaccaacaucaugaucaccaccaucaucaucgugaucaucgugauccugcugagccugaucgccgugggccugcugcuguacugcaaggccagaagcacccccgugacccugagcaaggaccagcugagcggcaucaacaacaucgccuucagcaacugaggacuaguaauaaggaaacuguaugaaugucugugggcaggaagugaagagauccuucuguaaagguuuuuggaauuaugucugcugaauaauaaacuuuuuugaaauaauaaaucugguagaaaaaugagaucuaaaaaaaaaaaaaaaaaaaaaaaaaaaaaaaaaaaaaaaaaaaaaaaaaaaaaaaaaaaaaaaaugcaucccccccccccccccccccccccccccccccaaaggcucuuuucagagccaccagaauu

SEQ ID NO: 4176 - RNA, 2045 nt, Artificial Sequence
  mRNA product Design h-4 comprising derived and/or modified sequence from HRSV(A2)__F_DSCav1_mut0 (opt5)
gggagagggcgcuuggcuugcaaggacccugagcugcggcauugaagcacacccaacccaacucgacugaagucagccucacugaaccggaucugagaaucuucucucucugggcuugccagggcucuccgaaccuagcuagcauccucuucaauuccaacuagaaagcuuaccauggagcugcucauccugaaggccaacgcuauuaccacaauccuuacggccgugaccuucugcuuugcgagcggccagaauauuacagaagaguucuaccaauccaccuguucugcugucagcaaaggguaucuguccgcccucagaacaggaugguacaccucuguuaucacaauugaacugagcaacaucaaggagaauaaaugcaacggcaccgacgccaaggugaaacuuaucaagcaggaacuggauaaguauaaaaaugcugugacggagcuccagcugcugaugcaguccacccccgccacagggucuggaagcgcuauugccuccggcgucgcgguguguaagguucuccaccuggagggggaagugaacaaaaucaagagcgcccuucugucuaccaauaaagcugucgugucccucagcaacggaguuucugugcugacauuuaagguccuugaccugaagaauuacauugauaaacaacuccugccuauccugaacaagcaguccugcagcauuucuaauaucgagaccgugauugaguuccagcagaaaaacaaucggcuccuggaaaucacgcgcgaguuuuccgugaacgccggcgucacaaccccgguuagcacauauaugcuuaccaauuccgaacugcucucucugaucaacgacaugcccauuaccaacgaucaaaagaaacuuaugagcaauaacgugcagaucgugagacagcaguccuacagcauuauguguaucauuaaggaggaaguccuggcuuaugugguucaacucccucuguacggcgugaucgacacacccugcuggaaacugcauacgucuccucucuguaccacaaauaccaaggagggguccaacaucugccugacacggaccgaucgcggaugguacugugacaaugccggcagcgucucuuucuuuccccaggcggaaacgugcaaggugcagagcaacagaguuuucugugauacaaugaacuccagaacccugccuucugaggugaaucucugcaaugucgacauuuuuaacccgaaauaugauugcaagaucaugaccagcaaaacagacguguccagcucugucauuaccucccugggggccaucgugagcuguuacggaaagacaaaaugcacggcuucuaauaagaaccggggcauuaucaagaccuucuccaaugggugugauuauguuagcaacaaaggaguggacacagucuccgugggcaauacccuuuacuauguuaacaagcaagagggcaaaucucuguacgugaagggggaacccaucauuaacuuuuaugacccucucgucuuccccagcgaugaguuugacgccuccaucucucaggugaaugagaaaauuaaccagagccuggcuuucauccgcaaguccgaugaacugcuccacaaugugaacgccggaaagagcacaaccaauauuaugaucacgaccauuaucaucguuauuaucgucauucugcuuucucugaucgccgugggccuccugcuguacugcaaagcuagauccacaccugugacccuuagcaaggaccagcucucugggauuaacaauaucgcguucuccaacugaggacuaguaauaaggaaacuguaugaaugucugugggcaggaagugaagagauccuucuguaaagguuuuuggaauuaugucugcugaauaauaaacuuuuuugaaauaauaaaucugguagaaaaaugagaucuaaaaaaaaaaaaaaaaaaaaaaaaaaaaaaaaaaaaaaaaaaaaaaaaaaaaaaaaaaaaaaaaugcaucccccccccccccccccccccccccccccccaaaggcucuuuucagagccaccagaauu

SEQ ID NO: 4177 - RNA, 2045 nt, Artificial Sequence
  mRNA product Design h-4 comprising derived and/or modified sequence from HRSV(A2)__F_DSCav1_mut0 (opt6)
gggagagggcgcuuggcuugcaaggacccugagcugcggcauugaagcacacccaacccaacucgacugaagucagccucacugaaccggaucugagaaucuucucucucugggcuugccagggcucuccgaaccuagcuagcauccucuucaauuccaacuagaaagcuuaccauggaacuacuaauacuaaaagccaaugcaauaacaaccauacuaaccgccguaacauuuuguuucgcaucaggucaaaacauaaccgaagaauuuuaucaaucaacaugcucagcaguaucaaaaggauacuuauccgcucuaagaacaggaugguacacaaguguaauuacaauagagcucucaaacauaaaagaaaacaaaugcaauggaacugacgcaaaaguuaaacuuauaaaacaagaacuagauaaauauaaaaaugcaguaaccgaauuacaacuccuaaugcaauccacaccugcuaccgguuccggaucagccauagcaucuggaguagccguaugcaaaguccuccaccuagaaggagaaguaaauaaaaucaaaucagcacuauuaucuaccaauaaagcaguugucucacuauccaauggcguaucaguacuaacauucaaaguauuagaccuuaaaaacuacauagacaaacaacuauuaccaauucugaacaaacaauccuguucaauaucaaacaucgaaacgguaauagaauuucaacaaaaaaauaacagauuacuugaaauaacaagagaauuuucaguaaaugcaggaguuacaacacccgucuccaccuacaugcucacaaauucagaauuauuaucacuuauaaacgacaugccaauaacuaacgaccaaaaaaaacuaaugucaaacaauguccaaauaguccgacaacaauccuacucaauaaugugcauuauaaaagaagaaguccuagccuacguuguccaacuacccuuauauggaguaauagauaccccaugcuggaaacuucauaccuccccccuaugcacaacaaacacaaaagaaggcucaaacaucugcuuaacacguacagaccgagguugguacugugauaacgcaggauccguaucauuuuucccacaagcagaaacaugcaaaguacaaucaaaccgcguuuuuugugacaccaugaacagcagaacccucccuucagaaguaaaccuaugcaacgucgauauauuuaacccaaaauacgauugcaaaauaaugacaucaaaaaccgaugucucaucuucaguaauaaccucucuaggagcaauagucucauguuacggaaaaacaaaaugcacagcaaguaauaaaaauagaggaauaauaaaaacauucucuaauggcugcgacuacguauccaauaaaggcguugacacaguauccguaggcaacacacucuacuauguuaacaaacaagaaggaaaaaguuuauacguuaaaggagaaccaauuauaaacuuuuacgacccacucguauucccaucugaugaauuugacgcaucaaucucacaaguaaaugaaaaaaucaaucagucccuugccuuuauaagaaaaucagaugaacuuuuacacaacguuaacgccggaaaaucaacaaccaauauaaugaucacaaccauaauaauaguuauaauuguaauuuuauuauccuuaauagccgucggacuacuacuauacugcaaagcaagaucuacacccguaacccuaucaaaagaccaacuaaguggaauaaauaacauugcauucucaaauuaaggacuaguaauaaggaaacuguaugaaugucugugggcaggaagugaagagauccuucuguaaagguuuuuggaauuaugucugcugaauaauaaacuuuuuugaaauaauaaaucugguagaaaaaugagaucuaaaaaaaaaaaaaaaaaaaaaaaaaaaaaaaaaaaaaaaaaaaaaaaaaaaaaaaaaaaaaaaaugcaucccccccccccccccccccccccccccccccaaaggcucuuuucagagccaccagaauu

SEQ ID NO: 4178 - RNA, 2045 nt, Artificial Sequence
  mRNA product Design h-4 comprising derived and/or modified sequence from HRSV(A2)__F_DSCav1_mut0 (opt11)
gggagagggcgcuuggcuugcaaggacccugagcugcggcauugaagcacacccaacccaacucgacugaagucagccucacugaaccggaucugagaaucuucucucucugggcuugccagggcucuccgaaccuagcuagcauccucuucaauuccaacuagaaagcuuaccauggaacuccuaauacuaaaggcaaacgcaaucacuacaauucuaaccgccgugacauucugcuucgccuccggacaaaacaucaccgaagaauuuuaccaauccacaugcucggccgucaguaaaggcuaccucucggcucuccgaaccggcugguacaccuccgucaucaccaucgaacucuccaacaucaaagaaaacaaaugcaacggcaccgacgccaaagucaaacuaaucaaacaagaacucgacaaauacaaaaacgccgucacagaacuccaacuacuaaugcaaucaacacccgcuacaggaagcggcuccgccaucgccagcggcguagcugucugcaaaguccuccaccucgaaggugaagucaacaaaaucaaaucagcccuacucagcacaaacaaagccguuguaagccuauccaacggcgucuccguacuaacauucaaaguccuugaccucaagaacuacaucgacaaacaacuucucccaauccuaaacaaacaaagcugcucaauuuccaacaucgaaacaguaaucgaauuucaacaaaaaaacaaccgacuccucgaaaucacccgcgaauuuuccguuaacgccggcguuacaacccccgucuccaccuacaugcucaccaauuccgaacuacuaucacucauaaacgacaugccuaucacaaacgaccaaaaaaaacuaaugucaaacaauguccaaaucguccgccagcaaagcuauuccaucaugugcaucaucaaagaggaaguccucgccuacguaguccaacugccccucuacggcgucauugauacccccugcuggaaacuccacaccuccccccucugcaccacaaacaccaaagaagguuccaacaucugccuaacacgaaccgacagaggcugguacugcgacaacgccggcagcgucuccuucuucccccaagcagaaaccuguaaaguccagucuaaccgcgucuucugcgacacaaugaacucaagaacccuaccuuccgaaguaaaccucugcaacguagacaucuucaacccuaaauacgacugcaaaaucaugacuucaaaaacagacguaagcucuuccguaaucacuucccucggcgccaucguauccugcuacgguaaaaccaaaugcaccgccuccaacaaaaaccgagggaucauaaaaaccuucuccaacggcugcgacuacguaucuaacaaaggcgucgacaccgucuccgucggcaacacccucuauuacguaaacaaacaagagggcaaaucacuauacgucaaaggcgagccaaucauaaacuucuaugacccacucgucuucccuucagacgaauuugaugccagcaucagccaagucaacgaaaaaaucaaccaaucacucgccuucauccgcaaaagcgacgaacuccuucacaacgucaacgcaggcaaaucaaccaccaacaucaugaucaccaccaucaucaucgucaucaucguuauccuacucagccucaucgcaguuggucuucuccuuuacugcaaagcccgcuccacccccgucacccucaguaaagaccaacucagcggaaucaacaacauagcauucuccaacuaaggacuaguaauaaggaaacuguaugaaugucugugggcaggaagugaagagauccuucuguaaagguuuuuggaauuaugucugcugaauaauaaacuuuuuugaaauaauaaaucugguagaaaaaugagaucuaaaaaaaaaaaaaaaaaaaaaaaaaaaaaaaaaaaaaaaaaaaaaaaaaaaaaaaaaaaaaaaaugcaucccccccccccccccccccccccccccccccaaaggcucuuuucagagccaccagaauu

SEQ ID NO: 4179 - RNA, 2061 nt, Artificial Sequence
  mRNA product Design h-5 comprising derived and/or modified sequence from HRSV(A2)__F_DSCav1_mut0 (opt1)
gggagagggcgcuuggcuugcaaggacccugagcugcggcauugaagcacacccaacccaacucgacugaagucagccucacugaaccggaucugagaaucuucucucucugggcuugccagggcucuccgaaccuagcuagcauccucuucaauuccaacuagaaagcuuaccauggagcugcucauccugaaggccaacgccaucaccaccauccugacggcggugaccuucugcuucgccagcggccagaacaucaccgaggaguucuaccaguccacgugcagcgccgucuccaagggguaccucagcgcccugcggaccggcugguacaccuccgugaucaccaucgagcugagcaacaucaaggagaacaagugcaacgggaccgacgccaaggugaagcucaucaagcaggagcuggacaaguacaagaacgcggucacggagcugcagcuccugaugcaguccaccccggcaaccggcuccggcuccgccaucgcgagcggcgucgccgugugcaaggugcugcaccucgagggggaggucaacaagaucaagagcgcccugcuguccaccaacaaggccguggugagccucuccaacggcgucagcgugcugaccuucaaggugcuggaccucaagaacuacaucgacaagcagcugcugcccauccugaacaagcagagcugcuccaucagcaacaucgagacggugaucgaguuccagcagaagaacaaccggcuccuggagaucacccgcgaguucagcgugaacgccggggucaccacccccguguccacguacaugcugaccaacagcgagcuccugucccugaucaacgacaugccgaucaccaacgaccagaagaagcucaugagcaacaacgugcagaucguccggcagcaguccuacagcaucaugugcaucaucaaggaggaggugcuggcguacgugguccagcugccccucuacggcgugaucgacacccccugcuggaagcugcacacgagcccccugugcaccaccaacaccaaggagggguccaacaucugccucacgcgcaccgaccggggcugguacugcgacaacgccggcagcgucuccuucuucccgcaggccgagaccugcaaggugcagagcaaccgcguguucugcgacaccaugaacucccggacgcugcccagcgagguaaaccucugcaacgucgacaucuucaaccccaaguacgacugcaagaucaugaccuccaagaccgacgugagcuccagcgugaucaccucccugggggccaucgucagcugcuacggcaagacgaagugcaccgccagcaacaagaaccgggggaucaucaagaccuucuccaacggcugcgacuacgugagcaacaagggcguggacaccguguccgucgggaacacccuguacuacgugaacaagcaggagggcaagagccucuacgugaagggggagcccaucaucaacuucuacgacccgcuggucuuccccuccgacgaguucgacgcgagcaucucccaggugaacgagaagaucaaccagagccuggccuucauccgcaaguccgacgagcugcuccacaacgugaacgccggcaagagcacgaccaacaucaugaucaccaccaucaucaucgucaucaucgugauccugcugucccucaucgccguggggcugcugcucuacugcaaggcccggagcacgcccgucacccuguccaaggaccagcugagcggcaucaacaacaucgcguucuccaacugaggacuaguacuggcugcaucucccuuuccucuguccuccauccuucucccaggauggugaagggggaccugguacccagugauccccaccccaggauccuaaaucaugacuuaccugcuaauaaaaacucauuggaaaagugagaagaucuaaaaaaaaaaaaaaaaaaaaaaaaaaaaaaaaaaaaaaaaaaaaaaaaaaaaaaaaaaaaaaaaugcaucccccccccccccccccccccccccccccccaaaggcucuuuucagagccaccagaauu

SEQ ID NO: 4180 - RNA, 2061 nt, Artificial Sequence
  mRNA product Design h-5 comprising derived and/or modified sequence from HRSV(A2)__F_DSCav1_mut0 (opt1)
gggagagggcgcuuggcuugcaaggacccugagcugcggcauugaagcacacccaacccaacucgacugaagucagccucacugaaccggaucugagaaucuucucucucugggcuugccagggcucuccgaaccuagcuagcauccucuucaauuccaacuagaaagcuuaccauggagcugcucauccugaaggccaacgccaucaccaccauccugacggcggugaccuucugcuucgccagcggccagaacaucaccgaggaguucuaccaguccacgugcagcgccgucuccaagggguaccucagcgcccugcgcaccggcugguacaccuccgugaucaccaucgagcugagcaacaucaaggagaacaagugcaacgggaccgacgccaaggugaagcucaucaagcaggagcuggacaaguacaagaacgcggucacggagcugcagcuccugaugcaguccacccccgccaccggcagcggguccgccaucgccagcggcguggcggugugcaagguccugcaccucgagggcgaggugaacaagaucaaguccgcccugcugagcaccaacaaggccguggucucccucagcaacgggguguccgugcugacguucaagguccuggaccucaagaacuacaucgacaagcagcugcugccgauccucaacaagcagagcugcuccaucagcaacaucgagaccgugaucgaguuccagcagaagaacaaccggcugcuggagaucacccgcgaguucuccgugaacgccggcgucaccacgcccgugagcaccuacaugcucaccaacagcgagcugcugucccucaucaacgacaugcccaucaccaacgaccagaagaagcugaugagcaacaacgugcagaucguccggcagcaguccuacagcaucaugugcaucaucaaggaggaggugcuggccuacgugguccagcucccccuguacggggugaucgacacgccgugcuggaagcugcacaccagcccccucugcaccaccaacacgaaggagggcuccaacaucugccugacccgcaccgaccgggggugguacugcgacaacgcgggcuccgugagcuucuucccccaggccgagaccugcaagguccaguccaaccgcguguucugcgacacgaugaacagccggacccuccccuccgaggucaaccugugcaacguggacaucuucaacccgaaguacgacugcaagaucaugaccagcaagaccgacguguccagcuccgucaucacgagccugggcgccaucguguccugcuacgggaagaccaagugcaccgccagcaacaagaaccggggcaucaucaagaccuucuccaacgggugcgacuacgugagcaacaagggcgucgacacggugagcgugggcaacacccucuacuacgucaacaagcaggaggggaagucccuguacgugaagggcgagcccaucaucaacuucuacgacccccugguguuccccagcgacgaguucgacgccuccaucagccaggucaacgagaagaucaaccagucccucgcguucauccgcaagagcgacgagcugcugcacaacgugaacgccgggaaguccaccaccaacaucaugaucaccacgaucaucaucgugaucaucgucauccuccugagccugaucgccgugggccuccugcuguacugcaaggcccgguccaccccggugacccugagcaaggaccagcucuccgggaucaacaacaucgccuucagcaacugaggacuaguacuggcugcaucucccuuuccucuguccuccauccuucucccaggauggugaagggggaccugguacccagugauccccaccccaggauccuaaaucaugacuuaccugcuaauaaaaacucauuggaaaagugagaagaucuaaaaaaaaaaaaaaaaaaaaaaaaaaaaaaaaaaaaaaaaaaaaaaaaaaaaaaaaaaaaaaaaugcaucccccccccccccccccccccccccccccccaaaggcucuuuucagagccaccagaauu

SEQ ID NO: 4181 - RNA, 2061 nt, Artificial Sequence
  mRNA product Design h-5 comprising derived and/or modified sequence from HRSV(A2)__F_DSCav1_mut0 (opt2)
gggagagggcgcuuggcuugcaaggacccugagcugcggcauugaagcacacccaacccaacucgacugaagucagccucacugaaccggaucugagaaucuucucucucugggcuugccagggcucuccgaaccuagcuagcauccucuucaauuccaacuagaaagcuuaccauggagcuccucauccucaaggccaacgccaucaccaccauccucaccgccgucaccuucugcuucgccuccggccagaacaucaccgaggaguucuaccaguccaccugcuccgccgucuccaagggcuaccucuccgcccuccgcaccggcugguacaccuccgucaucaccaucgagcucuccaacaucaaggagaacaagugcaacggcaccgacgccaaggucaagcucaucaagcaggagcucgacaaguacaagaacgccgucaccgagcuccagcuccucaugcaguccacccccgccaccggcuccggcuccgccaucgccuccggcgucgccgucugcaagguccuccaccucgagggcgaggucaacaagaucaaguccgcccuccucuccaccaacaaggccgucgucucccucuccaacggcgucuccguccucaccuucaagguccucgaccucaagaacuacaucgacaagcagcuccuccccauccucaacaagcaguccugcuccaucuccaacaucgagaccgucaucgaguuccagcagaagaacaaccgccuccucgagaucacccgcgaguucuccgucaacgccggcgucaccacccccgucuccaccuacaugcucaccaacuccgagcuccucucccucaucaacgacaugcccaucaccaacgaccagaagaagcucauguccaacaacguccagaucguccgccagcaguccuacuccaucaugugcaucaucaaggaggagguccucgccuacgucguccagcucccccucuacggcgucaucgacacccccugcuggaagcuccacaccuccccccucugcaccaccaacaccaaggagggcuccaacaucugccucacccgcaccgaccgcggcugguacugcgacaacgccggcuccgucuccuucuucccccaggccgagaccugcaagguccaguccaaccgcgucuucugcgacaccaugaacucccgcacccuccccuccgaggucaaccucugcaacgucgacaucuucaaccccaaguacgacugcaagaucaugaccuccaagaccgacgucuccuccuccgucaucaccucccucggcgccaucgucuccugcuacggcaagaccaagugcaccgccuccaacaagaaccgcggcaucaucaagaccuucuccaacggcugcgacuacgucuccaacaagggcgucgacaccgucuccgucggcaacacccucuacuacgucaacaagcaggagggcaagucccucuacgucaagggcgagcccaucaucaacuucuacgacccccucgucuuccccuccgacgaguucgacgccuccaucucccaggucaacgagaagaucaaccagucccucgccuucauccgcaaguccgacgagcuccuccacaacgucaacgccggcaaguccaccaccaacaucaugaucaccaccaucaucaucgucaucaucgucauccuccucucccucaucgccgucggccuccuccucuacugcaaggcccgcuccacccccgucacccucuccaaggaccagcucuccggcaucaacaacaucgccuucuccaacugaggacuaguacuggcugcaucucccuuuccucuguccuccauccuucucccaggauggugaagggggaccugguacccagugauccccaccccaggauccuaaaucaugacuuaccugcuaauaaaaacucauuggaaaagugagaagaucuaaaaaaaaaaaaaaaaaaaaaaaaaaaaaaaaaaaaaaaaaaaaaaaaaaaaaaaaaaaaaaaaugcaucccccccccccccccccccccccccccccccaaaggcucuuuucagagccaccagaauu

SEQ ID NO: 4182 - RNA, 2061 nt, Artificial Sequence
  mRNA product Design h-5 comprising derived and/or modified sequence from HRSV(A2)__F_DSCav1_mut0 (opt3)
gggagagggcgcuuggcuugcaaggacccugagcugcggcauugaagcacacccaacccaacucgacugaagucagccucacugaaccggaucugagaaucuucucucucugggcuugccagggcucuccgaaccuagcuagcauccucuucaauuccaacuagaaagcuuaccauggagcugcucauccuuaaggccaacgcuauuaccacaauacugacugcagugacguucugcuuugccagcggccagaauaucaccgaagaguucuaccaauccacauguucugcggucucaaaaggguauuugagugcuuuaagaacuggaugguacaccagcguuauuacaaucgaacuguccaacauuaaggagaauaaaugcaacgguaccgacgccaaggugaaacuaaucaagcaggaacucgauaaguauaaaaaugcaguaacugagcugcagcuucugaugcagucuacacccgccaccggcucggggucagcuauagcaagcggaguggccgucuguaagguguugcaccucgagggcgaaguuaacaaaaucaagagugcucugcuguccacgaauaaagccguggucucucucagcaacgguguguccguauuaacuuuuaagguucuggaccuuaagaauuacauugauaaacaauugcugccuauccuaaacaagcagucaugcaguauuagcaauaucgagaccgugauagaguuccagcagaaaaacaauaggcuccuggaaauuacacgggaguuuucugucaacgcgggggugacuaccccaguguccacauauaugcuuaccaauucagaacuguugagccucaucaacgacaugccgauuacgaacgaucaaaagaaacugaugaguaauaacguccagaucguucgccagcagucuuacuccaucauguguauuauaaaggaggaaguguuagcauauguagugcaacugccccucuacggagucaucgacacuccuugcuggaaacuucauacaagcccacuguguaccacuaauacaaaggagggcucgaacauuugcuugacccgaacggaucguggcugguacugugacaaugccgggucuguguccuucuuuccccaggcugaaaccugcaagguucagucaaacagaguguucugugauacaaugaauaguagaacucugccuagcgaggucaaccucugcaauguggacaucuuuaacccaaaauaugauugcaagauaaugaccuccaaaacagacguaucuagcucaguuauuaccagucugggagccaucguguccuguuacgguaagacuaaaugcacagcaagcaauaagaacaggggcaucauuaagaccuucucuaaugggugugauuaugucucaaacaaaggaguggacacugucagugugggcaauacgcuuuacuauguuaacaagcaagaggguaaaagccuguacgugaagggggaacccaucauuaacuuuuaugacccuuugguauucccauccgaugaguuugacgcuucuauaucgcaggucaaugagaaaaucaaccagagccucgccuucauucggaaguccgaugaacuguuacacaaugugaacgcgggaaagucaacaaccaauaucaugaucacuaccauuauaaucguuauuaucgugauucugcuaagucucaucgccgucggccugcuuuuguacugcaaagcacgcucuacaccggugacccugagcaaggaccagcucuccggcauaaacaauaucgcuuucucaaacugaggacuaguacuggcugcaucucccuuuccucuguccuccauccuucucccaggauggugaagggggaccugguacccagugauccccaccccaggauccuaaaucaugacuuaccugcuaauaaaaacucauuggaaaagugagaagaucuaaaaaaaaaaaaaaaaaaaaaaaaaaaaaaaaaaaaaaaaaaaaaaaaaaaaaaaaaaaaaaaaugcaucccccccccccccccccccccccccccccccaaaggcucuuuucagagccaccagaauu

SEQ ID NO: 4183 - RNA, 2061 nt, Artificial Sequence
  mRNA product Design h-5 comprising derived and/or modified sequence from HRSV(A2)__F_DSCav1_mut0 (opt4)
gggagagggcgcuuggcuugcaaggacccugagcugcggcauugaagcacacccaacccaacucgacugaagucagccucacugaaccggaucugagaaucuucucucucugggcuugccagggcucuccgaaccuagcuagcauccucuucaauuccaacuagaaagcuuaccauggagcugcugauccugaaggccaacgccaucaccaccauccugaccgccgugaccuucugcuucgccagcggccagaacaucaccgaggaguucuaccagagcaccugcagcgccgugagcaagggcuaccugagcgcccugagaaccggcugguacaccagcgugaucaccaucgagcugagcaacaucaaggagaacaagugcaacggcaccgacgccaaggugaagcugaucaagcaggagcuggacaaguacaagaacgccgugaccgagcugcagcugcugaugcagagcacccccgccaccggcagcggcagcgccaucgccagcggcguggccgugugcaaggugcugcaccuggagggcgaggugaacaagaucaagagcgcccugcugagcaccaacaaggccguggugagccugagcaacggcgugagcgugcugaccuucaaggugcuggaccugaagaacuacaucgacaagcagcugcugcccauccugaacaagcagagcugcagcaucagcaacaucgagaccgugaucgaguuccagcagaagaacaacagacugcuggagaucaccagagaguucagcgugaacgccggcgugaccacccccgugagcaccuacaugcugaccaacagcgagcugcugagccugaucaacgacaugcccaucaccaacgaccagaagaagcugaugagcaacaacgugcagaucgugagacagcagagcuacagcaucaugugcaucaucaaggaggaggugcuggccuacguggugcagcugccccuguacggcgugaucgacacccccugcuggaagcugcacaccagcccccugugcaccaccaacaccaaggagggcagcaacaucugccugaccagaaccgacagaggcugguacugcgacaacgccggcagcgugagcuucuucccccaggccgagaccugcaaggugcagagcaacagaguguucugcgacaccaugaacagcagaacccugcccagcgaggugaaccugugcaacguggacaucuucaaccccaaguacgacugcaagaucaugaccagcaagaccgacgugagcagcagcgugaucaccagccugggcgccaucgugagcugcuacggcaagaccaagugcaccgccagcaacaagaacagaggcaucaucaagaccuucagcaacggcugcgacuacgugagcaacaagggcguggacaccgugagcgugggcaacacccuguacuacgugaacaagcaggagggcaagagccuguacgugaagggcgagcccaucaucaacuucuacgacccccugguguuccccagcgacgaguucgacgccagcaucagccaggugaacgagaagaucaaccagagccuggccuucaucagaaagagcgacgagcugcugcacaacgugaacgccggcaagagcaccaccaacaucaugaucaccaccaucaucaucgugaucaucgugauccugcugagccugaucgccgugggccugcugcuguacugcaaggccagaagcacccccgugacccugagcaaggaccagcugagcggcaucaacaacaucgccuucagcaacugaggacuaguacuggcugcaucucccuuuccucuguccuccauccuucucccaggauggugaagggggaccugguacccagugauccccaccccaggauccuaaaucaugacuuaccugcuaauaaaaacucauuggaaaagugagaagaucuaaaaaaaaaaaaaaaaaaaaaaaaaaaaaaaaaaaaaaaaaaaaaaaaaaaaaaaaaaaaaaaaugcaucccccccccccccccccccccccccccccccaaaggcucuuuucagagccaccagaauu

SEQ ID NO: 4184 - RNA, 2061 nt, Artificial Sequence
  mRNA product Design h-5 comprising derived and/or modified sequence from HRSV(A2)__F_DSCav1_mut0 (opt5)
gggagagggcgcuuggcuugcaaggacccugagcugcggcauugaagcacacccaacccaacucgacugaagucagccucacugaaccggaucugagaaucuucucucucugggcuugccagggcucuccgaaccuagcuagcauccucuucaauuccaacuagaaagcuuaccauggagcugcucauccugaaggccaacgcuauuaccacaauccuuacggccgugaccuucugcuuugcgagcggccagaauauuacagaagaguucuaccaauccaccuguucugcugucagcaaaggguaucuguccgcccucagaacaggaugguacaccucuguuaucacaauugaacugagcaacaucaaggagaauaaaugcaacggcaccgacgccaaggugaaacuuaucaagcaggaacuggauaaguauaaaaaugcugugacggagcuccagcugcugaugcaguccacccccgccacagggucuggaagcgcuauugccuccggcgucgcgguguguaagguucuccaccuggagggggaagugaacaaaaucaagagcgcccuucugucuaccaauaaagcugucgugucccucagcaacggaguuucugugcugacauuuaagguccuugaccugaagaauuacauugauaaacaacuccugccuauccugaacaagcaguccugcagcauuucuaauaucgagaccgugauugaguuccagcagaaaaacaaucggcuccuggaaaucacgcgcgaguuuuccgugaacgccggcgucacaaccccgguuagcacauauaugcuuaccaauuccgaacugcucucucugaucaacgacaugcccauuaccaacgaucaaaagaaacuuaugagcaauaacgugcagaucgugagacagcaguccuacagcauuauguguaucauuaaggaggaaguccuggcuuaugugguucaacucccucuguacggcgugaucgacacacccugcuggaaacugcauacgucuccucucuguaccacaaauaccaaggagggguccaacaucugccugacacggaccgaucgcggaugguacugugacaaugccggcagcgucucuuucuuuccccaggcggaaacgugcaaggugcagagcaacagaguuuucugugauacaaugaacuccagaacccugccuucugaggugaaucucugcaaugucgacauuuuuaacccgaaauaugauugcaagaucaugaccagcaaaacagacguguccagcucugucauuaccucccugggggccaucgugagcuguuacggaaagacaaaaugcacggcuucuaauaagaaccggggcauuaucaagaccuucuccaaugggugugauuauguuagcaacaaaggaguggacacagucuccgugggcaauacccuuuacuauguuaacaagcaagagggcaaaucucuguacgugaagggggaacccaucauuaacuuuuaugacccucucgucuuccccagcgaugaguuugacgccuccaucucucaggugaaugagaaaauuaaccagagccuggcuuucauccgcaaguccgaugaacugcuccacaaugugaacgccggaaagagcacaaccaauauuaugaucacgaccauuaucaucguuauuaucgucauucugcuuucucugaucgccgugggccuccugcuguacugcaaagcuagauccacaccugugacccuuagcaaggaccagcucucugggauuaacaauaucgcguucuccaacugaggacuaguacuggcugcaucucccuuuccucuguccuccauccuucucccaggauggugaagggggaccugguacccagugauccccaccccaggauccuaaaucaugacuuaccugcuaauaaaaacucauuggaaaagugagaagaucuaaaaaaaaaaaaaaaaaaaaaaaaaaaaaaaaaaaaaaaaaaaaaaaaaaaaaaaaaaaaaaaaugcaucccccccccccccccccccccccccccccccaaaggcucuuuucagagccaccagaauu

SEQ ID NO: 4185 - RNA, 2061 nt, Artificial Sequence
  mRNA product Design h-5 comprising derived and/or modified sequence from HRSV(A2)__F_DSCav1_mut0 (opt6)
gggagagggcgcuuggcuugcaaggacccugagcugcggcauugaagcacacccaacccaacucgacugaagucagccucacugaaccggaucugagaaucuucucucucugggcuugccagggcucuccgaaccuagcuagcauccucuucaauuccaacuagaaagcuuaccauggaacuacuaauacuaaaagccaaugcaauaacaaccauacuaaccgccguaacauuuuguuucgcaucaggucaaaacauaaccgaagaauuuuaucaaucaacaugcucagcaguaucaaaaggauacuuauccgcucuaagaacaggaugguacacaaguguaauuacaauagagcucucaaacauaaaagaaaacaaaugcaauggaacugacgcaaaaguuaaacuuauaaaacaagaacuagauaaauauaaaaaugcaguaaccgaauuacaacuccuaaugcaauccacaccugcuaccgguuccggaucagccauagcaucuggaguagccguaugcaaaguccuccaccuagaaggagaaguaaauaaaaucaaaucagcacuauuaucuaccaauaaagcaguugucucacuauccaauggcguaucaguacuaacauucaaaguauuagaccuuaaaaacuacauagacaaacaacuauuaccaauucugaacaaacaauccuguucaauaucaaacaucgaaacgguaauagaauuucaacaaaaaaauaacagauuacuugaaauaacaagagaauuuucaguaaaugcaggaguuacaacacccgucuccaccuacaugcucacaaauucagaauuauuaucacuuauaaacgacaugccaauaacuaacgaccaaaaaaaacuaaugucaaacaauguccaaauaguccgacaacaauccuacucaauaaugugcauuauaaaagaagaaguccuagccuacguuguccaacuacccuuauauggaguaauagauaccccaugcuggaaacuucauaccuccccccuaugcacaacaaacacaaaagaaggcucaaacaucugcuuaacacguacagaccgagguugguacugugauaacgcaggauccguaucauuuuucccacaagcagaaacaugcaaaguacaaucaaaccgcguuuuuugugacaccaugaacagcagaacccucccuucagaaguaaaccuaugcaacgucgauauauuuaacccaaaauacgauugcaaaauaaugacaucaaaaaccgaugucucaucuucaguaauaaccucucuaggagcaauagucucauguuacggaaaaacaaaaugcacagcaaguaauaaaaauagaggaauaauaaaaacauucucuaauggcugcgacuacguauccaauaaaggcguugacacaguauccguaggcaacacacucuacuauguuaacaaacaagaaggaaaaaguuuauacguuaaaggagaaccaauuauaaacuuuuacgacccacucguauucccaucugaugaauuugacgcaucaaucucacaaguaaaugaaaaaaucaaucagucccuugccuuuauaagaaaaucagaugaacuuuuacacaacguuaacgccggaaaaucaacaaccaauauaaugaucacaaccauaauaauaguuauaauuguaauuuuauuauccuuaauagccgucggacuacuacuauacugcaaagcaagaucuacacccguaacccuaucaaaagaccaacuaaguggaauaaauaacauugcauucucaaauuaaggacuaguacuggcugcaucucccuuuccucuguccuccauccuucucccaggauggugaagggggaccugguacccagugauccccaccccaggauccuaaaucaugacuuaccugcuaauaaaaacucauuggaaaagugagaagaucuaaaaaaaaaaaaaaaaaaaaaaaaaaaaaaaaaaaaaaaaaaaaaaaaaaaaaaaaaaaaaaaaugcaucccccccccccccccccccccccccccccccaaaggcucuuuucagagccaccagaauu

SEQ ID NO: 4186 - RNA, 2061 nt, Artificial Sequence
  mRNA product Design h-5 comprising derived and/or modified sequence from HRSV(A2)__F_DSCav1_mut0 (opt11)
gggagagggcgcuuggcuugcaaggacccugagcugcggcauugaagcacacccaacccaacucgacugaagucagccucacugaaccggaucugagaaucuucucucucugggcuugccagggcucuccgaaccuagcuagcauccucuucaauuccaacuagaaagcuuaccauggaacuccuaauacuaaaggcaaacgcaaucacuacaauucuaaccgccgugacauucugcuucgccuccggacaaaacaucaccgaagaauuuuaccaauccacaugcucggccgucaguaaaggcuaccucucggcucuccgaaccggcugguacaccuccgucaucaccaucgaacucuccaacaucaaagaaaacaaaugcaacggcaccgacgccaaagucaaacuaaucaaacaagaacucgacaaauacaaaaacgccgucacagaacuccaacuacuaaugcaaucaacacccgcuacaggaagcggcuccgccaucgccagcggcguagcugucugcaaaguccuccaccucgaaggugaagucaacaaaaucaaaucagcccuacucagcacaaacaaagccguuguaagccuauccaacggcgucuccguacuaacauucaaaguccuugaccucaagaacuacaucgacaaacaacuucucccaauccuaaacaaacaaagcugcucaauuuccaacaucgaaacaguaaucgaauuucaacaaaaaaacaaccgacuccucgaaaucacccgcgaauuuuccguuaacgccggcguuacaacccccgucuccaccuacaugcucaccaauuccgaacuacuaucacucauaaacgacaugccuaucacaaacgaccaaaaaaaacuaaugucaaacaauguccaaaucguccgccagcaaagcuauuccaucaugugcaucaucaaagaggaaguccucgccuacguaguccaacugccccucuacggcgucauugauacccccugcuggaaacuccacaccuccccccucugcaccacaaacaccaaagaagguuccaacaucugccuaacacgaaccgacagaggcugguacugcgacaacgccggcagcgucuccuucuucccccaagcagaaaccuguaaaguccagucuaaccgcgucuucugcgacacaaugaacucaagaacccuaccuuccgaaguaaaccucugcaacguagacaucuucaacccuaaauacgacugcaaaaucaugacuucaaaaacagacguaagcucuuccguaaucacuucccucggcgccaucguauccugcuacgguaaaaccaaaugcaccgccuccaacaaaaaccgagggaucauaaaaaccuucuccaacggcugcgacuacguaucuaacaaaggcgucgacaccgucuccgucggcaacacccucuauuacguaaacaaacaagagggcaaaucacuauacgucaaaggcgagccaaucauaaacuucuaugacccacucgucuucccuucagacgaauuugaugccagcaucagccaagucaacgaaaaaaucaaccaaucacucgccuucauccgcaaaagcgacgaacuccuucacaacgucaacgcaggcaaaucaaccaccaacaucaugaucaccaccaucaucaucgucaucaucguuauccuacucagccucaucgcaguuggucuucuccuuuacugcaaagcccgcuccacccccgucacccucaguaaagaccaacucagcggaaucaacaacauagcauucuccaacuaaggacuaguacuggcugcaucucccuuuccucuguccuccauccuucucccaggauggugaagggggaccugguacccagugauccccaccccaggauccuaaaucaugacuuaccugcuaauaaaaacucauuggaaaagugagaagaucuaaaaaaaaaaaaaaaaaaaaaaaaaaaaaaaaaaaaaaaaaaaaaaaaaaaaaaaaaaaaaaaaugcaucccccccccccccccccccccccccccccccaaaggcucuuuucagagccaccagaauu

SEQ ID NO: 4187 - RNA, 1994 nt, Artificial Sequence
  mRNA product Design i-1 comprising derived and/or modified sequence from HRSV(A2)__F_DSCav1_mut0 (opt1)
gggagagggcgcuuggcuugcaaggacccugagcugcggcauugaagcacacccaacccaacucgacugaagucagccucacugaaccggaucugagaaucuucucucucugggcuugccagggcucuccgaaccuagcuagcauccucuucaauuccaacuagaaagcuuaccauggagcugcucauccugaaggccaacgccaucaccaccauccugacggcggugaccuucugcuucgccagcggccagaacaucaccgaggaguucuaccaguccacgugcagcgccgucuccaagggguaccucagcgcccugcggaccggcugguacaccuccgugaucaccaucgagcugagcaacaucaaggagaacaagugcaacgggaccgacgccaaggugaagcucaucaagcaggagcuggacaaguacaagaacgcggucacggagcugcagcuccugaugcaguccaccccggcaaccggcuccggcuccgccaucgcgagcggcgucgccgugugcaaggugcugcaccucgagggggaggucaacaagaucaagagcgcccugcuguccaccaacaaggccguggugagccucuccaacggcgucagcgugcugaccuucaaggugcuggaccucaagaacuacaucgacaagcagcugcugcccauccugaacaagcagagcugcuccaucagcaacaucgagacggugaucgaguuccagcagaagaacaaccggcuccuggagaucacccgcgaguucagcgugaacgccggggucaccacccccguguccacguacaugcugaccaacagcgagcuccugucccugaucaacgacaugccgaucaccaacgaccagaagaagcucaugagcaacaacgugcagaucguccggcagcaguccuacagcaucaugugcaucaucaaggaggaggugcuggcguacgugguccagcugccccucuacggcgugaucgacacccccugcuggaagcugcacacgagcccccugugcaccaccaacaccaaggagggguccaacaucugccucacgcgcaccgaccggggcugguacugcgacaacgccggcagcgucuccuucuucccgcaggccgagaccugcaaggugcagagcaaccgcguguucugcgacaccaugaacucccggacgcugcccagcgagguaaaccucugcaacgucgacaucuucaaccccaaguacgacugcaagaucaugaccuccaagaccgacgugagcuccagcgugaucaccucccugggggccaucgucagcugcuacggcaagacgaagugcaccgccagcaacaagaaccgggggaucaucaagaccuucuccaacggcugcgacuacgugagcaacaagggcguggacaccguguccgucgggaacacccuguacuacgugaacaagcaggagggcaagagccucuacgugaagggggagcccaucaucaacuucuacgacccgcuggucuuccccuccgacgaguucgacgcgagcaucucccaggugaacgagaagaucaaccagagccuggccuucauccgcaaguccgacgagcugcuccacaacgugaacgccggcaagagcacgaccaacaucaugaucaccaccaucaucaucgucaucaucgugauccugcugucccucaucgccguggggcugcugcucuacugcaaggcccggagcacgcccgucacccuguccaaggaccagcugagcggcaucaacaacaucgcguucuccaacugaggacuaguguccaccugucccuccugggcugcuggauugucucguuuuccugccaaauaaacaggaucagcgcuuuacagaucuaaaaaaaaaaaaaaaaaaaaaaaaaaaaaaaaaaaaaaaaaaaaaaaaaaaaaaaaaaaaaaaaugcaucccccccccccccccccccccccccccccccaaaggcucuuuucagagccaccagaauu

SEQ ID NO: 4188 - RNA, 1994 nt, Artificial Sequence
  mRNA product Design i-1 comprising derived and/or modified sequence from HRSV(A2)__F_DSCav1_mut0 (opt1)
gggagagggcgcuuggcuugcaaggacccugagcugcggcauugaagcacacccaacccaacucgacugaagucagccucacugaaccggaucugagaaucuucucucucugggcuugccagggcucuccgaaccuagcuagcauccucuucaauuccaacuagaaagcuuaccauggagcugcucauccugaaggccaacgccaucaccaccauccugacggcggugaccuucugcuucgccagcggccagaacaucaccgaggaguucuaccaguccacgugcagcgccgucuccaagggguaccucagcgcccugcgcaccggcugguacaccuccgugaucaccaucgagcugagcaacaucaaggagaacaagugcaacgggaccgacgccaaggugaagcucaucaagcaggagcuggacaaguacaagaacgcggucacggagcugcagcuccugaugcaguccacccccgccaccggcagcggguccgccaucgccagcggcguggcggugugcaagguccugcaccucgagggcgaggugaacaagaucaaguccgcccugcugagcaccaacaaggccguggucucccucagcaacgggguguccgugcugacguucaagguccuggaccucaagaacuacaucgacaagcagcugcugccgauccucaacaagcagagcugcuccaucagcaacaucgagaccgugaucgaguuccagcagaagaacaaccggcugcuggagaucacccgcgaguucuccgugaacgccggcgucaccacgcccgugagcaccuacaugcucaccaacagcgagcugcugucccucaucaacgacaugcccaucaccaacgaccagaagaagcugaugagcaacaacgugcagaucguccggcagcaguccuacagcaucaugugcaucaucaaggaggaggugcuggccuacgugguccagcucccccuguacggggugaucgacacgccgugcuggaagcugcacaccagcccccucugcaccaccaacacgaaggagggcuccaacaucugccugacccgcaccgaccgggggugguacugcgacaacgcgggcuccgugagcuucuucccccaggccgagaccugcaagguccaguccaaccgcguguucugcgacacgaugaacagccggacccuccccuccgaggucaaccugugcaacguggacaucuucaacccgaaguacgacugcaagaucaugaccagcaagaccgacguguccagcuccgucaucacgagccugggcgccaucguguccugcuacgggaagaccaagugcaccgccagcaacaagaaccggggcaucaucaagaccuucuccaacgggugcgacuacgugagcaacaagggcgucgacacggugagcgugggcaacacccucuacuacgucaacaagcaggaggggaagucccuguacgugaagggcgagcccaucaucaacuucuacgacccccugguguuccccagcgacgaguucgacgccuccaucagccaggucaacgagaagaucaaccagucccucgcguucauccgcaagagcgacgagcugcugcacaacgugaacgccgggaaguccaccaccaacaucaugaucaccacgaucaucaucgugaucaucgucauccuccugagccugaucgccgugggccuccugcuguacugcaaggcccgguccaccccggugacccugagcaaggaccagcucuccgggaucaacaacaucgccuucagcaacugaggacuaguguccaccugucccuccugggcugcuggauugucucguuuuccugccaaauaaacaggaucagcgcuuuacagaucuaaaaaaaaaaaaaaaaaaaaaaaaaaaaaaaaaaaaaaaaaaaaaaaaaaaaaaaaaaaaaaaaugcaucccccccccccccccccccccccccccccccaaaggcucuuuucagagccaccagaauu

SEQ ID NO: 4189 - RNA, 1994 nt, Artificial Sequence
  mRNA product Design i-1 comprising derived and/or modified sequence from HRSV(A2)__F_DSCav1_mut0 (opt2)
gggagagggcgcuuggcuugcaaggacccugagcugcggcauugaagcacacccaacccaacucgacugaagucagccucacugaaccggaucugagaaucuucucucucugggcuugccagggcucuccgaaccuagcuagcauccucuucaauuccaacuagaaagcuuaccauggagcuccucauccucaaggccaacgccaucaccaccauccucaccgccgucaccuucugcuucgccuccggccagaacaucaccgaggaguucuaccaguccaccugcuccgccgucuccaagggcuaccucuccgcccuccgcaccggcugguacaccuccgucaucaccaucgagcucuccaacaucaaggagaacaagugcaacggcaccgacgccaaggucaagcucaucaagcaggagcucgacaaguacaagaacgccgucaccgagcuccagcuccucaugcaguccacccccgccaccggcuccggcuccgccaucgccuccggcgucgccgucugcaagguccuccaccucgagggcgaggucaacaagaucaaguccgcccuccucuccaccaacaaggccgucgucucccucuccaacggcgucuccguccucaccuucaagguccucgaccucaagaacuacaucgacaagcagcuccuccccauccucaacaagcaguccugcuccaucuccaacaucgagaccgucaucgaguuccagcagaagaacaaccgccuccucgagaucacccgcgaguucuccgucaacgccggcgucaccacccccgucuccaccuacaugcucaccaacuccgagcuccucucccucaucaacgacaugcccaucaccaacgaccagaagaagcucauguccaacaacguccagaucguccgccagcaguccuacuccaucaugugcaucaucaaggaggagguccucgccuacgucguccagcucccccucuacggcgucaucgacacccccugcuggaagcuccacaccuccccccucugcaccaccaacaccaaggagggcuccaacaucugccucacccgcaccgaccgcggcugguacugcgacaacgccggcuccgucuccuucuucccccaggccgagaccugcaagguccaguccaaccgcgucuucugcgacaccaugaacucccgcacccuccccuccgaggucaaccucugcaacgucgacaucuucaaccccaaguacgacugcaagaucaugaccuccaagaccgacgucuccuccuccgucaucaccucccucggcgccaucgucuccugcuacggcaagaccaagugcaccgccuccaacaagaaccgcggcaucaucaagaccuucuccaacggcugcgacuacgucuccaacaagggcgucgacaccgucuccgucggcaacacccucuacuacgucaacaagcaggagggcaagucccucuacgucaagggcgagcccaucaucaacuucuacgacccccucgucuuccccuccgacgaguucgacgccuccaucucccaggucaacgagaagaucaaccagucccucgccuucauccgcaaguccgacgagcuccuccacaacgucaacgccggcaaguccaccaccaacaucaugaucaccaccaucaucaucgucaucaucgucauccuccucucccucaucgccgucggccuccuccucuacugcaaggcccgcuccacccccgucacccucuccaaggaccagcucuccggcaucaacaacaucgccuucuccaacugaggacuaguguccaccugucccuccugggcugcuggauugucucguuuuccugccaaauaaacaggaucagcgcuuuacagaucuaaaaaaaaaaaaaaaaaaaaaaaaaaaaaaaaaaaaaaaaaaaaaaaaaaaaaaaaaaaaaaaaugcaucccccccccccccccccccccccccccccccaaaggcucuuuucagagccaccagaauu

SEQ ID NO: 4190 - RNA, 1994 nt, Artificial Sequence
  mRNA product Design i-1 comprising derived and/or modified sequence from HRSV(A2)__F_DSCav1_mut0 (opt3)
gggagagggcgcuuggcuugcaaggacccugagcugcggcauugaagcacacccaacccaacucgacugaagucagccucacugaaccggaucugagaaucuucucucucugggcuugccagggcucuccgaaccuagcuagcauccucuucaauuccaacuagaaagcuuaccauggagcugcucauccuuaaggccaacgcuauuaccacaauacugacugcagugacguucugcuuugccagcggccagaauaucaccgaagaguucuaccaauccacauguucugcggucucaaaaggguauuugagugcuuuaagaacuggaugguacaccagcguuauuacaaucgaacuguccaacauuaaggagaauaaaugcaacgguaccgacgccaaggugaaacuaaucaagcaggaacucgauaaguauaaaaaugcaguaacugagcugcagcuucugaugcagucuacacccgccaccggcucggggucagcuauagcaagcggaguggccgucuguaagguguugcaccucgagggcgaaguuaacaaaaucaagagugcucugcuguccacgaauaaagccguggucucucucagcaacgguguguccguauuaacuuuuaagguucuggaccuuaagaauuacauugauaaacaauugcugccuauccuaaacaagcagucaugcaguauuagcaauaucgagaccgugauagaguuccagcagaaaaacaauaggcuccuggaaauuacacgggaguuuucugucaacgcgggggugacuaccccaguguccacauauaugcuuaccaauucagaacuguugagccucaucaacgacaugccgauuacgaacgaucaaaagaaacugaugaguaauaacguccagaucguucgccagcagucuuacuccaucauguguauuauaaaggaggaaguguuagcauauguagugcaacugccccucuacggagucaucgacacuccuugcuggaaacuucauacaagcccacuguguaccacuaauacaaaggagggcucgaacauuugcuugacccgaacggaucguggcugguacugugacaaugccgggucuguguccuucuuuccccaggcugaaaccugcaagguucagucaaacagaguguucugugauacaaugaauaguagaacucugccuagcgaggucaaccucugcaauguggacaucuuuaacccaaaauaugauugcaagauaaugaccuccaaaacagacguaucuagcucaguuauuaccagucugggagccaucguguccuguuacgguaagacuaaaugcacagcaagcaauaagaacaggggcaucauuaagaccuucucuaaugggugugauuaugucucaaacaaaggaguggacacugucagugugggcaauacgcuuuacuauguuaacaagcaagaggguaaaagccuguacgugaagggggaacccaucauuaacuuuuaugacccuuugguauucccauccgaugaguuugacgcuucuauaucgcaggucaaugagaaaaucaaccagagccucgccuucauucggaaguccgaugaacuguuacacaaugugaacgcgggaaagucaacaaccaauaucaugaucacuaccauuauaaucguuauuaucgugauucugcuaagucucaucgccgucggccugcuuuuguacugcaaagcacgcucuacaccggugacccugagcaaggaccagcucuccggcauaaacaauaucgcuuucucaaacugaggacuaguguccaccugucccuccugggcugcuggauugucucguuuuccugccaaauaaacaggaucagcgcuuuacagaucuaaaaaaaaaaaaaaaaaaaaaaaaaaaaaaaaaaaaaaaaaaaaaaaaaaaaaaaaaaaaaaaaugcaucccccccccccccccccccccccccccccccaaaggcucuuuucagagccaccagaauu

SEQ ID NO: 4191 - RNA, 1994 nt, Artificial Sequence
  mRNA product Design i-1 comprising derived and/or modified sequence from HRSV(A2)__F_DSCav1_mut0 (opt4)
gggagagggcgcuuggcuugcaaggacccugagcugcggcauugaagcacacccaacccaacucgacugaagucagccucacugaaccggaucugagaaucuucucucucugggcuugccagggcucuccgaaccuagcuagcauccucuucaauuccaacuagaaagcuuaccauggagcugcugauccugaaggccaacgccaucaccaccauccugaccgccgugaccuucugcuucgccagcggccagaacaucaccgaggaguucuaccagagcaccugcagcgccgugagcaagggcuaccugagcgcccugagaaccggcugguacaccagcgugaucaccaucgagcugagcaacaucaaggagaacaagugcaacggcaccgacgccaaggugaagcugaucaagcaggagcuggacaaguacaagaacgccgugaccgagcugcagcugcugaugcagagcacccccgccaccggcagcggcagcgccaucgccagcggcguggccgugugcaaggugcugcaccuggagggcgaggugaacaagaucaagagcgcccugcugagcaccaacaaggccguggugagccugagcaacggcgugagcgugcugaccuucaaggugcuggaccugaagaacuacaucgacaagcagcugcugcccauccugaacaagcagagcugcagcaucagcaacaucgagaccgugaucgaguuccagcagaagaacaacagacugcuggagaucaccagagaguucagcgugaacgccggcgugaccacccccgugagcaccuacaugcugaccaacagcgagcugcugagccugaucaacgacaugcccaucaccaacgaccagaagaagcugaugagcaacaacgugcagaucgugagacagcagagcuacagcaucaugugcaucaucaaggaggaggugcuggccuacguggugcagcugccccuguacggcgugaucgacacccccugcuggaagcugcacaccagcccccugugcaccaccaacaccaaggagggcagcaacaucugccugaccagaaccgacagaggcugguacugcgacaacgccggcagcgugagcuucuucccccaggccgagaccugcaaggugcagagcaacagaguguucugcgacaccaugaacagcagaacccugcccagcgaggugaaccugugcaacguggacaucuucaaccccaaguacgacugcaagaucaugaccagcaagaccgacgugagcagcagcgugaucaccagccugggcgccaucgugagcugcuacggcaagaccaagugcaccgccagcaacaagaacagaggcaucaucaagaccuucagcaacggcugcgacuacgugagcaacaagggcguggacaccgugagcgugggcaacacccuguacuacgugaacaagcaggagggcaagagccuguacgugaagggcgagcccaucaucaacuucuacgacccccugguguuccccagcgacgaguucgacgccagcaucagccaggugaacgagaagaucaaccagagccuggccuucaucagaaagagcgacgagcugcugcacaacgugaacgccggcaagagcaccaccaacaucaugaucaccaccaucaucaucgugaucaucgugauccugcugagccugaucgccgugggccugcugcuguacugcaaggccagaagcacccccgugacccugagcaaggaccagcugagcggcaucaacaacaucgccuucagcaacugaggacuaguguccaccugucccuccugggcugcuggauugucucguuuuccugccaaauaaacaggaucagcgcuuuacagaucuaaaaaaaaaaaaaaaaaaaaaaaaaaaaaaaaaaaaaaaaaaaaaaaaaaaaaaaaaaaaaaaaugcaucccccccccccccccccccccccccccccccaaaggcucuuuucagagccaccagaauu

SEQ ID NO: 4192 - RNA, 1994 nt, Artificial Sequence
  mRNA product Design i-1 comprising derived and/or modified sequence from HRSV(A2)__F_DSCav1_mut0 (opt5)
gggagagggcgcuuggcuugcaaggacccugagcugcggcauugaagcacacccaacccaacucgacugaagucagccucacugaaccggaucugagaaucuucucucucugggcuugccagggcucuccgaaccuagcuagcauccucuucaauuccaacuagaaagcuuaccauggagcugcucauccugaaggccaacgcuauuaccacaauccuuacggccgugaccuucugcuuugcgagcggccagaauauuacagaagaguucuaccaauccaccuguucugcugucagcaaaggguaucuguccgcccucagaacaggaugguacaccucuguuaucacaauugaacugagcaacaucaaggagaauaaaugcaacggcaccgacgccaaggugaaacuuaucaagcaggaacuggauaaguauaaaaaugcugugacggagcuccagcugcugaugcaguccacccccgccacagggucuggaagcgcuauugccuccggcgucgcgguguguaagguucuccaccuggagggggaagugaacaaaaucaagagcgcccuucugucuaccaauaaagcugucgugucccucagcaacggaguuucugugcugacauuuaagguccuugaccugaagaauuacauugauaaacaacuccugccuauccugaacaagcaguccugcagcauuucuaauaucgagaccgugauugaguuccagcagaaaaacaaucggcuccuggaaaucacgcgcgaguuuuccgugaacgccggcgucacaaccccgguuagcacauauaugcuuaccaauuccgaacugcucucucugaucaacgacaugcccauuaccaacgaucaaaagaaacuuaugagcaauaacgugcagaucgugagacagcaguccuacagcauuauguguaucauuaaggaggaaguccuggcuuaugugguucaacucccucuguacggcgugaucgacacacccugcuggaaacugcauacgucuccucucuguaccacaaauaccaaggagggguccaacaucugccugacacggaccgaucgcggaugguacugugacaaugccggcagcgucucuuucuuuccccaggcggaaacgugcaaggugcagagcaacagaguuuucugugauacaaugaacuccagaacccugccuucugaggugaaucucugcaaugucgacauuuuuaacccgaaauaugauugcaagaucaugaccagcaaaacagacguguccagcucugucauuaccucccugggggccaucgugagcuguuacggaaagacaaaaugcacggcuucuaauaagaaccggggcauuaucaagaccuucuccaaugggugugauuauguuagcaacaaaggaguggacacagucuccgugggcaauacccuuuacuauguuaacaagcaagagggcaaaucucuguacgugaagggggaacccaucauuaacuuuuaugacccucucgucuuccccagcgaugaguuugacgccuccaucucucaggugaaugagaaaauuaaccagagccuggcuuucauccgcaaguccgaugaacugcuccacaaugugaacgccggaaagagcacaaccaauauuaugaucacgaccauuaucaucguuauuaucgucauucugcuuucucugaucgccgugggccuccugcuguacugcaaagcuagauccacaccugugacccuuagcaaggaccagcucucugggauuaacaauaucgcguucuccaacugaggacuaguguccaccugucccuccugggcugcuggauugucucguuuuccugccaaauaaacaggaucagcgcuuuacagaucuaaaaaaaaaaaaaaaaaaaaaaaaaaaaaaaaaaaaaaaaaaaaaaaaaaaaaaaaaaaaaaaaugcaucccccccccccccccccccccccccccccccaaaggcucuuuucagagccaccagaauu

SEQ ID NO: 4193 - RNA, 1994 nt, Artificial Sequence
  mRNA product Design i-1 comprising derived and/or modified sequence from HRSV(A2)__F_DSCav1_mut0 (opt6)
gggagagggcgcuuggcuugcaaggacccugagcugcggcauugaagcacacccaacccaacucgacugaagucagccucacugaaccggaucugagaaucuucucucucugggcuugccagggcucuccgaaccuagcuagcauccucuucaauuccaacuagaaagcuuaccauggaacuacuaauacuaaaagccaaugcaauaacaaccauacuaaccgccguaacauuuuguuucgcaucaggucaaaacauaaccgaagaauuuuaucaaucaacaugcucagcaguaucaaaaggauacuuauccgcucuaagaacaggaugguacacaaguguaauuacaauagagcucucaaacauaaaagaaaacaaaugcaauggaacugacgcaaaaguuaaacuuauaaaacaagaacuagauaaauauaaaaaugcaguaaccgaauuacaacuccuaaugcaauccacaccugcuaccgguuccggaucagccauagcaucuggaguagccguaugcaaaguccuccaccuagaaggagaaguaaauaaaaucaaaucagcacuauuaucuaccaauaaagcaguugucucacuauccaauggcguaucaguacuaacauucaaaguauuagaccuuaaaaacuacauagacaaacaacuauuaccaauucugaacaaacaauccuguucaauaucaaacaucgaaacgguaauagaauuucaacaaaaaaauaacagauuacuugaaauaacaagagaauuuucaguaaaugcaggaguuacaacacccgucuccaccuacaugcucacaaauucagaauuauuaucacuuauaaacgacaugccaauaacuaacgaccaaaaaaaacuaaugucaaacaauguccaaauaguccgacaacaauccuacucaauaaugugcauuauaaaagaagaaguccuagccuacguuguccaacuacccuuauauggaguaauagauaccccaugcuggaaacuucauaccuccccccuaugcacaacaaacacaaaagaaggcucaaacaucugcuuaacacguacagaccgagguugguacugugauaacgcaggauccguaucauuuuucccacaagcagaaacaugcaaaguacaaucaaaccgcguuuuuugugacaccaugaacagcagaacccucccuucagaaguaaaccuaugcaacgucgauauauuuaacccaaaauacgauugcaaaauaaugacaucaaaaaccgaugucucaucuucaguaauaaccucucuaggagcaauagucucauguuacggaaaaacaaaaugcacagcaaguaauaaaaauagaggaauaauaaaaacauucucuaauggcugcgacuacguauccaauaaaggcguugacacaguauccguaggcaacacacucuacuauguuaacaaacaagaaggaaaaaguuuauacguuaaaggagaaccaauuauaaacuuuuacgacccacucguauucccaucugaugaauuugacgcaucaaucucacaaguaaaugaaaaaaucaaucagucccuugccuuuauaagaaaaucagaugaacuuuuacacaacguuaacgccggaaaaucaacaaccaauauaaugaucacaaccauaauaauaguuauaauuguaauuuuauuauccuuaauagccgucggacuacuacuauacugcaaagcaagaucuacacccguaacccuaucaaaagaccaacuaaguggaauaaauaacauugcauucucaaauuaaggacuaguguccaccugucccuccugggcugcuggauugucucguuuuccugccaaauaaacaggaucagcgcuuuacagaucuaaaaaaaaaaaaaaaaaaaaaaaaaaaaaaaaaaaaaaaaaaaaaaaaaaaaaaaaaaaaaaaaugcaucccccccccccccccccccccccccccccccaaaggcucuuuucagagccaccagaauu

SEQ ID NO: 4194 - RNA, 1994 nt, Artificial Sequence
  mRNA product Design i-1 comprising derived and/or modified sequence from HRSV(A2)__F_DSCav1_mut0 (opt11)
gggagagggcgcuuggcuugcaaggacccugagcugcggcauugaagcacacccaacccaacucgacugaagucagccucacugaaccggaucugagaaucuucucucucugggcuugccagggcucuccgaaccuagcuagcauccucuucaauuccaacuagaaagcuuaccauggaacuccuaauacuaaaggcaaacgcaaucacuacaauucuaaccgccgugacauucugcuucgccuccggacaaaacaucaccgaagaauuuuaccaauccacaugcucggccgucaguaaaggcuaccucucggcucuccgaaccggcugguacaccuccgucaucaccaucgaacucuccaacaucaaagaaaacaaaugcaacggcaccgacgccaaagucaaacuaaucaaacaagaacucgacaaauacaaaaacgccgucacagaacuccaacuacuaaugcaaucaacacccgcuacaggaagcggcuccgccaucgccagcggcguagcugucugcaaaguccuccaccucgaaggugaagucaacaaaaucaaaucagcccuacucagcacaaacaaagccguuguaagccuauccaacggcgucuccguacuaacauucaaaguccuugaccucaagaacuacaucgacaaacaacuucucccaauccuaaacaaacaaagcugcucaauuuccaacaucgaaacaguaaucgaauuucaacaaaaaaacaaccgacuccucgaaaucacccgcgaauuuuccguuaacgccggcguuacaacccccgucuccaccuacaugcucaccaauuccgaacuacuaucacucauaaacgacaugccuaucacaaacgaccaaaaaaaacuaaugucaaacaauguccaaaucguccgccagcaaagcuauuccaucaugugcaucaucaaagaggaaguccucgccuacguaguccaacugccccucuacggcgucauugauacccccugcuggaaacuccacaccuccccccucugcaccacaaacaccaaagaagguuccaacaucugccuaacacgaaccgacagaggcugguacugcgacaacgccggcagcgucuccuucuucccccaagcagaaaccuguaaaguccagucuaaccgcgucuucugcgacacaaugaacucaagaacccuaccuuccgaaguaaaccucugcaacguagacaucuucaacccuaaauacgacugcaaaaucaugacuucaaaaacagacguaagcucuuccguaaucacuucccucggcgccaucguauccugcuacgguaaaaccaaaugcaccgccuccaacaaaaaccgagggaucauaaaaaccuucuccaacggcugcgacuacguaucuaacaaaggcgucgacaccgucuccgucggcaacacccucuauuacguaaacaaacaagagggcaaaucacuauacgucaaaggcgagccaaucauaaacuucuaugacccacucgucuucccuucagacgaauuugaugccagcaucagccaagucaacgaaaaaaucaaccaaucacucgccuucauccgcaaaagcgacgaacuccuucacaacgucaacgcaggcaaaucaaccaccaacaucaugaucaccaccaucaucaucgucaucaucguuauccuacucagccucaucgcaguuggucuucuccuuuacugcaaagcccgcuccacccccgucacccucaguaaagaccaacucagcggaaucaacaacauagcauucuccaacuaaggacuaguguccaccugucccuccugggcugcuggauugucucguuuuccugccaaauaaacaggaucagcgcuuuacagaucuaaaaaaaaaaaaaaaaaaaaaaaaaaaaaaaaaaaaaaaaaaaaaaaaaaaaaaaaaaaaaaaaugcaucccccccccccccccccccccccccccccccaaaggcucuuuucagagccaccagaauu

SEQ ID NO: 4195 - RNA, 1994 nt, Artificial Sequence
  mRNA product Design i-2 comprising derived and/or modified sequence from HRSV(A2)__F_DSCav1_mut0 (opt1)
gggagaggcgcugccuacggagguggcagccaucuccuucucggcaucaagcuuaccauggagcugcucauccugaaggccaacgccaucaccaccauccugacggcggugaccuucugcuucgccagcggccagaacaucaccgaggaguucuaccaguccacgugcagcgccgucuccaagggguaccucagcgcccugcggaccggcugguacaccuccgugaucaccaucgagcugagcaacaucaaggagaacaagugcaacgggaccgacgccaaggugaagcucaucaagcaggagcuggacaaguacaagaacgcggucacggagcugcagcuccugaugcaguccaccccggcaaccggcuccggcuccgccaucgcgagcggcgucgccgugugcaaggugcugcaccucgagggggaggucaacaagaucaagagcgcccugcuguccaccaacaaggccguggugagccucuccaacggcgucagcgugcugaccuucaaggugcuggaccucaagaacuacaucgacaagcagcugcugcccauccugaacaagcagagcugcuccaucagcaacaucgagacggugaucgaguuccagcagaagaacaaccggcuccuggagaucacccgcgaguucagcgugaacgccggggucaccacccccguguccacguacaugcugaccaacagcgagcuccugucccugaucaacgacaugccgaucaccaacgaccagaagaagcucaugagcaacaacgugcagaucguccggcagcaguccuacagcaucaugugcaucaucaaggaggaggugcuggcguacgugguccagcugccccucuacggcgugaucgacacccccugcuggaagcugcacacgagcccccugugcaccaccaacaccaaggagggguccaacaucugccucacgcgcaccgaccggggcugguacugcgacaacgccggcagcgucuccuucuucccgcaggccgagaccugcaaggugcagagcaaccgcguguucugcgacaccaugaacucccggacgcugcccagcgagguaaaccucugcaacgucgacaucuucaaccccaaguacgacugcaagaucaugaccuccaagaccgacgugagcuccagcgugaucaccucccugggggccaucgucagcugcuacggcaagacgaagugcaccgccagcaacaagaaccgggggaucaucaagaccuucuccaacggcugcgacuacgugagcaacaagggcguggacaccguguccgucgggaacacccuguacuacgugaacaagcaggagggcaagagccucuacgugaagggggagcccaucaucaacuucuacgacccgcuggucuuccccuccgacgaguucgacgcgagcaucucccaggugaacgagaagaucaaccagagccuggccuucauccgcaaguccgacgagcugcuccacaacgugaacgccggcaagagcacgaccaacaucaugaucaccaccaucaucaucgucaucaucgugauccugcugucccucaucgccguggggcugcugcucuacugcaaggcccggagcacgcccgucacccuguccaaggaccagcugagcggcaucaacaacaucgcguucuccaacugaggacuagugcaucacauuuaaaagcaucucagccuaccaugagaauaagagaaagaaaaugaagaucaauagcuuauucaucucuuuuucuuuuucguugguguaaagccaacacccugucuaaaaaacauaaauuucuuuaaucauuuugccucuuuucucugugcuucaauuaauaaaaaauggaaagaaccuagaucuaaaaaaaaaaaaaaaaaaaaaaaaaaaaaaaaaaaaaaaaaaaaaaaaaaaaaaaaaaaaaaaaugcaucccccccccccccccccccccccccccccccaaaggcucuuuucagagccaccagaauu

SEQ ID NO: 4196 - RNA, 1994 nt, Artificial Sequence
  mRNA product Design i-2 comprising derived and/or modified sequence from HRSV(A2)__F_DSCav1_mut0 (opt1)
gggagaggcgcugccuacggagguggcagccaucuccuucucggcaucaagcuuaccauggagcugcucauccugaaggccaacgccaucaccaccauccugacggcggugaccuucugcuucgccagcggccagaacaucaccgaggaguucuaccaguccacgugcagcgccgucuccaagggguaccucagcgcccugcgcaccggcugguacaccuccgugaucaccaucgagcugagcaacaucaaggagaacaagugcaacgggaccgacgccaaggugaagcucaucaagcaggagcuggacaaguacaagaacgcggucacggagcugcagcuccugaugcaguccacccccgccaccggcagcggguccgccaucgccagcggcguggcggugugcaagguccugcaccucgagggcgaggugaacaagaucaaguccgcccugcugagcaccaacaaggccguggucucccucagcaacgggguguccgugcugacguucaagguccuggaccucaagaacuacaucgacaagcagcugcugccgauccucaacaagcagagcugcuccaucagcaacaucgagaccgugaucgaguuccagcagaagaacaaccggcugcuggagaucacccgcgaguucuccgugaacgccggcgucaccacgcccgugagcaccuacaugcucaccaacagcgagcugcugucccucaucaacgacaugcccaucaccaacgaccagaagaagcugaugagcaacaacgugcagaucguccggcagcaguccuacagcaucaugugcaucaucaaggaggaggugcuggccuacgugguccagcucccccuguacggggugaucgacacgccgugcuggaagcugcacaccagcccccucugcaccaccaacacgaaggagggcuccaacaucugccugacccgcaccgaccgggggugguacugcgacaacgcgggcuccgugagcuucuucccccaggccgagaccugcaagguccaguccaaccgcguguucugcgacacgaugaacagccggacccuccccuccgaggucaaccugugcaacguggacaucuucaacccgaaguacgacugcaagaucaugaccagcaagaccgacguguccagcuccgucaucacgagccugggcgccaucguguccugcuacgggaagaccaagugcaccgccagcaacaagaaccggggcaucaucaagaccuucuccaacgggugcgacuacgugagcaacaagggcgucgacacggugagcgugggcaacacccucuacuacgucaacaagcaggaggggaagucccuguacgugaagggcgagcccaucaucaacuucuacgacccccugguguuccccagcgacgaguucgacgccuccaucagccaggucaacgagaagaucaaccagucccucgcguucauccgcaagagcgacgagcugcugcacaacgugaacgccgggaaguccaccaccaacaucaugaucaccacgaucaucaucgugaucaucgucauccuccugagccugaucgccgugggccuccugcuguacugcaaggcccgguccaccccggugacccugagcaaggaccagcucuccgggaucaacaacaucgccuucagcaacugaggacuagugcaucacauuuaaaagcaucucagccuaccaugagaauaagagaaagaaaaugaagaucaauagcuuauucaucucuuuuucuuuuucguugguguaaagccaacacccugucuaaaaaacauaaauuucuuuaaucauuuugccucuuuucucugugcuucaauuaauaaaaaauggaaagaaccuagaucuaaaaaaaaaaaaaaaaaaaaaaaaaaaaaaaaaaaaaaaaaaaaaaaaaaaaaaaaaaaaaaaaugcaucccccccccccccccccccccccccccccccaaaggcucuuuucagagccaccagaauu

SEQ ID NO: 4197 - RNA, 1994 nt, Artificial Sequence
  mRNA product Design i-2 comprising derived and/or modified sequence from HRSV(A2)__F_DSCav1_mut0 (opt2)
gggagaggcgcugccuacggagguggcagccaucuccuucucggcaucaagcuuaccauggagcuccucauccucaaggccaacgccaucaccaccauccucaccgccgucaccuucugcuucgccuccggccagaacaucaccgaggaguucuaccaguccaccugcuccgccgucuccaagggcuaccucuccgcccuccgcaccggcugguacaccuccgucaucaccaucgagcucuccaacaucaaggagaacaagugcaacggcaccgacgccaaggucaagcucaucaagcaggagcucgacaaguacaagaacgccgucaccgagcuccagcuccucaugcaguccacccccgccaccggcuccggcuccgccaucgccuccggcgucgccgucugcaagguccuccaccucgagggcgaggucaacaagaucaaguccgcccuccucuccaccaacaaggccgucgucucccucuccaacggcgucuccguccucaccuucaagguccucgaccucaagaacuacaucgacaagcagcuccuccccauccucaacaagcaguccugcuccaucuccaacaucgagaccgucaucgaguuccagcagaagaacaaccgccuccucgagaucacccgcgaguucuccgucaacgccggcgucaccacccccgucuccaccuacaugcucaccaacuccgagcuccucucccucaucaacgacaugcccaucaccaacgaccagaagaagcucauguccaacaacguccagaucguccgccagcaguccuacuccaucaugugcaucaucaaggaggagguccucgccuacgucguccagcucccccucuacggcgucaucgacacccccugcuggaagcuccacaccuccccccucugcaccaccaacaccaaggagggcuccaacaucugccucacccgcaccgaccgcggcugguacugcgacaacgccggcuccgucuccuucuucccccaggccgagaccugcaagguccaguccaaccgcgucuucugcgacaccaugaacucccgcacccuccccuccgaggucaaccucugcaacgucgacaucuucaaccccaaguacgacugcaagaucaugaccuccaagaccgacgucuccuccuccgucaucaccucccucggcgccaucgucuccugcuacggcaagaccaagugcaccgccuccaacaagaaccgcggcaucaucaagaccuucuccaacggcugcgacuacgucuccaacaagggcgucgacaccgucuccgucggcaacacccucuacuacgucaacaagcaggagggcaagucccucuacgucaagggcgagcccaucaucaacuucuacgacccccucgucuuccccuccgacgaguucgacgccuccaucucccaggucaacgagaagaucaaccagucccucgccuucauccgcaaguccgacgagcuccuccacaacgucaacgccggcaaguccaccaccaacaucaugaucaccaccaucaucaucgucaucaucgucauccuccucucccucaucgccgucggccuccuccucuacugcaaggcccgcuccacccccgucacccucuccaaggaccagcucuccggcaucaacaacaucgccuucuccaacugaggacuagugcaucacauuuaaaagcaucucagccuaccaugagaauaagagaaagaaaaugaagaucaauagcuuauucaucucuuuuucuuuuucguugguguaaagccaacacccugucuaaaaaacauaaauuucuuuaaucauuuugccucuuuucucugugcuucaauuaauaaaaaauggaaagaaccuagaucuaaaaaaaaaaaaaaaaaaaaaaaaaaaaaaaaaaaaaaaaaaaaaaaaaaaaaaaaaaaaaaaaugcaucccccccccccccccccccccccccccccccaaaggcucuuuucagagccaccagaauu

SEQ ID NO: 4198 - RNA, 1994 nt, Artificial Sequence
  mRNA product Design i-2 comprising derived and/or modified sequence from HRSV(A2)__F_DSCav1_mut0 (opt3)
gggagaggcgcugccuacggagguggcagccaucuccuucucggcaucaagcuuaccauggagcugcucauccuuaaggccaacgcuauuaccacaauacugacugcagugacguucugcuuugccagcggccagaauaucaccgaagaguucuaccaauccacauguucugcggucucaaaaggguauuugagugcuuuaagaacuggaugguacaccagcguuauuacaaucgaacuguccaacauuaaggagaauaaaugcaacgguaccgacgccaaggugaaacuaaucaagcaggaacucgauaaguauaaaaaugcaguaacugagcugcagcuucugaugcagucuacacccgccaccggcucggggucagcuauagcaagcggaguggccgucuguaagguguugcaccucgagggcgaaguuaacaaaaucaagagugcucugcuguccacgaauaaagccguggucucucucagcaacgguguguccguauuaacuuuuaagguucuggaccuuaagaauuacauugauaaacaauugcugccuauccuaaacaagcagucaugcaguauuagcaauaucgagaccgugauagaguuccagcagaaaaacaauaggcuccuggaaauuacacgggaguuuucugucaacgcgggggugacuaccccaguguccacauauaugcuuaccaauucagaacuguugagccucaucaacgacaugccgauuacgaacgaucaaaagaaacugaugaguaauaacguccagaucguucgccagcagucuuacuccaucauguguauuauaaaggaggaaguguuagcauauguagugcaacugccccucuacggagucaucgacacuccuugcuggaaacuucauacaagcccacuguguaccacuaauacaaaggagggcucgaacauuugcuugacccgaacggaucguggcugguacugugacaaugccgggucuguguccuucuuuccccaggcugaaaccugcaagguucagucaaacagaguguucugugauacaaugaauaguagaacucugccuagcgaggucaaccucugcaauguggacaucuuuaacccaaaauaugauugcaagauaaugaccuccaaaacagacguaucuagcucaguuauuaccagucugggagccaucguguccuguuacgguaagacuaaaugcacagcaagcaauaagaacaggggcaucauuaagaccuucucuaaugggugugauuaugucucaaacaaaggaguggacacugucagugugggcaauacgcuuuacuauguuaacaagcaagaggguaaaagccuguacgugaagggggaacccaucauuaacuuuuaugacccuuugguauucccauccgaugaguuugacgcuucuauaucgcaggucaaugagaaaaucaaccagagccucgccuucauucggaaguccgaugaacuguuacacaaugugaacgcgggaaagucaacaaccaauaucaugaucacuaccauuauaaucguuauuaucgugauucugcuaagucucaucgccgucggccugcuuuuguacugcaaagcacgcucuacaccggugacccugagcaaggaccagcucuccggcauaaacaauaucgcuuucucaaacugaggacuagugcaucacauuuaaaagcaucucagccuaccaugagaauaagagaaagaaaaugaagaucaauagcuuauucaucucuuuuucuuuuucguugguguaaagccaacacccugucuaaaaaacauaaauuucuuuaaucauuuugccucuuuucucugugcuucaauuaauaaaaaauggaaagaaccuagaucuaaaaaaaaaaaaaaaaaaaaaaaaaaaaaaaaaaaaaaaaaaaaaaaaaaaaaaaaaaaaaaaaugcaucccccccccccccccccccccccccccccccaaaggcucuuuucagagccaccagaauu

SEQ ID NO: 4199 - RNA, 1994 nt, Artificial Sequence
  mRNA product Design i-2 comprising derived and/or modified sequence from HRSV(A2)__F_DSCav1_mut0 (opt4)
gggagaggcgcugccuacggagguggcagccaucuccuucucggcaucaagcuuaccauggagcugcugauccugaaggccaacgccaucaccaccauccugaccgccgugaccuucugcuucgccagcggccagaacaucaccgaggaguucuaccagagcaccugcagcgccgugagcaagggcuaccugagcgcccugagaaccggcugguacaccagcgugaucaccaucgagcugagcaacaucaaggagaacaagugcaacggcaccgacgccaaggugaagcugaucaagcaggagcuggacaaguacaagaacgccgugaccgagcugcagcugcugaugcagagcacccccgccaccggcagcggcagcgccaucgccagcggcguggccgugugcaaggugcugcaccuggagggcgaggugaacaagaucaagagcgcccugcugagcaccaacaaggccguggugagccugagcaacggcgugagcgugcugaccuucaaggugcuggaccugaagaacuacaucgacaagcagcugcugcccauccugaacaagcagagcugcagcaucagcaacaucgagaccgugaucgaguuccagcagaagaacaacagacugcuggagaucaccagagaguucagcgugaacgccggcgugaccacccccgugagcaccuacaugcugaccaacagcgagcugcugagccugaucaacgacaugcccaucaccaacgaccagaagaagcugaugagcaacaacgugcagaucgugagacagcagagcuacagcaucaugugcaucaucaaggaggaggugcuggccuacguggugcagcugccccuguacggcgugaucgacacccccugcuggaagcugcacaccagcccccugugcaccaccaacaccaaggagggcagcaacaucugccugaccagaaccgacagaggcugguacugcgacaacgccggcagcgugagcuucuucccccaggccgagaccugcaaggugcagagcaacagaguguucugcgacaccaugaacagcagaacccugcccagcgaggugaaccugugcaacguggacaucuucaaccccaaguacgacugcaagaucaugaccagcaagaccgacgugagcagcagcgugaucaccagccugggcgccaucgugagcugcuacggcaagaccaagugcaccgccagcaacaagaacagaggcaucaucaagaccuucagcaacggcugcgacuacgugagcaacaagggcguggacaccgugagcgugggcaacacccuguacuacgugaacaagcaggagggcaagagccuguacgugaagggcgagcccaucaucaacuucuacgacccccugguguuccccagcgacgaguucgacgccagcaucagccaggugaacgagaagaucaaccagagccuggccuucaucagaaagagcgacgagcugcugcacaacgugaacgccggcaagagcaccaccaacaucaugaucaccaccaucaucaucgugaucaucgugauccugcugagccugaucgccgugggccugcugcuguacugcaaggccagaagcacccccgugacccugagcaaggaccagcugagcggcaucaacaacaucgccuucagcaacugaggacuagugcaucacauuuaaaagcaucucagccuaccaugagaauaagagaaagaaaaugaagaucaauagcuuauucaucucuuuuucuuuuucguugguguaaagccaacacccugucuaaaaaacauaaauuucuuuaaucauuuugccucuuuucucugugcuucaauuaauaaaaaauggaaagaaccuagaucuaaaaaaaaaaaaaaaaaaaaaaaaaaaaaaaaaaaaaaaaaaaaaaaaaaaaaaaaaaaaaaaaugcaucccccccccccccccccccccccccccccccaaaggcucuuuucagagccaccagaauu

SEQ ID NO: 4200 - RNA, 1994 nt, Artificial Sequence
  mRNA product Design i-2 comprising derived and/or modified sequence from HRSV(A2)__F_DSCav1_mut0 (opt5)
gggagaggcgcugccuacggagguggcagccaucuccuucucggcaucaagcuuaccauggagcugcucauccugaaggccaacgcuauuaccacaauccuuacggccgugaccuucugcuuugcgagcggccagaauauuacagaagaguucuaccaauccaccuguucugcugucagcaaaggguaucuguccgcccucagaacaggaugguacaccucuguuaucacaauugaacugagcaacaucaaggagaauaaaugcaacggcaccgacgccaaggugaaacuuaucaagcaggaacuggauaaguauaaaaaugcugugacggagcuccagcugcugaugcaguccacccccgccacagggucuggaagcgcuauugccuccggcgucgcgguguguaagguucuccaccuggagggggaagugaacaaaaucaagagcgcccuucugucuaccaauaaagcugucgugucccucagcaacggaguuucugugcugacauuuaagguccuugaccugaagaauuacauugauaaacaacuccugccuauccugaacaagcaguccugcagcauuucuaauaucgagaccgugauugaguuccagcagaaaaacaaucggcuccuggaaaucacgcgcgaguuuuccgugaacgccggcgucacaaccccgguuagcacauauaugcuuaccaauuccgaacugcucucucugaucaacgacaugcccauuaccaacgaucaaaagaaacuuaugagcaauaacgugcagaucgugagacagcaguccuacagcauuauguguaucauuaaggaggaaguccuggcuuaugugguucaacucccucuguacggcgugaucgacacacccugcuggaaacugcauacgucuccucucuguaccacaaauaccaaggagggguccaacaucugccugacacggaccgaucgcggaugguacugugacaaugccggcagcgucucuuucuuuccccaggcggaaacgugcaaggugcagagcaacagaguuuucugugauacaaugaacuccagaacccugccuucugaggugaaucucugcaaugucgacauuuuuaacccgaaauaugauugcaagaucaugaccagcaaaacagacguguccagcucugucauuaccucccugggggccaucgugagcuguuacggaaagacaaaaugcacggcuucuaauaagaaccggggcauuaucaagaccuucuccaaugggugugauuauguuagcaacaaaggaguggacacagucuccgugggcaauacccuuuacuauguuaacaagcaagagggcaaaucucuguacgugaagggggaacccaucauuaacuuuuaugacccucucgucuuccccagcgaugaguuugacgccuccaucucucaggugaaugagaaaauuaaccagagccuggcuuucauccgcaaguccgaugaacugcuccacaaugugaacgccggaaagagcacaaccaauauuaugaucacgaccauuaucaucguuauuaucgucauucugcuuucucugaucgccgugggccuccugcuguacugcaaagcuagauccacaccugugacccuuagcaaggaccagcucucugggauuaacaauaucgcguucuccaacugaggacuagugcaucacauuuaaaagcaucucagccuaccaugagaauaagagaaagaaaaugaagaucaauagcuuauucaucucuuuuucuuuuucguugguguaaagccaacacccugucuaaaaaacauaaauuucuuuaaucauuuugccucuuuucucugugcuucaauuaauaaaaaauggaaagaaccuagaucuaaaaaaaaaaaaaaaaaaaaaaaaaaaaaaaaaaaaaaaaaaaaaaaaaaaaaaaaaaaaaaaaugcaucccccccccccccccccccccccccccccccaaaggcucuuuucagagccaccagaauu

SEQ ID NO: 4201 - RNA, 1994 nt, Artificial Sequence
  mRNA product Design i-2 comprising derived and/or modified sequence from HRSV(A2)__F_DSCav1_mut0 (opt6)
gggagaggcgcugccuacggagguggcagccaucuccuucucggcaucaagcuuaccauggaacuacuaauacuaaaagccaaugcaauaacaaccauacuaaccgccguaacauuuuguuucgcaucaggucaaaacauaaccgaagaauuuuaucaaucaacaugcucagcaguaucaaaaggauacuuauccgcucuaagaacaggaugguacacaaguguaauuacaauagagcucucaaacauaaaagaaaacaaaugcaauggaacugacgcaaaaguuaaacuuauaaaacaagaacuagauaaauauaaaaaugcaguaaccgaauuacaacuccuaaugcaauccacaccugcuaccgguuccggaucagccauagcaucuggaguagccguaugcaaaguccuccaccuagaaggagaaguaaauaaaaucaaaucagcacuauuaucuaccaauaaagcaguugucucacuauccaauggcguaucaguacuaacauucaaaguauuagaccuuaaaaacuacauagacaaacaacuauuaccaauucugaacaaacaauccuguucaauaucaaacaucgaaacgguaauagaauuucaacaaaaaaauaacagauuacuugaaauaacaagagaauuuucaguaaaugcaggaguuacaacacccgucuccaccuacaugcucacaaauucagaauuauuaucacuuauaaacgacaugccaauaacuaacgaccaaaaaaaacuaaugucaaacaauguccaaauaguccgacaacaauccuacucaauaaugugcauuauaaaagaagaaguccuagccuacguuguccaacuacccuuauauggaguaauagauaccccaugcuggaaacuucauaccuccccccuaugcacaacaaacacaaaagaaggcucaaacaucugcuuaacacguacagaccgagguugguacugugauaacgcaggauccguaucauuuuucccacaagcagaaacaugcaaaguacaaucaaaccgcguuuuuugugacaccaugaacagcagaacccucccuucagaaguaaaccuaugcaacgucgauauauuuaacccaaaauacgauugcaaaauaaugacaucaaaaaccgaugucucaucuucaguaauaaccucucuaggagcaauagucucauguuacggaaaaacaaaaugcacagcaaguaauaaaaauagaggaauaauaaaaacauucucuaauggcugcgacuacguauccaauaaaggcguugacacaguauccguaggcaacacacucuacuauguuaacaaacaagaaggaaaaaguuuauacguuaaaggagaaccaauuauaaacuuuuacgacccacucguauucccaucugaugaauuugacgcaucaaucucacaaguaaaugaaaaaaucaaucagucccuugccuuuauaagaaaaucagaugaacuuuuacacaacguuaacgccggaaaaucaacaaccaauauaaugaucacaaccauaauaauaguuauaauuguaauuuuauuauccuuaauagccgucggacuacuacuauacugcaaagcaagaucuacacccguaacccuaucaaaagaccaacuaaguggaauaaauaacauugcauucucaaauuaaggacuagugcaucacauuuaaaagcaucucagccuaccaugagaauaagagaaagaaaaugaagaucaauagcuuauucaucucuuuuucuuuuucguugguguaaagccaacacccugucuaaaaaacauaaauuucuuuaaucauuuugccucuuuucucugugcuucaauuaauaaaaaauggaaagaaccuagaucuaaaaaaaaaaaaaaaaaaaaaaaaaaaaaaaaaaaaaaaaaaaaaaaaaaaaaaaaaaaaaaaaugcaucccccccccccccccccccccccccccccccaaaggcucuuuucagagccaccagaauu

SEQ ID NO: 4202 - RNA, 1994 nt, Artificial Sequence
  mRNA product Design i-2 comprising derived and/or modified sequence from HRSV(A2)__F_DSCav1_mut0 (opt11)
gggagaggcgcugccuacggagguggcagccaucuccuucucggcaucaagcuuaccauggaacuccuaauacuaaaggcaaacgcaaucacuacaauucuaaccgccgugacauucugcuucgccuccggacaaaacaucaccgaagaauuuuaccaauccacaugcucggccgucaguaaaggcuaccucucggcucuccgaaccggcugguacaccuccgucaucaccaucgaacucuccaacaucaaagaaaacaaaugcaacggcaccgacgccaaagucaaacuaaucaaacaagaacucgacaaauacaaaaacgccgucacagaacuccaacuacuaaugcaaucaacacccgcuacaggaagcggcuccgccaucgccagcggcguagcugucugcaaaguccuccaccucgaaggugaagucaacaaaaucaaaucagcccuacucagcacaaacaaagccguuguaagccuauccaacggcgucuccguacuaacauucaaaguccuugaccucaagaacuacaucgacaaacaacuucucccaauccuaaacaaacaaagcugcucaauuuccaacaucgaaacaguaaucgaauuucaacaaaaaaacaaccgacuccucgaaaucacccgcgaauuuuccguuaacgccggcguuacaacccccgucuccaccuacaugcucaccaauuccgaacuacuaucacucauaaacgacaugccuaucacaaacgaccaaaaaaaacuaaugucaaacaauguccaaaucguccgccagcaaagcuauuccaucaugugcaucaucaaagaggaaguccucgccuacguaguccaacugccccucuacggcgucauugauacccccugcuggaaacuccacaccuccccccucugcaccacaaacaccaaagaagguuccaacaucugccuaacacgaaccgacagaggcugguacugcgacaacgccggcagcgucuccuucuucccccaagcagaaaccuguaaaguccagucuaaccgcgucuucugcgacacaaugaacucaagaacccuaccuuccgaaguaaaccucugcaacguagacaucuucaacccuaaauacgacugcaaaaucaugacuucaaaaacagacguaagcucuuccguaaucacuucccucggcgccaucguauccugcuacgguaaaaccaaaugcaccgccuccaacaaaaaccgagggaucauaaaaaccuucuccaacggcugcgacuacguaucuaacaaaggcgucgacaccgucuccgucggcaacacccucuauuacguaaacaaacaagagggcaaaucacuauacgucaaaggcgagccaaucauaaacuucuaugacccacucgucuucccuucagacgaauuugaugccagcaucagccaagucaacgaaaaaaucaaccaaucacucgccuucauccgcaaaagcgacgaacuccuucacaacgucaacgcaggcaaaucaaccaccaacaucaugaucaccaccaucaucaucgucaucaucguuauccuacucagccucaucgcaguuggucuucuccuuuacugcaaagcccgcuccacccccgucacccucaguaaagaccaacucagcggaaucaacaacauagcauucuccaacuaaggacuagugcaucacauuuaaaagcaucucagccuaccaugagaauaagagaaagaaaaugaagaucaauagcuuauucaucucuuuuucuuuuucguugguguaaagccaacacccugucuaaaaaacauaaauuucuuuaaucauuuugccucuuuucucugugcuucaauuaauaaaaaauggaaagaaccuagaucuaaaaaaaaaaaaaaaaaaaaaaaaaaaaaaaaaaaaaaaaaaaaaaaaaaaaaaaaaaaaaaaaugcaucccccccccccccccccccccccccccccccaaaggcucuuuucagagccaccagaauu

SEQ ID NO: 4203 - RNA, 1990 nt, Artificial Sequence
  mRNA product Design i-2 comprising derived and/or modified sequence from HRSV(A2)__F_DSCav1_mut0 (opt1)
ggggcgcugccuacggagguggcagccaucuccuucucggcaucaagcuuaccauggagcugcucauccugaaggccaacgccaucaccaccauccugacggcggugaccuucugcuucgccagcggccagaacaucaccgaggaguucuaccaguccacgugcagcgccgucuccaagggguaccucagcgcccugcggaccggcugguacaccuccgugaucaccaucgagcugagcaacaucaaggagaacaagugcaacgggaccgacgccaaggugaagcucaucaagcaggagcuggacaaguacaagaacgcggucacggagcugcagcuccugaugcaguccaccccggcaaccggcuccggcuccgccaucgcgagcggcgucgccgugugcaaggugcugcaccucgagggggaggucaacaagaucaagagcgcccugcuguccaccaacaaggccguggugagccucuccaacggcgucagcgugcugaccuucaaggugcuggaccucaagaacuacaucgacaagcagcugcugcccauccugaacaagcagagcugcuccaucagcaacaucgagacggugaucgaguuccagcagaagaacaaccggcuccuggagaucacccgcgaguucagcgugaacgccggggucaccacccccguguccacguacaugcugaccaacagcgagcuccugucccugaucaacgacaugccgaucaccaacgaccagaagaagcucaugagcaacaacgugcagaucguccggcagcaguccuacagcaucaugugcaucaucaaggaggaggugcuggcguacgugguccagcugccccucuacggcgugaucgacacccccugcuggaagcugcacacgagcccccugugcaccaccaacaccaaggagggguccaacaucugccucacgcgcaccgaccggggcugguacugcgacaacgccggcagcgucuccuucuucccgcaggccgagaccugcaaggugcagagcaaccgcguguucugcgacaccaugaacucccggacgcugcccagcgagguaaaccucugcaacgucgacaucuucaaccccaaguacgacugcaagaucaugaccuccaagaccgacgugagcuccagcgugaucaccucccugggggccaucgucagcugcuacggcaagacgaagugcaccgccagcaacaagaaccgggggaucaucaagaccuucuccaacggcugcgacuacgugagcaacaagggcguggacaccguguccgucgggaacacccuguacuacgugaacaagcaggagggcaagagccucuacgugaagggggagcccaucaucaacuucuacgacccgcuggucuuccccuccgacgaguucgacgcgagcaucucccaggugaacgagaagaucaaccagagccuggccuucauccgcaaguccgacgagcugcuccacaacgugaacgccggcaagagcacgaccaacaucaugaucaccaccaucaucaucgucaucaucgugauccugcugucccucaucgccguggggcugcugcucuacugcaaggcccggagcacgcccgucacccuguccaaggaccagcugagcggcaucaacaacaucgcguucuccaacugaggacuagugcaucacauuuaaaagcaucucagccuaccaugagaauaagagaaagaaaaugaagaucaauagcuuauucaucucuuuuucuuuuucguugguguaaagccaacacccugucuaaaaaacauaaauuucuuuaaucauuuugccucuuuucucugugcuucaauuaauaaaaaauggaaagaaccuagaucuaaaaaaaaaaaaaaaaaaaaaaaaaaaaaaaaaaaaaaaaaaaaaaaaaaaaaaaaaaaaaaaaugcaucccccccccccccccccccccccccccccccaaaggcucuuuucagagccaccagaauu

SEQ ID NO: 4204 - RNA, 1990 nt, Artificial Sequence
  mRNA product Design i-2 comprising derived and/or modified sequence from HRSV(A2)__F_DSCav1_mut0 (opt1)
ggggcgcugccuacggagguggcagccaucuccuucucggcaucaagcuuaccauggagcugcucauccugaaggccaacgccaucaccaccauccugacggcggugaccuucugcuucgccagcggccagaacaucaccgaggaguucuaccaguccacgugcagcgccgucuccaagggguaccucagcgcccugcgcaccggcugguacaccuccgugaucaccaucgagcugagcaacaucaaggagaacaagugcaacgggaccgacgccaaggugaagcucaucaagcaggagcuggacaaguacaagaacgcggucacggagcugcagcuccugaugcaguccacccccgccaccggcagcggguccgccaucgccagcggcguggcggugugcaagguccugcaccucgagggcgaggugaacaagaucaaguccgcccugcugagcaccaacaaggccguggucucccucagcaacgggguguccgugcugacguucaagguccuggaccucaagaacuacaucgacaagcagcugcugccgauccucaacaagcagagcugcuccaucagcaacaucgagaccgugaucgaguuccagcagaagaacaaccggcugcuggagaucacccgcgaguucuccgugaacgccggcgucaccacgcccgugagcaccuacaugcucaccaacagcgagcugcugucccucaucaacgacaugcccaucaccaacgaccagaagaagcugaugagcaacaacgugcagaucguccggcagcaguccuacagcaucaugugcaucaucaaggaggaggugcuggccuacgugguccagcucccccuguacggggugaucgacacgccgugcuggaagcugcacaccagcccccucugcaccaccaacacgaaggagggcuccaacaucugccugacccgcaccgaccgggggugguacugcgacaacgcgggcuccgugagcuucuucccccaggccgagaccugcaagguccaguccaaccgcguguucugcgacacgaugaacagccggacccuccccuccgaggucaaccugugcaacguggacaucuucaacccgaaguacgacugcaagaucaugaccagcaagaccgacguguccagcuccgucaucacgagccugggcgccaucguguccugcuacgggaagaccaagugcaccgccagcaacaagaaccggggcaucaucaagaccuucuccaacgggugcgacuacgugagcaacaagggcgucgacacggugagcgugggcaacacccucuacuacgucaacaagcaggaggggaagucccuguacgugaagggcgagcccaucaucaacuucuacgacccccugguguuccccagcgacgaguucgacgccuccaucagccaggucaacgagaagaucaaccagucccucgcguucauccgcaagagcgacgagcugcugcacaacgugaacgccgggaaguccaccaccaacaucaugaucaccacgaucaucaucgugaucaucgucauccuccugagccugaucgccgugggccuccugcuguacugcaaggcccgguccaccccggugacccugagcaaggaccagcucuccgggaucaacaacaucgccuucagcaacugaggacuagugcaucacauuuaaaagcaucucagccuaccaugagaauaagagaaagaaaaugaagaucaauagcuuauucaucucuuuuucuuuuucguugguguaaagccaacacccugucuaaaaaacauaaauuucuuuaaucauuuugccucuuuucucugugcuucaauuaauaaaaaauggaaagaaccuagaucuaaaaaaaaaaaaaaaaaaaaaaaaaaaaaaaaaaaaaaaaaaaaaaaaaaaaaaaaaaaaaaaaugcaucccccccccccccccccccccccccccccccaaaggcucuuuucagagccaccagaauu

SEQ ID NO: 4205 - RNA, 1990 nt, Artificial Sequence
  mRNA product Design i-2 comprising derived and/or modified sequence from HRSV(A2)__F_DSCav1_mut0 (opt2)
ggggcgcugccuacggagguggcagccaucuccuucucggcaucaagcuuaccauggagcuccucauccucaaggccaacgccaucaccaccauccucaccgccgucaccuucugcuucgccuccggccagaacaucaccgaggaguucuaccaguccaccugcuccgccgucuccaagggcuaccucuccgcccuccgcaccggcugguacaccuccgucaucaccaucgagcucuccaacaucaaggagaacaagugcaacggcaccgacgccaaggucaagcucaucaagcaggagcucgacaaguacaagaacgccgucaccgagcuccagcuccucaugcaguccacccccgccaccggcuccggcuccgccaucgccuccggcgucgccgucugcaagguccuccaccucgagggcgaggucaacaagaucaaguccgcccuccucuccaccaacaaggccgucgucucccucuccaacggcgucuccguccucaccuucaagguccucgaccucaagaacuacaucgacaagcagcuccuccccauccucaacaagcaguccugcuccaucuccaacaucgagaccgucaucgaguuccagcagaagaacaaccgccuccucgagaucacccgcgaguucuccgucaacgccggcgucaccacccccgucuccaccuacaugcucaccaacuccgagcuccucucccucaucaacgacaugcccaucaccaacgaccagaagaagcucauguccaacaacguccagaucguccgccagcaguccuacuccaucaugugcaucaucaaggaggagguccucgccuacgucguccagcucccccucuacggcgucaucgacacccccugcuggaagcuccacaccuccccccucugcaccaccaacaccaaggagggcuccaacaucugccucacccgcaccgaccgcggcugguacugcgacaacgccggcuccgucuccuucuucccccaggccgagaccugcaagguccaguccaaccgcgucuucugcgacaccaugaacucccgcacccuccccuccgaggucaaccucugcaacgucgacaucuucaaccccaaguacgacugcaagaucaugaccuccaagaccgacgucuccuccuccgucaucaccucccucggcgccaucgucuccugcuacggcaagaccaagugcaccgccuccaacaagaaccgcggcaucaucaagaccuucuccaacggcugcgacuacgucuccaacaagggcgucgacaccgucuccgucggcaacacccucuacuacgucaacaagcaggagggcaagucccucuacgucaagggcgagcccaucaucaacuucuacgacccccucgucuuccccuccgacgaguucgacgccuccaucucccaggucaacgagaagaucaaccagucccucgccuucauccgcaaguccgacgagcuccuccacaacgucaacgccggcaaguccaccaccaacaucaugaucaccaccaucaucaucgucaucaucgucauccuccucucccucaucgccgucggccuccuccucuacugcaaggcccgcuccacccccgucacccucuccaaggaccagcucuccggcaucaacaacaucgccuucuccaacugaggacuagugcaucacauuuaaaagcaucucagccuaccaugagaauaagagaaagaaaaugaagaucaauagcuuauucaucucuuuuucuuuuucguugguguaaagccaacacccugucuaaaaaacauaaauuucuuuaaucauuuugccucuuuucucugugcuucaauuaauaaaaaauggaaagaaccuagaucuaaaaaaaaaaaaaaaaaaaaaaaaaaaaaaaaaaaaaaaaaaaaaaaaaaaaaaaaaaaaaaaaugcaucccccccccccccccccccccccccccccccaaaggcucuuuucagagccaccagaauu

SEQ ID NO: 4206 - RNA, 1990 nt, Artificial Sequence
  mRNA product Design i-2 comprising derived and/or modified sequence from HRSV(A2)__F_DSCav1_mut0 (opt3)
ggggcgcugccuacggagguggcagccaucuccuucucggcaucaagcuuaccauggagcugcucauccuuaaggccaacgcuauuaccacaauacugacugcagugacguucugcuuugccagcggccagaauaucaccgaagaguucuaccaauccacauguucugcggucucaaaaggguauuugagugcuuuaagaacuggaugguacaccagcguuauuacaaucgaacuguccaacauuaaggagaauaaaugcaacgguaccgacgccaaggugaaacuaaucaagcaggaacucgauaaguauaaaaaugcaguaacugagcugcagcuucugaugcagucuacacccgccaccggcucggggucagcuauagcaagcggaguggccgucuguaagguguugcaccucgagggcgaaguuaacaaaaucaagagugcucugcuguccacgaauaaagccguggucucucucagcaacgguguguccguauuaacuuuuaagguucuggaccuuaagaauuacauugauaaacaauugcugccuauccuaaacaagcagucaugcaguauuagcaauaucgagaccgugauagaguuccagcagaaaaacaauaggcuccuggaaauuacacgggaguuuucugucaacgcgggggugacuaccccaguguccacauauaugcuuaccaauucagaacuguugagccucaucaacgacaugccgauuacgaacgaucaaaagaaacugaugaguaauaacguccagaucguucgccagcagucuuacuccaucauguguauuauaaaggaggaaguguuagcauauguagugcaacugccccucuacggagucaucgacacuccuugcuggaaacuucauacaagcccacuguguaccacuaauacaaaggagggcucgaacauuugcuugacccgaacggaucguggcugguacugugacaaugccgggucuguguccuucuuuccccaggcugaaaccugcaagguucagucaaacagaguguucugugauacaaugaauaguagaacucugccuagcgaggucaaccucugcaauguggacaucuuuaacccaaaauaugauugcaagauaaugaccuccaaaacagacguaucuagcucaguuauuaccagucugggagccaucguguccuguuacgguaagacuaaaugcacagcaagcaauaagaacaggggcaucauuaagaccuucucuaaugggugugauuaugucucaaacaaaggaguggacacugucagugugggcaauacgcuuuacuauguuaacaagcaagaggguaaaagccuguacgugaagggggaacccaucauuaacuuuuaugacccuuugguauucccauccgaugaguuugacgcuucuauaucgcaggucaaugagaaaaucaaccagagccucgccuucauucggaaguccgaugaacuguuacacaaugugaacgcgggaaagucaacaaccaauaucaugaucacuaccauuauaaucguuauuaucgugauucugcuaagucucaucgccgucggccugcuuuuguacugcaaagcacgcucuacaccggugacccugagcaaggaccagcucuccggcauaaacaauaucgcuuucucaaacugaggacuagugcaucacauuuaaaagcaucucagccuaccaugagaauaagagaaagaaaaugaagaucaauagcuuauucaucucuuuuucuuuuucguugguguaaagccaacacccugucuaaaaaacauaaauuucuuuaaucauuuugccucuuuucucugugcuucaauuaauaaaaaauggaaagaaccuagaucuaaaaaaaaaaaaaaaaaaaaaaaaaaaaaaaaaaaaaaaaaaaaaaaaaaaaaaaaaaaaaaaaugcaucccccccccccccccccccccccccccccccaaaggcucuuuucagagccaccagaauu

SEQ ID NO: 4207 - RNA, 1990 nt, Artificial Sequence
  mRNA product Design i-2 comprising derived and/or modified sequence from HRSV(A2)__F_DSCav1_mut0 (opt4)
ggggcgcugccuacggagguggcagccaucuccuucucggcaucaagcuuaccauggagcugcugauccugaaggccaacgccaucaccaccauccugaccgccgugaccuucugcuucgccagcggccagaacaucaccgaggaguucuaccagagcaccugcagcgccgugagcaagggcuaccugagcgcccugagaaccggcugguacaccagcgugaucaccaucgagcugagcaacaucaaggagaacaagugcaacggcaccgacgccaaggugaagcugaucaagcaggagcuggacaaguacaagaacgccgugaccgagcugcagcugcugaugcagagcacccccgccaccggcagcggcagcgccaucgccagcggcguggccgugugcaaggugcugcaccuggagggcgaggugaacaagaucaagagcgcccugcugagcaccaacaaggccguggugagccugagcaacggcgugagcgugcugaccuucaaggugcuggaccugaagaacuacaucgacaagcagcugcugcccauccugaacaagcagagcugcagcaucagcaacaucgagaccgugaucgaguuccagcagaagaacaacagacugcuggagaucaccagagaguucagcgugaacgccggcgugaccacccccgugagcaccuacaugcugaccaacagcgagcugcugagccugaucaacgacaugcccaucaccaacgaccagaagaagcugaugagcaacaacgugcagaucgugagacagcagagcuacagcaucaugugcaucaucaaggaggaggugcuggccuacguggugcagcugccccuguacggcgugaucgacacccccugcuggaagcugcacaccagcccccugugcaccaccaacaccaaggagggcagcaacaucugccugaccagaaccgacagaggcugguacugcgacaacgccggcagcgugagcuucuucccccaggccgagaccugcaaggugcagagcaacagaguguucugcgacaccaugaacagcagaacccugcccagcgaggugaaccugugcaacguggacaucuucaaccccaaguacgacugcaagaucaugaccagcaagaccgacgugagcagcagcgugaucaccagccugggcgccaucgugagcugcuacggcaagaccaagugcaccgccagcaacaagaacagaggcaucaucaagaccuucagcaacggcugcgacuacgugagcaacaagggcguggacaccgugagcgugggcaacacccuguacuacgugaacaagcaggagggcaagagccuguacgugaagggcgagcccaucaucaacuucuacgacccccugguguuccccagcgacgaguucgacgccagcaucagccaggugaacgagaagaucaaccagagccuggccuucaucagaaagagcgacgagcugcugcacaacgugaacgccggcaagagcaccaccaacaucaugaucaccaccaucaucaucgugaucaucgugauccugcugagccugaucgccgugggccugcugcuguacugcaaggccagaagcacccccgugacccugagcaaggaccagcugagcggcaucaacaacaucgccuucagcaacugaggacuagugcaucacauuuaaaagcaucucagccuaccaugagaauaagagaaagaaaaugaagaucaauagcuuauucaucucuuuuucuuuuucguugguguaaagccaacacccugucuaaaaaacauaaauuucuuuaaucauuuugccucuuuucucugugcuucaauuaauaaaaaauggaaagaaccuagaucuaaaaaaaaaaaaaaaaaaaaaaaaaaaaaaaaaaaaaaaaaaaaaaaaaaaaaaaaaaaaaaaaugcaucccccccccccccccccccccccccccccccaaaggcucuuuucagagccaccagaauu

SEQ ID NO: 4208 - RNA, 1990 nt, Artificial Sequence
  mRNA product Design i-2 comprising derived and/or modified sequence from HRSV(A2)__F_DSCav1_mut0 (opt5)
ggggcgcugccuacggagguggcagccaucuccuucucggcaucaagcuuaccauggagcugcucauccugaaggccaacgcuauuaccacaauccuuacggccgugaccuucugcuuugcgagcggccagaauauuacagaagaguucuaccaauccaccuguucugcugucagcaaaggguaucuguccgcccucagaacaggaugguacaccucuguuaucacaauugaacugagcaacaucaaggagaauaaaugcaacggcaccgacgccaaggugaaacuuaucaagcaggaacuggauaaguauaaaaaugcugugacggagcuccagcugcugaugcaguccacccccgccacagggucuggaagcgcuauugccuccggcgucgcgguguguaagguucuccaccuggagggggaagugaacaaaaucaagagcgcccuucugucuaccaauaaagcugucgugucccucagcaacggaguuucugugcugacauuuaagguccuugaccugaagaauuacauugauaaacaacuccugccuauccugaacaagcaguccugcagcauuucuaauaucgagaccgugauugaguuccagcagaaaaacaaucggcuccuggaaaucacgcgcgaguuuuccgugaacgccggcgucacaaccccgguuagcacauauaugcuuaccaauuccgaacugcucucucugaucaacgacaugcccauuaccaacgaucaaaagaaacuuaugagcaauaacgugcagaucgugagacagcaguccuacagcauuauguguaucauuaaggaggaaguccuggcuuaugugguucaacucccucuguacggcgugaucgacacacccugcuggaaacugcauacgucuccucucuguaccacaaauaccaaggagggguccaacaucugccugacacggaccgaucgcggaugguacugugacaaugccggcagcgucucuuucuuuccccaggcggaaacgugcaaggugcagagcaacagaguuuucugugauacaaugaacuccagaacccugccuucugaggugaaucucugcaaugucgacauuuuuaacccgaaauaugauugcaagaucaugaccagcaaaacagacguguccagcucugucauuaccucccugggggccaucgugagcuguuacggaaagacaaaaugcacggcuucuaauaagaaccggggcauuaucaagaccuucuccaaugggugugauuauguuagcaacaaaggaguggacacagucuccgugggcaauacccuuuacuauguuaacaagcaagagggcaaaucucuguacgugaagggggaacccaucauuaacuuuuaugacccucucgucuuccccagcgaugaguuugacgccuccaucucucaggugaaugagaaaauuaaccagagccuggcuuucauccgcaaguccgaugaacugcuccacaaugugaacgccggaaagagcacaaccaauauuaugaucacgaccauuaucaucguuauuaucgucauucugcuuucucugaucgccgugggccuccugcuguacugcaaagcuagauccacaccugugacccuuagcaaggaccagcucucugggauuaacaauaucgcguucuccaacugaggacuagugcaucacauuuaaaagcaucucagccuaccaugagaauaagagaaagaaaaugaagaucaauagcuuauucaucucuuuuucuuuuucguugguguaaagccaacacccugucuaaaaaacauaaauuucuuuaaucauuuugccucuuuucucugugcuucaauuaauaaaaaauggaaagaaccuagaucuaaaaaaaaaaaaaaaaaaaaaaaaaaaaaaaaaaaaaaaaaaaaaaaaaaaaaaaaaaaaaaaaugcaucccccccccccccccccccccccccccccccaaaggcucuuuucagagccaccagaauu

SEQ ID NO: 4209 - RNA, 1990 nt, Artificial Sequence
  mRNA product Design i-2 comprising derived and/or modified sequence from HRSV(A2)__F_DSCav1_mut0 (opt6)
ggggcgcugccuacggagguggcagccaucuccuucucggcaucaagcuuaccauggaacuacuaauacuaaaagccaaugcaauaacaaccauacuaaccgccguaacauuuuguuucgcaucaggucaaaacauaaccgaagaauuuuaucaaucaacaugcucagcaguaucaaaaggauacuuauccgcucuaagaacaggaugguacacaaguguaauuacaauagagcucucaaacauaaaagaaaacaaaugcaauggaacugacgcaaaaguuaaacuuauaaaacaagaacuagauaaauauaaaaaugcaguaaccgaauuacaacuccuaaugcaauccacaccugcuaccgguuccggaucagccauagcaucuggaguagccguaugcaaaguccuccaccuagaaggagaaguaaauaaaaucaaaucagcacuauuaucuaccaauaaagcaguugucucacuauccaauggcguaucaguacuaacauucaaaguauuagaccuuaaaaacuacauagacaaacaacuauuaccaauucugaacaaacaauccuguucaauaucaaacaucgaaacgguaauagaauuucaacaaaaaaauaacagauuacuugaaauaacaagagaauuuucaguaaaugcaggaguuacaacacccgucuccaccuacaugcucacaaauucagaauuauuaucacuuauaaacgacaugccaauaacuaacgaccaaaaaaaacuaaugucaaacaauguccaaauaguccgacaacaauccuacucaauaaugugcauuauaaaagaagaaguccuagccuacguuguccaacuacccuuauauggaguaauagauaccccaugcuggaaacuucauaccuccccccuaugcacaacaaacacaaaagaaggcucaaacaucugcuuaacacguacagaccgagguugguacugugauaacgcaggauccguaucauuuuucccacaagcagaaacaugcaaaguacaaucaaaccgcguuuuuugugacaccaugaacagcagaacccucccuucagaaguaaaccuaugcaacgucgauauauuuaacccaaaauacgauugcaaaauaaugacaucaaaaaccgaugucucaucuucaguaauaaccucucuaggagcaauagucucauguuacggaaaaacaaaaugcacagcaaguaauaaaaauagaggaauaauaaaaacauucucuaauggcugcgacuacguauccaauaaaggcguugacacaguauccguaggcaacacacucuacuauguuaacaaacaagaaggaaaaaguuuauacguuaaaggagaaccaauuauaaacuuuuacgacccacucguauucccaucugaugaauuugacgcaucaaucucacaaguaaaugaaaaaaucaaucagucccuugccuuuauaagaaaaucagaugaacuuuuacacaacguuaacgccggaaaaucaacaaccaauauaaugaucacaaccauaauaauaguuauaauuguaauuuuauuauccuuaauagccgucggacuacuacuauacugcaaagcaagaucuacacccguaacccuaucaaaagaccaacuaaguggaauaaauaacauugcauucucaaauuaaggacuagugcaucacauuuaaaagcaucucagccuaccaugagaauaagagaaagaaaaugaagaucaauagcuuauucaucucuuuuucuuuuucguugguguaaagccaacacccugucuaaaaaacauaaauuucuuuaaucauuuugccucuuuucucugugcuucaauuaauaaaaaauggaaagaaccuagaucuaaaaaaaaaaaaaaaaaaaaaaaaaaaaaaaaaaaaaaaaaaaaaaaaaaaaaaaaaaaaaaaaugcaucccccccccccccccccccccccccccccccaaaggcucuuuucagagccaccagaauu

SEQ ID NO: 4210 - RNA, 1990 nt, Artificial Sequence
  mRNA product Design i-2 comprising derived and/or modified sequence from HRSV(A2)__F_DSCav1_mut0 (opt11)
ggggcgcugccuacggagguggcagccaucuccuucucggcaucaagcuuaccauggaacuccuaauacuaaaggcaaacgcaaucacuacaauucuaaccgccgugacauucugcuucgccuccggacaaaacaucaccgaagaauuuuaccaauccacaugcucggccgucaguaaaggcuaccucucggcucuccgaaccggcugguacaccuccgucaucaccaucgaacucuccaacaucaaagaaaacaaaugcaacggcaccgacgccaaagucaaacuaaucaaacaagaacucgacaaauacaaaaacgccgucacagaacuccaacuacuaaugcaaucaacacccgcuacaggaagcggcuccgccaucgccagcggcguagcugucugcaaaguccuccaccucgaaggugaagucaacaaaaucaaaucagcccuacucagcacaaacaaagccguuguaagccuauccaacggcgucuccguacuaacauucaaaguccuugaccucaagaacuacaucgacaaacaacuucucccaauccuaaacaaacaaagcugcucaauuuccaacaucgaaacaguaaucgaauuucaacaaaaaaacaaccgacuccucgaaaucacccgcgaauuuuccguuaacgccggcguuacaacccccgucuccaccuacaugcucaccaauuccgaacuacuaucacucauaaacgacaugccuaucacaaacgaccaaaaaaaacuaaugucaaacaauguccaaaucguccgccagcaaagcuauuccaucaugugcaucaucaaagaggaaguccucgccuacguaguccaacugccccucuacggcgucauugauacccccugcuggaaacuccacaccuccccccucugcaccacaaacaccaaagaagguuccaacaucugccuaacacgaaccgacagaggcugguacugcgacaacgccggcagcgucuccuucuucccccaagcagaaaccuguaaaguccagucuaaccgcgucuucugcgacacaaugaacucaagaacccuaccuuccgaaguaaaccucugcaacguagacaucuucaacccuaaauacgacugcaaaaucaugacuucaaaaacagacguaagcucuuccguaaucacuucccucggcgccaucguauccugcuacgguaaaaccaaaugcaccgccuccaacaaaaaccgagggaucauaaaaaccuucuccaacggcugcgacuacguaucuaacaaaggcgucgacaccgucuccgucggcaacacccucuauuacguaaacaaacaagagggcaaaucacuauacgucaaaggcgagccaaucauaaacuucuaugacccacucgucuucccuucagacgaauuugaugccagcaucagccaagucaacgaaaaaaucaaccaaucacucgccuucauccgcaaaagcgacgaacuccuucacaacgucaacgcaggcaaaucaaccaccaacaucaugaucaccaccaucaucaucgucaucaucguuauccuacucagccucaucgcaguuggucuucuccuuuacugcaaagcccgcuccacccccgucacccucaguaaagaccaacucagcggaaucaacaacauagcauucuccaacuaaggacuagugcaucacauuuaaaagcaucucagccuaccaugagaauaagagaaagaaaaugaagaucaauagcuuauucaucucuuuuucuuuuucguugguguaaagccaacacccugucuaaaaaacauaaauuucuuuaaucauuuugccucuuuucucugugcuucaauuaauaaaaaauggaaagaaccuagaucuaaaaaaaaaaaaaaaaaaaaaaaaaaaaaaaaaaaaaaaaaaaaaaaaaaaaaaaaaaaaaaaaugcaucccccccccccccccccccccccccccccccaaaggcucuuuucagagccaccagaauu

SEQ ID NO: 4211 - RNA, 1825 nt, Artificial Sequence
  mRNA product Design i-3 comprising derived and/or modified sequence from HRSV(A2)__F_DSCav1_mut0 (opt1) R7454
gggagaaagcuuaccauggagcugcucauccugaaggccaacgccaucaccaccauccugacggcggugaccuucugcuucgccagcggccagaacaucaccgaggaguucuaccaguccacgugcagcgccgucuccaagggguaccucagcgcccugcggaccggcugguacaccuccgugaucaccaucgagcugagcaacaucaaggagaacaagugcaacgggaccgacgccaaggugaagcucaucaagcaggagcuggacaaguacaagaacgcggucacggagcugcagcuccugaugcaguccaccccggcaaccggcuccggcuccgccaucgcgagcggcgucgccgugugcaaggugcugcaccucgagggggaggucaacaagaucaagagcgcccugcuguccaccaacaaggccguggugagccucuccaacggcgucagcgugcugaccuucaaggugcuggaccucaagaacuacaucgacaagcagcugcugcccauccugaacaagcagagcugcuccaucagcaacaucgagacggugaucgaguuccagcagaagaacaaccggcuccuggagaucacccgcgaguucagcgugaacgccggggucaccacccccguguccacguacaugcugaccaacagcgagcuccugucccugaucaacgacaugccgaucaccaacgaccagaagaagcucaugagcaacaacgugcagaucguccggcagcaguccuacagcaucaugugcaucaucaaggaggaggugcuggcguacgugguccagcugccccucuacggcgugaucgacacccccugcuggaagcugcacacgagcccccugugcaccaccaacaccaaggagggguccaacaucugccucacgcgcaccgaccggggcugguacugcgacaacgccggcagcgucuccuucuucccgcaggccgagaccugcaaggugcagagcaaccgcguguucugcgacaccaugaacucccggacgcugcccagcgagguaaaccucugcaacgucgacaucuucaaccccaaguacgacugcaagaucaugaccuccaagaccgacgugagcuccagcgugaucaccucccugggggccaucgucagcugcuacggcaagacgaagugcaccgccagcaacaagaaccgggggaucaucaagaccuucuccaacggcugcgacuacgugagcaacaagggcguggacaccguguccgucgggaacacccuguacuacgugaacaagcaggagggcaagagccucuacgugaagggggagcccaucaucaacuucuacgacccgcuggucuuccccuccgacgaguucgacgcgagcaucucccaggugaacgagaagaucaaccagagccuggccuucauccgcaaguccgacgagcugcuccacaacgugaacgccggcaagagcacgaccaacaucaugaucaccaccaucaucaucgucaucaucgugauccugcugucccucaucgccguggggcugcugcucuacugcaaggcccggagcacgcccgucacccuguccaaggaccagcugagcggcaucaacaacaucgcguucuccaacugaggacuaguuauaagacugacuagcccgaugggccucccaacgggcccuccuccccuccuugcaccgagauuaauaaaaaaaaaaaaaaaaaaaaaaaaaaaaaaaaaaaaaaaaaaaaaaaaaaaaaaaaaaaaaaaaugcaucccccccccccccccccccccccccccccccaaaggcucuuuucagagccaccagaauu

SEQ ID NO: 4212 - RNA, 1825 nt, Artificial Sequence
  mRNA product Design i-3 comprising derived and/or modified sequence from HRSV(A2)__F_DSCav1_mut0 (opt1)
gggagaaagcuuaccauggagcugcucauccugaaggccaacgccaucaccaccauccugacggcggugaccuucugcuucgccagcggccagaacaucaccgaggaguucuaccaguccacgugcagcgccgucuccaagggguaccucagcgcccugcgcaccggcugguacaccuccgugaucaccaucgagcugagcaacaucaaggagaacaagugcaacgggaccgacgccaaggugaagcucaucaagcaggagcuggacaaguacaagaacgcggucacggagcugcagcuccugaugcaguccacccccgccaccggcagcggguccgccaucgccagcggcguggcggugugcaagguccugcaccucgagggcgaggugaacaagaucaaguccgcccugcugagcaccaacaaggccguggucucccucagcaacgggguguccgugcugacguucaagguccuggaccucaagaacuacaucgacaagcagcugcugccgauccucaacaagcagagcugcuccaucagcaacaucgagaccgugaucgaguuccagcagaagaacaaccggcugcuggagaucacccgcgaguucuccgugaacgccggcgucaccacgcccgugagcaccuacaugcucaccaacagcgagcugcugucccucaucaacgacaugcccaucaccaacgaccagaagaagcugaugagcaacaacgugcagaucguccggcagcaguccuacagcaucaugugcaucaucaaggaggaggugcuggccuacgugguccagcucccccuguacggggugaucgacacgccgugcuggaagcugcacaccagcccccucugcaccaccaacacgaaggagggcuccaacaucugccugacccgcaccgaccgggggugguacugcgacaacgcgggcuccgugagcuucuucccccaggccgagaccugcaagguccaguccaaccgcguguucugcgacacgaugaacagccggacccuccccuccgaggucaaccugugcaacguggacaucuucaacccgaaguacgacugcaagaucaugaccagcaagaccgacguguccagcuccgucaucacgagccugggcgccaucguguccugcuacgggaagaccaagugcaccgccagcaacaagaaccggggcaucaucaagaccuucuccaacgggugcgacuacgugagcaacaagggcgucgacacggugagcgugggcaacacccucuacuacgucaacaagcaggaggggaagucccuguacgugaagggcgagcccaucaucaacuucuacgacccccugguguuccccagcgacgaguucgacgccuccaucagccaggucaacgagaagaucaaccagucccucgcguucauccgcaagagcgacgagcugcugcacaacgugaacgccgggaaguccaccaccaacaucaugaucaccacgaucaucaucgugaucaucgucauccuccugagccugaucgccgugggccuccugcuguacugcaaggcccgguccaccccggugacccugagcaaggaccagcucuccgggaucaacaacaucgccuucagcaacugaggacuaguuauaagacugacuagcccgaugggccucccaacgggcccuccuccccuccuugcaccgagauuaauaaaaaaaaaaaaaaaaaaaaaaaaaaaaaaaaaaaaaaaaaaaaaaaaaaaaaaaaaaaaaaaaugcaucccccccccccccccccccccccccccccccaaaggcucuuuucagagccaccagaauu

SEQ ID NO: 4213 - RNA, 1825 nt, Artificial Sequence
  mRNA product Design i-3 comprising derived and/or modified sequence from HRSV(A2)__F_DSCav1_mut0 (opt2)
gggagaaagcuuaccauggagcuccucauccucaaggccaacgccaucaccaccauccucaccgccgucaccuucugcuucgccuccggccagaacaucaccgaggaguucuaccaguccaccugcuccgccgucuccaagggcuaccucuccgcccuccgcaccggcugguacaccuccgucaucaccaucgagcucuccaacaucaaggagaacaagugcaacggcaccgacgccaaggucaagcucaucaagcaggagcucgacaaguacaagaacgccgucaccgagcuccagcuccucaugcaguccacccccgccaccggcuccggcuccgccaucgccuccggcgucgccgucugcaagguccuccaccucgagggcgaggucaacaagaucaaguccgcccuccucuccaccaacaaggccgucgucucccucuccaacggcgucuccguccucaccuucaagguccucgaccucaagaacuacaucgacaagcagcuccuccccauccucaacaagcaguccugcuccaucuccaacaucgagaccgucaucgaguuccagcagaagaacaaccgccuccucgagaucacccgcgaguucuccgucaacgccggcgucaccacccccgucuccaccuacaugcucaccaacuccgagcuccucucccucaucaacgacaugcccaucaccaacgaccagaagaagcucauguccaacaacguccagaucguccgccagcaguccuacuccaucaugugcaucaucaaggaggagguccucgccuacgucguccagcucccccucuacggcgucaucgacacccccugcuggaagcuccacaccuccccccucugcaccaccaacaccaaggagggcuccaacaucugccucacccgcaccgaccgcggcugguacugcgacaacgccggcuccgucuccuucuucccccaggccgagaccugcaagguccaguccaaccgcgucuucugcgacaccaugaacucccgcacccuccccuccgaggucaaccucugcaacgucgacaucuucaaccccaaguacgacugcaagaucaugaccuccaagaccgacgucuccuccuccgucaucaccucccucggcgccaucgucuccugcuacggcaagaccaagugcaccgccuccaacaagaaccgcggcaucaucaagaccuucuccaacggcugcgacuacgucuccaacaagggcgucgacaccgucuccgucggcaacacccucuacuacgucaacaagcaggagggcaagucccucuacgucaagggcgagcccaucaucaacuucuacgacccccucgucuuccccuccgacgaguucgacgccuccaucucccaggucaacgagaagaucaaccagucccucgccuucauccgcaaguccgacgagcuccuccacaacgucaacgccggcaaguccaccaccaacaucaugaucaccaccaucaucaucgucaucaucgucauccuccucucccucaucgccgucggccuccuccucuacugcaaggcccgcuccacccccgucacccucuccaaggaccagcucuccggcaucaacaacaucgccuucuccaacugaggacuaguuauaagacugacuagcccgaugggccucccaacgggcccuccuccccuccuugcaccgagauuaauaaaaaaaaaaaaaaaaaaaaaaaaaaaaaaaaaaaaaaaaaaaaaaaaaaaaaaaaaaaaaaaaugcaucccccccccccccccccccccccccccccccaaaggcucuuuucagagccaccagaauu

SEQ ID NO: 4214 - RNA, 1825 nt, Artificial Sequence
  mRNA product Design i-3 comprising derived and/or modified sequence from HRSV(A2)__F_DSCav1_mut0 (opt3)
gggagaaagcuuaccauggagcugcucauccuuaaggccaacgcuauuaccacaauacugacugcagugacguucugcuuugccagcggccagaauaucaccgaagaguucuaccaauccacauguucugcggucucaaaaggguauuugagugcuuuaagaacuggaugguacaccagcguuauuacaaucgaacuguccaacauuaaggagaauaaaugcaacgguaccgacgccaaggugaaacuaaucaagcaggaacucgauaaguauaaaaaugcaguaacugagcugcagcuucugaugcagucuacacccgccaccggcucggggucagcuauagcaagcggaguggccgucuguaagguguugcaccucgagggcgaaguuaacaaaaucaagagugcucugcuguccacgaauaaagccguggucucucucagcaacgguguguccguauuaacuuuuaagguucuggaccuuaagaauuacauugauaaacaauugcugccuauccuaaacaagcagucaugcaguauuagcaauaucgagaccgugauagaguuccagcagaaaaacaauaggcuccuggaaauuacacgggaguuuucugucaacgcgggggugacuaccccaguguccacauauaugcuuaccaauucagaacuguugagccucaucaacgacaugccgauuacgaacgaucaaaagaaacugaugaguaauaacguccagaucguucgccagcagucuuacuccaucauguguauuauaaaggaggaaguguuagcauauguagugcaacugccccucuacggagucaucgacacuccuugcuggaaacuucauacaagcccacuguguaccacuaauacaaaggagggcucgaacauuugcuugacccgaacggaucguggcugguacugugacaaugccgggucuguguccuucuuuccccaggcugaaaccugcaagguucagucaaacagaguguucugugauacaaugaauaguagaacucugccuagcgaggucaaccucugcaauguggacaucuuuaacccaaaauaugauugcaagauaaugaccuccaaaacagacguaucuagcucaguuauuaccagucugggagccaucguguccuguuacgguaagacuaaaugcacagcaagcaauaagaacaggggcaucauuaagaccuucucuaaugggugugauuaugucucaaacaaaggaguggacacugucagugugggcaauacgcuuuacuauguuaacaagcaagaggguaaaagccuguacgugaagggggaacccaucauuaacuuuuaugacccuuugguauucccauccgaugaguuugacgcuucuauaucgcaggucaaugagaaaaucaaccagagccucgccuucauucggaaguccgaugaacuguuacacaaugugaacgcgggaaagucaacaaccaauaucaugaucacuaccauuauaaucguuauuaucgugauucugcuaagucucaucgccgucggccugcuuuuguacugcaaagcacgcucuacaccggugacccugagcaaggaccagcucuccggcauaaacaauaucgcuuucucaaacugaggacuaguuauaagacugacuagcccgaugggccucccaacgggcccuccuccccuccuugcaccgagauuaauaaaaaaaaaaaaaaaaaaaaaaaaaaaaaaaaaaaaaaaaaaaaaaaaaaaaaaaaaaaaaaaaugcaucccccccccccccccccccccccccccccccaaaggcucuuuucagagccaccagaauu

SEQ ID NO: 4215 - RNA, 1825 nt, Artificial Sequence
  mRNA product Design i-3 comprising derived and/or modified sequence from HRSV(A2)__F_DSCav1_mut0 (opt4)
gggagaaagcuuaccauggagcugcugauccugaaggccaacgccaucaccaccauccugaccgccgugaccuucugcuucgccagcggccagaacaucaccgaggaguucuaccagagcaccugcagcgccgugagcaagggcuaccugagcgcccugagaaccggcugguacaccagcgugaucaccaucgagcugagcaacaucaaggagaacaagugcaacggcaccgacgccaaggugaagcugaucaagcaggagcuggacaaguacaagaacgccgugaccgagcugcagcugcugaugcagagcacccccgccaccggcagcggcagcgccaucgccagcggcguggccgugugcaaggugcugcaccuggagggcgaggugaacaagaucaagagcgcccugcugagcaccaacaaggccguggugagccugagcaacggcgugagcgugcugaccuucaaggugcuggaccugaagaacuacaucgacaagcagcugcugcccauccugaacaagcagagcugcagcaucagcaacaucgagaccgugaucgaguuccagcagaagaacaacagacugcuggagaucaccagagaguucagcgugaacgccggcgugaccacccccgugagcaccuacaugcugaccaacagcgagcugcugagccugaucaacgacaugcccaucaccaacgaccagaagaagcugaugagcaacaacgugcagaucgugagacagcagagcuacagcaucaugugcaucaucaaggaggaggugcuggccuacguggugcagcugccccuguacggcgugaucgacacccccugcuggaagcugcacaccagcccccugugcaccaccaacaccaaggagggcagcaacaucugccugaccagaaccgacagaggcugguacugcgacaacgccggcagcgugagcuucuucccccaggccgagaccugcaaggugcagagcaacagaguguucugcgacaccaugaacagcagaacccugcccagcgaggugaaccugugcaacguggacaucuucaaccccaaguacgacugcaagaucaugaccagcaagaccgacgugagcagcagcgugaucaccagccugggcgccaucgugagcugcuacggcaagaccaagugcaccgccagcaacaagaacagaggcaucaucaagaccuucagcaacggcugcgacuacgugagcaacaagggcguggacaccgugagcgugggcaacacccuguacuacgugaacaagcaggagggcaagagccuguacgugaagggcgagcccaucaucaacuucuacgacccccugguguuccccagcgacgaguucgacgccagcaucagccaggugaacgagaagaucaaccagagccuggccuucaucagaaagagcgacgagcugcugcacaacgugaacgccggcaagagcaccaccaacaucaugaucaccaccaucaucaucgugaucaucgugauccugcugagccugaucgccgugggccugcugcuguacugcaaggccagaagcacccccgugacccugagcaaggaccagcugagcggcaucaacaacaucgccuucagcaacugaggacuaguuauaagacugacuagcccgaugggccucccaacgggcccuccuccccuccuugcaccgagauuaauaaaaaaaaaaaaaaaaaaaaaaaaaaaaaaaaaaaaaaaaaaaaaaaaaaaaaaaaaaaaaaaaugcaucccccccccccccccccccccccccccccccaaaggcucuuuucagagccaccagaauu

SEQ ID NO: 4216 - RNA, 1825 nt, Artificial Sequence
  mRNA product Design i-3 comprising derived and/or modified sequence from HRSV(A2)__F_DSCav1_mut0 (opt5)
gggagaaagcuuaccauggagcugcucauccugaaggccaacgcuauuaccacaauccuuacggccgugaccuucugcuuugcgagcggccagaauauuacagaagaguucuaccaauccaccuguucugcugucagcaaaggguaucuguccgcccucagaacaggaugguacaccucuguuaucacaauugaacugagcaacaucaaggagaauaaaugcaacggcaccgacgccaaggugaaacuuaucaagcaggaacuggauaaguauaaaaaugcugugacggagcuccagcugcugaugcaguccacccccgccacagggucuggaagcgcuauugccuccggcgucgcgguguguaagguucuccaccuggagggggaagugaacaaaaucaagagcgcccuucugucuaccaauaaagcugucgugucccucagcaacggaguuucugugcugacauuuaagguccuugaccugaagaauuacauugauaaacaacuccugccuauccugaacaagcaguccugcagcauuucuaauaucgagaccgugauugaguuccagcagaaaaacaaucggcuccuggaaaucacgcgcgaguuuuccgugaacgccggcgucacaaccccgguuagcacauauaugcuuaccaauuccgaacugcucucucugaucaacgacaugcccauuaccaacgaucaaaagaaacuuaugagcaauaacgugcagaucgugagacagcaguccuacagcauuauguguaucauuaaggaggaaguccuggcuuaugugguucaacucccucuguacggcgugaucgacacacccugcuggaaacugcauacgucuccucucuguaccacaaauaccaaggagggguccaacaucugccugacacggaccgaucgcggaugguacugugacaaugccggcagcgucucuuucuuuccccaggcggaaacgugcaaggugcagagcaacagaguuuucugugauacaaugaacuccagaacccugccuucugaggugaaucucugcaaugucgacauuuuuaacccgaaauaugauugcaagaucaugaccagcaaaacagacguguccagcucugucauuaccucccugggggccaucgugagcuguuacggaaagacaaaaugcacggcuucuaauaagaaccggggcauuaucaagaccuucuccaaugggugugauuauguuagcaacaaaggaguggacacagucuccgugggcaauacccuuuacuauguuaacaagcaagagggcaaaucucuguacgugaagggggaacccaucauuaacuuuuaugacccucucgucuuccccagcgaugaguuugacgccuccaucucucaggugaaugagaaaauuaaccagagccuggcuuucauccgcaaguccgaugaacugcuccacaaugugaacgccggaaagagcacaaccaauauuaugaucacgaccauuaucaucguuauuaucgucauucugcuuucucugaucgccgugggccuccugcuguacugcaaagcuagauccacaccugugacccuuagcaaggaccagcucucugggauuaacaauaucgcguucuccaacugaggacuaguuauaagacugacuagcccgaugggccucccaacgggcccuccuccccuccuugcaccgagauuaauaaaaaaaaaaaaaaaaaaaaaaaaaaaaaaaaaaaaaaaaaaaaaaaaaaaaaaaaaaaaaaaaugcaucccccccccccccccccccccccccccccccaaaggcucuuuucagagccaccagaauu

SEQ ID NO: 4217 - RNA, 1825 nt, Artificial Sequence
  mRNA product Design i-3 comprising derived and/or modified sequence from HRSV(A2)__F_DSCav1_mut0 (opt6)
gggagaaagcuuaccauggaacuacuaauacuaaaagccaaugcaauaacaaccauacuaaccgccguaacauuuuguuucgcaucaggucaaaacauaaccgaagaauuuuaucaaucaacaugcucagcaguaucaaaaggauacuuauccgcucuaagaacaggaugguacacaaguguaauuacaauagagcucucaaacauaaaagaaaacaaaugcaauggaacugacgcaaaaguuaaacuuauaaaacaagaacuagauaaauauaaaaaugcaguaaccgaauuacaacuccuaaugcaauccacaccugcuaccgguuccggaucagccauagcaucuggaguagccguaugcaaaguccuccaccuagaaggagaaguaaauaaaaucaaaucagcacuauuaucuaccaauaaagcaguugucucacuauccaauggcguaucaguacuaacauucaaaguauuagaccuuaaaaacuacauagacaaacaacuauuaccaauucugaacaaacaauccuguucaauaucaaacaucgaaacgguaauagaauuucaacaaaaaaauaacagauuacuugaaauaacaagagaauuuucaguaaaugcaggaguuacaacacccgucuccaccuacaugcucacaaauucagaauuauuaucacuuauaaacgacaugccaauaacuaacgaccaaaaaaaacuaaugucaaacaauguccaaauaguccgacaacaauccuacucaauaaugugcauuauaaaagaagaaguccuagccuacguuguccaacuacccuuauauggaguaauagauaccccaugcuggaaacuucauaccuccccccuaugcacaacaaacacaaaagaaggcucaaacaucugcuuaacacguacagaccgagguugguacugugauaacgcaggauccguaucauuuuucccacaagcagaaacaugcaaaguacaaucaaaccgcguuuuuugugacaccaugaacagcagaacccucccuucagaaguaaaccuaugcaacgucgauauauuuaacccaaaauacgauugcaaaauaaugacaucaaaaaccgaugucucaucuucaguaauaaccucucuaggagcaauagucucauguuacggaaaaacaaaaugcacagcaaguaauaaaaauagaggaauaauaaaaacauucucuaauggcugcgacuacguauccaauaaaggcguugacacaguauccguaggcaacacacucuacuauguuaacaaacaagaaggaaaaaguuuauacguuaaaggagaaccaauuauaaacuuuuacgacccacucguauucccaucugaugaauuugacgcaucaaucucacaaguaaaugaaaaaaucaaucagucccuugccuuuauaagaaaaucagaugaacuuuuacacaacguuaacgccggaaaaucaacaaccaauauaaugaucacaaccauaauaauaguuauaauuguaauuuuauuauccuuaauagccgucggacuacuacuauacugcaaagcaagaucuacacccguaacccuaucaaaagaccaacuaaguggaauaaauaacauugcauucucaaauuaaggacuaguuauaagacugacuagcccgaugggccucccaacgggcccuccuccccuccuugcaccgagauuaauaaaaaaaaaaaaaaaaaaaaaaaaaaaaaaaaaaaaaaaaaaaaaaaaaaaaaaaaaaaaaaaaugcaucccccccccccccccccccccccccccccccaaaggcucuuuucagagccaccagaauu

SEQ ID NO: 4218 - RNA, 1825 nt, Artificial Sequence
  mRNA product Design i-3 comprising derived and/or modified sequence from HRSV(A2)__F_DSCav1_mut0 (opt11)
gggagaaagcuuaccauggaacuccuaauacuaaaggcaaacgcaaucacuacaauucuaaccgccgugacauucugcuucgccuccggacaaaacaucaccgaagaauuuuaccaauccacaugcucggccgucaguaaaggcuaccucucggcucuccgaaccggcugguacaccuccgucaucaccaucgaacucuccaacaucaaagaaaacaaaugcaacggcaccgacgccaaagucaaacuaaucaaacaagaacucgacaaauacaaaaacgccgucacagaacuccaacuacuaaugcaaucaacacccgcuacaggaagcggcuccgccaucgccagcggcguagcugucugcaaaguccuccaccucgaaggugaagucaacaaaaucaaaucagcccuacucagcacaaacaaagccguuguaagccuauccaacggcgucuccguacuaacauucaaaguccuugaccucaagaacuacaucgacaaacaacuucucccaauccuaaacaaacaaagcugcucaauuuccaacaucgaaacaguaaucgaauuucaacaaaaaaacaaccgacuccucgaaaucacccgcgaauuuuccguuaacgccggcguuacaacccccgucuccaccuacaugcucaccaauuccgaacuacuaucacucauaaacgacaugccuaucacaaacgaccaaaaaaaacuaaugucaaacaauguccaaaucguccgccagcaaagcuauuccaucaugugcaucaucaaagaggaaguccucgccuacguaguccaacugccccucuacggcgucauugauacccccugcuggaaacuccacaccuccccccucugcaccacaaacaccaaagaagguuccaacaucugccuaacacgaaccgacagaggcugguacugcgacaacgccggcagcgucuccuucuucccccaagcagaaaccuguaaaguccagucuaaccgcgucuucugcgacacaaugaacucaagaacccuaccuuccgaaguaaaccucugcaacguagacaucuucaacccuaaauacgacugcaaaaucaugacuucaaaaacagacguaagcucuuccguaaucacuucccucggcgccaucguauccugcuacgguaaaaccaaaugcaccgccuccaacaaaaaccgagggaucauaaaaaccuucuccaacggcugcgacuacguaucuaacaaaggcgucgacaccgucuccgucggcaacacccucuauuacguaaacaaacaagagggcaaaucacuauacgucaaaggcgagccaaucauaaacuucuaugacccacucgucuucccuucagacgaauuugaugccagcaucagccaagucaacgaaaaaaucaaccaaucacucgccuucauccgcaaaagcgacgaacuccuucacaacgucaacgcaggcaaaucaaccaccaacaucaugaucaccaccaucaucaucgucaucaucguuauccuacucagccucaucgcaguuggucuucuccuuuacugcaaagcccgcuccacccccgucacccucaguaaagaccaacucagcggaaucaacaacauagcauucuccaacuaaggacuaguuauaagacugacuagcccgaugggccucccaacgggcccuccuccccuccuugcaccgagauuaauaaaaaaaaaaaaaaaaaaaaaaaaaaaaaaaaaaaaaaaaaaaaaaaaaaaaaaaaaaaaaaaaugcaucccccccccccccccccccccccccccccccaaaggcucuuuucagagccaccagaauu

SEQ ID NO: 4219 - protein, 514 aa, Artificial Sequence
  derived and/or modified protein sequence (artificial) from HRSV(A2)__F-del_DSCav1_mut0
MELLILKANAITTILTAVTFCFASGQNITEEFYQSTCSAVSKGYLSALRTGWYTSVITIELSNIKENKCNGTDAKVKLIKQELDKYKNAVTELQLLMQSTPATGSGSAIASGVAVCKVLHLEGEVNKIKSALLSTNKAVVSLSNGVSVLTFKVLDLKNYIDKQLLPILNKQSCSISNIETVIEFQQKNNRLLEITREFSVNAGVTTPVSTYMLTNSELLSLINDMPITNDQKKLMSNNVQIVRQQSYSIMCIIKEEVLAYVVQLPLYGVIDTPCWKLHTSPLCTTNTKEGSNICLTRTDRGWYCDNAGSVSFFPQAETCKVQSNRVFCDTMNSRTLPSEVNLCNVDIFNPKYDCKIMTSKTDVSSSVITSLGAIVSCYGKTKCTASNKNRGIIKTFSNGCDYVSNKGVDTVSVGNTLYYVNKQEGKSLYVKGEPIINFYDPLVFPSDEFDASISQVNEKINQSLAFIRKSDELLHNVNAGKSTTNIMITTIIIVIIVILLSLIAVGLLLYCKAR

SEQ ID NO: 4220 - RNA, 1545 nt, Artificial Sequence
  derived and/or modified CDS sequence (opt1) from HRSV(A2)__F-del_DSCav1_mut0
auggagcugcucauccugaaggccaacgccaucaccaccauccugacggcggugaccuucugcuucgccagcggccagaacaucaccgaggaguucuaccaguccacgugcagcgccgucuccaagggguaccucagcgcccugcggaccggcugguacaccuccgugaucaccaucgagcugagcaacaucaaggagaacaagugcaacgggaccgacgccaaggugaagcucaucaagcaggagcuggacaaguacaagaacgcggucacggagcugcagcuccugaugcaguccaccccggcaaccggcuccggcuccgccaucgcgagcggcgucgccgugugcaaggugcugcaccucgagggggaggucaacaagaucaagagcgcccugcuguccaccaacaaggccguggugagccucuccaacggcgucagcgugcugaccuucaaggugcuggaccucaagaacuacaucgacaagcagcugcugcccauccugaacaagcagagcugcuccaucagcaacaucgagacggugaucgaguuccagcagaagaacaaccggcuccuggagaucacccgcgaguucagcgugaacgccggggucaccacccccguguccacguacaugcugaccaacagcgagcuccugucccugaucaacgacaugccgaucaccaacgaccagaagaagcucaugagcaacaacgugcagaucguccggcagcaguccuacagcaucaugugcaucaucaaggaggaggugcuggcguacgugguccagcugccccucuacggcgugaucgacacccccugcuggaagcugcacacgagcccccugugcaccaccaacaccaaggagggguccaacaucugccucacgcgcaccgaccggggcugguacugcgacaacgccggcagcgucuccuucuucccgcaggccgagaccugcaaggugcagagcaaccgcguguucugcgacaccaugaacucccggacgcugcccagcgagguaaaccucugcaacgucgacaucuucaaccccaaguacgacugcaagaucaugaccuccaagaccgacgugagcuccagcgugaucaccucccugggggccaucgucagcugcuacggcaagacgaagugcaccgccagcaacaagaaccgggggaucaucaagaccuucuccaacggcugcgacuacgugagcaacaagggcguggacaccguguccgucgggaacacccuguacuacgugaacaagcaggagggcaagagccucuacgugaagggggagcccaucaucaacuucuacgacccgcuggucuuccccuccgacgaguucgacgcgagcaucucccaggugaacgagaagaucaaccagagccuggccuucauccgcaaguccgacgagcugcuccacaacgugaacgccggcaagagcacgaccaacaucaugaucaccaccaucaucaucgucaucaucgugauccugcugucccucaucgccguggggcugcugcucuacugcaaggcccgguga

SEQ ID NO: 4221 - RNA, 1545 nt, Artificial Sequence
  derived and/or modified CDS sequence (opt1) from HRSV(A2)__F-del_DSCav1_mut0
auggagcugcucauccugaaggccaacgccaucaccaccauccugacggcggugaccuucugcuucgccagcggccagaacaucaccgaggaguucuaccaguccacgugcagcgccgucuccaagggguaccucagcgcccugcgcaccggcugguacaccuccgugaucaccaucgagcugagcaacaucaaggagaacaagugcaacgggaccgacgccaaggugaagcucaucaagcaggagcuggacaaguacaagaacgcggucacggagcugcagcuccugaugcaguccacccccgccaccggcagcggguccgccaucgccagcggcguggcggugugcaagguccugcaccucgagggcgaggugaacaagaucaaguccgcccugcugagcaccaacaaggccguggucucccucagcaacgggguguccgugcugacguucaagguccuggaccucaagaacuacaucgacaagcagcugcugccgauccucaacaagcagagcugcuccaucagcaacaucgagaccgugaucgaguuccagcagaagaacaaccggcugcuggagaucacccgcgaguucuccgugaacgccggcgucaccacgcccgugagcaccuacaugcucaccaacagcgagcugcugucccucaucaacgacaugcccaucaccaacgaccagaagaagcugaugagcaacaacgugcagaucguccggcagcaguccuacagcaucaugugcaucaucaaggaggaggugcuggccuacgugguccagcucccccuguacggggugaucgacacgccgugcuggaagcugcacaccagcccccucugcaccaccaacacgaaggagggcuccaacaucugccugacccgcaccgaccgggggugguacugcgacaacgcgggcuccgugagcuucuucccccaggccgagaccugcaagguccaguccaaccgcguguucugcgacacgaugaacagccggacccuccccuccgaggucaaccugugcaacguggacaucuucaacccgaaguacgacugcaagaucaugaccagcaagaccgacguguccagcuccgucaucacgagccugggcgccaucguguccugcuacgggaagaccaagugcaccgccagcaacaagaaccggggcaucaucaagaccuucuccaacgggugcgacuacgugagcaacaagggcgucgacacggugagcgugggcaacacccucuacuacgucaacaagcaggaggggaagucccuguacgugaagggcgagcccaucaucaacuucuacgacccccugguguuccccagcgacgaguucgacgccuccaucagccaggucaacgagaagaucaaccagucccucgcguucauccgcaagagcgacgagcugcugcacaacgugaacgccgggaaguccaccaccaacaucaugaucaccacgaucaucaucgugaucaucgucauccuccugagccugaucgccgugggccuccugcuguacugcaaggcccgguga

SEQ ID NO: 4222 - RNA, 1545 nt, Artificial Sequence
  derived and/or modified CDS sequence (opt2) from HRSV(A2)__F-del_DSCav1_mut0
auggagcuccucauccucaaggccaacgccaucaccaccauccucaccgccgucaccuucugcuucgccuccggccagaacaucaccgaggaguucuaccaguccaccugcuccgccgucuccaagggcuaccucuccgcccuccgcaccggcugguacaccuccgucaucaccaucgagcucuccaacaucaaggagaacaagugcaacggcaccgacgccaaggucaagcucaucaagcaggagcucgacaaguacaagaacgccgucaccgagcuccagcuccucaugcaguccacccccgccaccggcuccggcuccgccaucgccuccggcgucgccgucugcaagguccuccaccucgagggcgaggucaacaagaucaaguccgcccuccucuccaccaacaaggccgucgucucccucuccaacggcgucuccguccucaccuucaagguccucgaccucaagaacuacaucgacaagcagcuccuccccauccucaacaagcaguccugcuccaucuccaacaucgagaccgucaucgaguuccagcagaagaacaaccgccuccucgagaucacccgcgaguucuccgucaacgccggcgucaccacccccgucuccaccuacaugcucaccaacuccgagcuccucucccucaucaacgacaugcccaucaccaacgaccagaagaagcucauguccaacaacguccagaucguccgccagcaguccuacuccaucaugugcaucaucaaggaggagguccucgccuacgucguccagcucccccucuacggcgucaucgacacccccugcuggaagcuccacaccuccccccucugcaccaccaacaccaaggagggcuccaacaucugccucacccgcaccgaccgcggcugguacugcgacaacgccggcuccgucuccuucuucccccaggccgagaccugcaagguccaguccaaccgcgucuucugcgacaccaugaacucccgcacccuccccuccgaggucaaccucugcaacgucgacaucuucaaccccaaguacgacugcaagaucaugaccuccaagaccgacgucuccuccuccgucaucaccucccucggcgccaucgucuccugcuacggcaagaccaagugcaccgccuccaacaagaaccgcggcaucaucaagaccuucuccaacggcugcgacuacgucuccaacaagggcgucgacaccgucuccgucggcaacacccucuacuacgucaacaagcaggagggcaagucccucuacgucaagggcgagcccaucaucaacuucuacgacccccucgucuuccccuccgacgaguucgacgccuccaucucccaggucaacgagaagaucaaccagucccucgccuucauccgcaaguccgacgagcuccuccacaacgucaacgccggcaaguccaccaccaacaucaugaucaccaccaucaucaucgucaucaucgucauccuccucucccucaucgccgucggccuccuccucuacugcaaggcccgcuga

SEQ ID NO: 4223 - RNA, 1545 nt, Artificial Sequence
  derived and/or modified CDS sequence (opt3) from HRSV(A2)__F-del_DSCav1_mut0
auggagcugcucauccuuaaggccaacgcuauuaccacaauacugacugcagugacguucugcuuugccagcggccagaauaucaccgaagaguucuaccaauccacauguucugcggucucaaaaggguauuugagugcuuuaagaacuggaugguacaccagcguuauuacaaucgaacuguccaacauuaaggagaauaaaugcaacgguaccgacgccaaggugaaacuaaucaagcaggaacucgauaaguauaaaaaugcaguaacugagcugcagcuucugaugcagucuacacccgccaccggcucggggucagcuauagcaagcggaguggccgucuguaagguguugcaccucgagggcgaaguuaacaaaaucaagagugcucugcuguccacgaauaaagccguggucucucucagcaacgguguguccguauuaacuuuuaagguucuggaccuuaagaauuacauugauaaacaauugcugccuauccuaaacaagcagucaugcaguauuagcaauaucgagaccgugauagaguuccagcagaaaaacaauaggcuccuggaaauuacacgggaguuuucugucaacgcgggggugacuaccccaguguccacauauaugcuuaccaauucagaacuguugagccucaucaacgacaugccgauuacgaacgaucaaaagaaacugaugaguaauaacguccagaucguucgccagcagucuuacuccaucauguguauuauaaaggaggaaguguuagcauauguagugcaacugccccucuacggagucaucgacacuccuugcuggaaacuucauacaagcccacuguguaccacuaauacaaaggagggcucgaacauuugcuugacccgaacggaucguggcugguacugugacaaugccgggucuguguccuucuuuccccaggcugaaaccugcaagguucagucaaacagaguguucugugauacaaugaauaguagaacucugccuagcgaggucaaccucugcaauguggacaucuuuaacccaaaauaugauugcaagauaaugaccuccaaaacagacguaucuagcucaguuauuaccagucugggagccaucguguccuguuacgguaagacuaaaugcacagcaagcaauaagaacaggggcaucauuaagaccuucucuaaugggugugauuaugucucaaacaaaggaguggacacugucagugugggcaauacgcuuuacuauguuaacaagcaagaggguaaaagccuguacgugaagggggaacccaucauuaacuuuuaugacccuuugguauucccauccgaugaguuugacgcuucuauaucgcaggucaaugagaaaaucaaccagagccucgccuucauucggaaguccgaugaacuguuacacaaugugaacgcgggaaagucaacaaccaauaucaugaucacuaccauuauaaucguuauuaucgugauucugcuaagucucaucgccgucggccugcuuuuguacugcaaagcacgcuga

SEQ ID NO: 4224 - RNA, 1545 nt, Artificial Sequence
  derived and/or modified CDS sequence (opt4) from HRSV(A2)__F-del_DSCav1_mut0
auggagcugcugauccugaaggccaacgccaucaccaccauccugaccgccgugaccuucugcuucgccagcggccagaacaucaccgaggaguucuaccagagcaccugcagcgccgugagcaagggcuaccugagcgcccugagaaccggcugguacaccagcgugaucaccaucgagcugagcaacaucaaggagaacaagugcaacggcaccgacgccaaggugaagcugaucaagcaggagcuggacaaguacaagaacgccgugaccgagcugcagcugcugaugcagagcacccccgccaccggcagcggcagcgccaucgccagcggcguggccgugugcaaggugcugcaccuggagggcgaggugaacaagaucaagagcgcccugcugagcaccaacaaggccguggugagccugagcaacggcgugagcgugcugaccuucaaggugcuggaccugaagaacuacaucgacaagcagcugcugcccauccugaacaagcagagcugcagcaucagcaacaucgagaccgugaucgaguuccagcagaagaacaacagacugcuggagaucaccagagaguucagcgugaacgccggcgugaccacccccgugagcaccuacaugcugaccaacagcgagcugcugagccugaucaacgacaugcccaucaccaacgaccagaagaagcugaugagcaacaacgugcagaucgugagacagcagagcuacagcaucaugugcaucaucaaggaggaggugcuggccuacguggugcagcugccccuguacggcgugaucgacacccccugcuggaagcugcacaccagcccccugugcaccaccaacaccaaggagggcagcaacaucugccugaccagaaccgacagaggcugguacugcgacaacgccggcagcgugagcuucuucccccaggccgagaccugcaaggugcagagcaacagaguguucugcgacaccaugaacagcagaacccugcccagcgaggugaaccugugcaacguggacaucuucaaccccaaguacgacugcaagaucaugaccagcaagaccgacgugagcagcagcgugaucaccagccugggcgccaucgugagcugcuacggcaagaccaagugcaccgccagcaacaagaacagaggcaucaucaagaccuucagcaacggcugcgacuacgugagcaacaagggcguggacaccgugagcgugggcaacacccuguacuacgugaacaagcaggagggcaagagccuguacgugaagggcgagcccaucaucaacuucuacgacccccugguguuccccagcgacgaguucgacgccagcaucagccaggugaacgagaagaucaaccagagccuggccuucaucagaaagagcgacgagcugcugcacaacgugaacgccggcaagagcaccaccaacaucaugaucaccaccaucaucaucgugaucaucgugauccugcugagccugaucgccgugggccugcugcuguacugcaaggccagauga

SEQ ID NO: 4225 - RNA, 1545 nt, Artificial Sequence
  derived and/or modified CDS sequence (opt5) from HRSV(A2)__F-del_DSCav1_mut0
auggagcugcucauccugaaggccaacgcuauuaccacaauccuuacggccgugaccuucugcuuugcgagcggccagaauauuacagaagaguucuaccaauccaccuguucugcugucagcaaaggguaucuguccgcccucagaacaggaugguacaccucuguuaucacaauugaacugagcaacaucaaggagaauaaaugcaacggcaccgacgccaaggugaaacuuaucaagcaggaacuggauaaguauaaaaaugcugugacggagcuccagcugcugaugcaguccacccccgccacagggucuggaagcgcuauugccuccggcgucgcgguguguaagguucuccaccuggagggggaagugaacaaaaucaagagcgcccuucugucuaccaauaaagcugucgugucccucagcaacggaguuucugugcugacauuuaagguccuugaccugaagaauuacauugauaaacaacuccugccuauccugaacaagcaguccugcagcauuucuaauaucgagaccgugauugaguuccagcagaaaaacaaucggcuccuggaaaucacgcgcgaguuuuccgugaacgccggcgucacaaccccgguuagcacauauaugcuuaccaauuccgaacugcucucucugaucaacgacaugcccauuaccaacgaucaaaagaaacuuaugagcaauaacgugcagaucgugagacagcaguccuacagcauuauguguaucauuaaggaggaaguccuggcuuaugugguucaacucccucuguacggcgugaucgacacacccugcuggaaacugcauacgucuccucucuguaccacaaauaccaaggagggguccaacaucugccugacacggaccgaucgcggaugguacugugacaaugccggcagcgucucuuucuuuccccaggcggaaacgugcaaggugcagagcaacagaguuuucugugauacaaugaacuccagaacccugccuucugaggugaaucucugcaaugucgacauuuuuaacccgaaauaugauugcaagaucaugaccagcaaaacagacguguccagcucugucauuaccucccugggggccaucgugagcuguuacggaaagacaaaaugcacggcuucuaauaagaaccggggcauuaucaagaccuucuccaaugggugugauuauguuagcaacaaaggaguggacacagucuccgugggcaauacccuuuacuauguuaacaagcaagagggcaaaucucuguacgugaagggggaacccaucauuaacuuuuaugacccucucgucuuccccagcgaugaguuugacgccuccaucucucaggugaaugagaaaauuaaccagagccuggcuuucauccgcaaguccgaugaacugcuccacaaugugaacgccggaaagagcacaaccaauauuaugaucacgaccauuaucaucguuauuaucgucauucugcuuucucugaucgccgugggccuccugcuguacugcaaagcuagauga

SEQ ID NO: 4226 - RNA, 1545 nt, Artificial Sequence
  derived and/or modified CDS sequence (opt6) from HRSV(A2)__F-del_DSCav1_mut0
auggaauuacucauccucaaagcaaacgcaauaacaacaauacuaacagcagucacuuucugcuucgcauccggacaaaauaucacagaagaauuuuaccaauccaccugcucugcugucuccaaaggauaccuaucugcccucagaaccgguugguauacaucugucauaaccauagaacuaucaaacauuaaagaaaacaaauguaacggaacagacgcaaaagucaaacuuauaaaacaagaauuagacaaauacaaaaacgcagucacagaauuacaacuacuaaugcaaucaaccccagcaaccggaucaggauccgcaauagcuucaggaguagcaguauguaaaguucuacacuuagaaggagaagucaacaaaauuaaauccgcacuauuaucaaccaacaaagcagucguaucuuuaucaaacggaguaucuguacuuacauucaaaguacuagaccuaaaaaauuacauugauaaacaauuacuaccaauacuaaacaaacaaucauguuccaucucuaacauagaaacaguaauagaauuucaacaaaaaaauaacagauuacuugaaaucacccgagaauuuucaguaaacgcaggaguaaccacacccguaucuacauacaugcuaacaaacucugaacuucugagccuaauaaaugacaugccaauaaccaacgaccaaaaaaaacuaauguccaacaacguacaaauaguacgacaacaaucuuacucaaucaugugcauaaucaaagaagaaguacuagcuuauguaguccaacuuccacucuacggaguaauagacacccccugcuggaaacuacacacaucaccacuaugcacaacaaacacaaaagaaggcucaaacauaugccuaacaagaacugacagaggaugguauugugacaaugcaggcucugucucauucuuuccacaagccgaaacaugcaaaguucaaucaaaccgaguuuucugugacacaaugaacucuagaacucucccaucagaagucaacuuaugcaacguugacauauucaacccaaaauaugacuguaaaauaaugacuuccaaaacugauguaucauccuccgucauaacaucccuaggagcuauuguaucauguuacgggaaaaccaaaugcacagccucaaacaaaaaccgcgguaucauaaaaacauuuucaaacggaugugauuacguaagcaauaaaggaguagacaccguaucaguaggaaauacacuauacuauguaaauaaacaagaaggaaaaucacuauaugucaaaggagaaccaaucauaaauuucuaugacccacuuguauucccauccgaugaauuugacgcaagcauuucacaggucaacgaaaaaauaaaccaaucacuagccuucaucagaaaaucagacgaacuacuacauaacguaaacgccggaaaaucaacaaccaacauaaugauaacaacaaucauaauaguuaucauaguaauacuacuaucucuaauagcugucggacucuuacuauauugcaaagcccgauaa

SEQ ID NO: 4227 - RNA, 1545 nt, Artificial Sequence
  derived and/or modified CDS sequence (opt11) from HRSV(A2)__F-del_DSCav1_mut0
auggaacuacuaauccugaaagccaacgccauaaccacaauccuuaccgcagucaccuucugcuucgccuccggucaaaacaucacagaagaguucuaccaauccaccuguuccgcagucagcaaaggcuaccucuccgcacuccgaaccggaugguacaccagcgucaucaccaucgaacuauccaacauaaaggaaaauaagugcaaugguacagaugccaaggucaaacucauaaagcaagaacucgacaaauacaaaaacgccgucaccgaacuacaacuacuaaugcaaucuacccccgcaacaggcucagguuccgccauagccuccggcgucgccguuugcaaaguccuccaccucgaaggcgaaguaaacaaaaucaaauccgcccuacucucaaccaacaaagcagucgucucccucucaaacggagucucgguccucaccuucaaaguccucgaccucaaaaacuauauagacaaacaacuccuacccauacucaacaaacaguccugcagcauauccaacaucgaaaccgugaucgaguuccaacagaaaaacaacagacuccucgaaaucacucgagaguucuccguaaacgccggcgucacaaccccagucucaacauacaugcucaccaacagcgaacuccuaucacuaaucaacgacaugccuaucacaaaugaucagaagaaacuaaugagcaacaacguccaaaucguccgccaacaaucauacuccaucaugugcaucauaaaagaagaaguccuagccuacgugguccagcuaccccucuacggcguaauugacaccccuugcuggaaacuacacacuucaccccucugcacaaccaacaccaaagaagguucaaacaucugccucacacgaacagaccgcggcugguacugcgacaacgccggauccguauccuucuucccccaagcagaaaccugcaaaguucaauccaaccggguauucugcgacaccaugaacucaagaacccuucccuccgaaguaaaucuaugcaacgucgacauauucaacccaaaauacgacugcaaaaucaugaccuccaaaaccgaugucuccagcagcgucaucaccagccucggcgccaucgucuccugcuacggcaaaacaaaauguacagcauccaacaaaaaccgaggcauaaucaaaaccuucuccaacgggugcgauuacgucagcaacaaaggcgucgacaccgucuccgugggcaacacccuauacuacgucaacaaacaagaaggcaaaucacuguacguaaagggcgaacccaucaucaacuucuaugacccucugguguucccauccgaugaauuugacgcauccauaucucaggucaacgaaaagaucaaccaaucccucgccuucauacgcaaauccgacgaacuccuacacaacgucaacgcugguaaaagcaccaccaacaucaugaucaccacaaucaucaucgucauaaucguuauccuacucucccuuauagcagucggacuccuccucuacugcaaagcccgcuaa

SEQ ID NO: 4228 - RNA, 1821 nt, Artificial Sequence
  mRNA product Design a-1 comprising derived and/or modified sequence from HRSV(A2)__F-del_DSCav1_mut0 (opt1)
gggagagucccgcagucggcguccagcggcucugcuuguucgugugugugucguugcaggccuuauucaagcuuaccauggagcugcucauccugaaggccaacgccaucaccaccauccugacggcggugaccuucugcuucgccagcggccagaacaucaccgaggaguucuaccaguccacgugcagcgccgucuccaagggguaccucagcgcccugcggaccggcugguacaccuccgugaucaccaucgagcugagcaacaucaaggagaacaagugcaacgggaccgacgccaaggugaagcucaucaagcaggagcuggacaaguacaagaacgcggucacggagcugcagcuccugaugcaguccaccccggcaaccggcuccggcuccgccaucgcgagcggcgucgccgugugcaaggugcugcaccucgagggggaggucaacaagaucaagagcgcccugcuguccaccaacaaggccguggugagccucuccaacggcgucagcgugcugaccuucaaggugcuggaccucaagaacuacaucgacaagcagcugcugcccauccugaacaagcagagcugcuccaucagcaacaucgagacggugaucgaguuccagcagaagaacaaccggcuccuggagaucacccgcgaguucagcgugaacgccggggucaccacccccguguccacguacaugcugaccaacagcgagcuccugucccugaucaacgacaugccgaucaccaacgaccagaagaagcucaugagcaacaacgugcagaucguccggcagcaguccuacagcaucaugugcaucaucaaggaggaggugcuggcguacgugguccagcugccccucuacggcgugaucgacacccccugcuggaagcugcacacgagcccccugugcaccaccaacaccaaggagggguccaacaucugccucacgcgcaccgaccggggcugguacugcgacaacgccggcagcgucuccuucuucccgcaggccgagaccugcaaggugcagagcaaccgcguguucugcgacaccaugaacucccggacgcugcccagcgagguaaaccucugcaacgucgacaucuucaaccccaaguacgacugcaagaucaugaccuccaagaccgacgugagcuccagcgugaucaccucccugggggccaucgucagcugcuacggcaagacgaagugcaccgccagcaacaagaaccgggggaucaucaagaccuucuccaacggcugcgacuacgugagcaacaagggcguggacaccguguccgucgggaacacccuguacuacgugaacaagcaggagggcaagagccucuacgugaagggggagcccaucaucaacuucuacgacccgcuggucuuccccuccgacgaguucgacgcgagcaucucccaggugaacgagaagaucaaccagagccuggccuucauccgcaaguccgacgagcugcuccacaacgugaacgccggcaagagcacgaccaacaucaugaucaccaccaucaucaucgucaucaucgugauccugcugucccucaucgccguggggcugcugcucuacugcaaggcccggugaggacuagucccuguucccagagcccacuuuuuuuucuuuuuuugaaauaaaauagccugucuuucagaucuaaaaaaaaaaaaaaaaaaaaaaaaaaaaaaaaaaaaaaaaaaaaaaaaaaaaaaaaaaaaaaaaugcaucccccccccccccccccccccccccccccccaaaggcucuuuucagagccaccagaauu

SEQ ID NO: 4229 - RNA, 1821 nt, Artificial Sequence
  mRNA product Design a-1 comprising derived and/or modified sequence from HRSV(A2)__F-del_DSCav1_mut0 (opt1)
gggagagucccgcagucggcguccagcggcucugcuuguucgugugugugucguugcaggccuuauucaagcuuaccauggagcugcucauccugaaggccaacgccaucaccaccauccugacggcggugaccuucugcuucgccagcggccagaacaucaccgaggaguucuaccaguccacgugcagcgccgucuccaagggguaccucagcgcccugcgcaccggcugguacaccuccgugaucaccaucgagcugagcaacaucaaggagaacaagugcaacgggaccgacgccaaggugaagcucaucaagcaggagcuggacaaguacaagaacgcggucacggagcugcagcuccugaugcaguccacccccgccaccggcagcggguccgccaucgccagcggcguggcggugugcaagguccugcaccucgagggcgaggugaacaagaucaaguccgcccugcugagcaccaacaaggccguggucucccucagcaacgggguguccgugcugacguucaagguccuggaccucaagaacuacaucgacaagcagcugcugccgauccucaacaagcagagcugcuccaucagcaacaucgagaccgugaucgaguuccagcagaagaacaaccggcugcuggagaucacccgcgaguucuccgugaacgccggcgucaccacgcccgugagcaccuacaugcucaccaacagcgagcugcugucccucaucaacgacaugcccaucaccaacgaccagaagaagcugaugagcaacaacgugcagaucguccggcagcaguccuacagcaucaugugcaucaucaaggaggaggugcuggccuacgugguccagcucccccuguacggggugaucgacacgccgugcuggaagcugcacaccagcccccucugcaccaccaacacgaaggagggcuccaacaucugccugacccgcaccgaccgggggugguacugcgacaacgcgggcuccgugagcuucuucccccaggccgagaccugcaagguccaguccaaccgcguguucugcgacacgaugaacagccggacccuccccuccgaggucaaccugugcaacguggacaucuucaacccgaaguacgacugcaagaucaugaccagcaagaccgacguguccagcuccgucaucacgagccugggcgccaucguguccugcuacgggaagaccaagugcaccgccagcaacaagaaccggggcaucaucaagaccuucuccaacgggugcgacuacgugagcaacaagggcgucgacacggugagcgugggcaacacccucuacuacgucaacaagcaggaggggaagucccuguacgugaagggcgagcccaucaucaacuucuacgacccccugguguuccccagcgacgaguucgacgccuccaucagccaggucaacgagaagaucaaccagucccucgcguucauccgcaagagcgacgagcugcugcacaacgugaacgccgggaaguccaccaccaacaucaugaucaccacgaucaucaucgugaucaucgucauccuccugagccugaucgccgugggccuccugcuguacugcaaggcccggugaggacuagucccuguucccagagcccacuuuuuuuucuuuuuuugaaauaaaauagccugucuuucagaucuaaaaaaaaaaaaaaaaaaaaaaaaaaaaaaaaaaaaaaaaaaaaaaaaaaaaaaaaaaaaaaaaugcaucccccccccccccccccccccccccccccccaaaggcucuuuucagagccaccagaauu

SEQ ID NO: 4230 - RNA, 1821 nt, Artificial Sequence
  mRNA product Design a-1 comprising derived and/or modified sequence from HRSV(A2)__F-del_DSCav1_mut0 (opt2)
gggagagucccgcagucggcguccagcggcucugcuuguucgugugugugucguugcaggccuuauucaagcuuaccauggagcuccucauccucaaggccaacgccaucaccaccauccucaccgccgucaccuucugcuucgccuccggccagaacaucaccgaggaguucuaccaguccaccugcuccgccgucuccaagggcuaccucuccgcccuccgcaccggcugguacaccuccgucaucaccaucgagcucuccaacaucaaggagaacaagugcaacggcaccgacgccaaggucaagcucaucaagcaggagcucgacaaguacaagaacgccgucaccgagcuccagcuccucaugcaguccacccccgccaccggcuccggcuccgccaucgccuccggcgucgccgucugcaagguccuccaccucgagggcgaggucaacaagaucaaguccgcccuccucuccaccaacaaggccgucgucucccucuccaacggcgucuccguccucaccuucaagguccucgaccucaagaacuacaucgacaagcagcuccuccccauccucaacaagcaguccugcuccaucuccaacaucgagaccgucaucgaguuccagcagaagaacaaccgccuccucgagaucacccgcgaguucuccgucaacgccggcgucaccacccccgucuccaccuacaugcucaccaacuccgagcuccucucccucaucaacgacaugcccaucaccaacgaccagaagaagcucauguccaacaacguccagaucguccgccagcaguccuacuccaucaugugcaucaucaaggaggagguccucgccuacgucguccagcucccccucuacggcgucaucgacacccccugcuggaagcuccacaccuccccccucugcaccaccaacaccaaggagggcuccaacaucugccucacccgcaccgaccgcggcugguacugcgacaacgccggcuccgucuccuucuucccccaggccgagaccugcaagguccaguccaaccgcgucuucugcgacaccaugaacucccgcacccuccccuccgaggucaaccucugcaacgucgacaucuucaaccccaaguacgacugcaagaucaugaccuccaagaccgacgucuccuccuccgucaucaccucccucggcgccaucgucuccugcuacggcaagaccaagugcaccgccuccaacaagaaccgcggcaucaucaagaccuucuccaacggcugcgacuacgucuccaacaagggcgucgacaccgucuccgucggcaacacccucuacuacgucaacaagcaggagggcaagucccucuacgucaagggcgagcccaucaucaacuucuacgacccccucgucuuccccuccgacgaguucgacgccuccaucucccaggucaacgagaagaucaaccagucccucgccuucauccgcaaguccgacgagcuccuccacaacgucaacgccggcaaguccaccaccaacaucaugaucaccaccaucaucaucgucaucaucgucauccuccucucccucaucgccgucggccuccuccucuacugcaaggcccgcugaggacuagucccuguucccagagcccacuuuuuuuucuuuuuuugaaauaaaauagccugucuuucagaucuaaaaaaaaaaaaaaaaaaaaaaaaaaaaaaaaaaaaaaaaaaaaaaaaaaaaaaaaaaaaaaaaugcaucccccccccccccccccccccccccccccccaaaggcucuuuucagagccaccagaauu

SEQ ID NO: 4231 - RNA, 1821 nt, Artificial Sequence
  mRNA product Design a-1 comprising derived and/or modified sequence from HRSV(A2)__F-del_DSCav1_mut0 (opt3)
gggagagucccgcagucggcguccagcggcucugcuuguucgugugugugucguugcaggccuuauucaagcuuaccauggagcugcucauccuuaaggccaacgcuauuaccacaauacugacugcagugacguucugcuuugccagcggccagaauaucaccgaagaguucuaccaauccacauguucugcggucucaaaaggguauuugagugcuuuaagaacuggaugguacaccagcguuauuacaaucgaacuguccaacauuaaggagaauaaaugcaacgguaccgacgccaaggugaaacuaaucaagcaggaacucgauaaguauaaaaaugcaguaacugagcugcagcuucugaugcagucuacacccgccaccggcucggggucagcuauagcaagcggaguggccgucuguaagguguugcaccucgagggcgaaguuaacaaaaucaagagugcucugcuguccacgaauaaagccguggucucucucagcaacgguguguccguauuaacuuuuaagguucuggaccuuaagaauuacauugauaaacaauugcugccuauccuaaacaagcagucaugcaguauuagcaauaucgagaccgugauagaguuccagcagaaaaacaauaggcuccuggaaauuacacgggaguuuucugucaacgcgggggugacuaccccaguguccacauauaugcuuaccaauucagaacuguugagccucaucaacgacaugccgauuacgaacgaucaaaagaaacugaugaguaauaacguccagaucguucgccagcagucuuacuccaucauguguauuauaaaggaggaaguguuagcauauguagugcaacugccccucuacggagucaucgacacuccuugcuggaaacuucauacaagcccacuguguaccacuaauacaaaggagggcucgaacauuugcuugacccgaacggaucguggcugguacugugacaaugccgggucuguguccuucuuuccccaggcugaaaccugcaagguucagucaaacagaguguucugugauacaaugaauaguagaacucugccuagcgaggucaaccucugcaauguggacaucuuuaacccaaaauaugauugcaagauaaugaccuccaaaacagacguaucuagcucaguuauuaccagucugggagccaucguguccuguuacgguaagacuaaaugcacagcaagcaauaagaacaggggcaucauuaagaccuucucuaaugggugugauuaugucucaaacaaaggaguggacacugucagugugggcaauacgcuuuacuauguuaacaagcaagaggguaaaagccuguacgugaagggggaacccaucauuaacuuuuaugacccuuugguauucccauccgaugaguuugacgcuucuauaucgcaggucaaugagaaaaucaaccagagccucgccuucauucggaaguccgaugaacuguuacacaaugugaacgcgggaaagucaacaaccaauaucaugaucacuaccauuauaaucguuauuaucgugauucugcuaagucucaucgccgucggccugcuuuuguacugcaaagcacgcugaggacuagucccuguucccagagcccacuuuuuuuucuuuuuuugaaauaaaauagccugucuuucagaucuaaaaaaaaaaaaaaaaaaaaaaaaaaaaaaaaaaaaaaaaaaaaaaaaaaaaaaaaaaaaaaaaugcaucccccccccccccccccccccccccccccccaaaggcucuuuucagagccaccagaauu

SEQ ID NO: 4232 - RNA, 1821 nt, Artificial Sequence
  mRNA product Design a-1 comprising derived and/or modified sequence from HRSV(A2)__F-del_DSCav1_mut0 (opt4)
gggagagucccgcagucggcguccagcggcucugcuuguucgugugugugucguugcaggccuuauucaagcuuaccauggagcugcugauccugaaggccaacgccaucaccaccauccugaccgccgugaccuucugcuucgccagcggccagaacaucaccgaggaguucuaccagagcaccugcagcgccgugagcaagggcuaccugagcgcccugagaaccggcugguacaccagcgugaucaccaucgagcugagcaacaucaaggagaacaagugcaacggcaccgacgccaaggugaagcugaucaagcaggagcuggacaaguacaagaacgccgugaccgagcugcagcugcugaugcagagcacccccgccaccggcagcggcagcgccaucgccagcggcguggccgugugcaaggugcugcaccuggagggcgaggugaacaagaucaagagcgcccugcugagcaccaacaaggccguggugagccugagcaacggcgugagcgugcugaccuucaaggugcuggaccugaagaacuacaucgacaagcagcugcugcccauccugaacaagcagagcugcagcaucagcaacaucgagaccgugaucgaguuccagcagaagaacaacagacugcuggagaucaccagagaguucagcgugaacgccggcgugaccacccccgugagcaccuacaugcugaccaacagcgagcugcugagccugaucaacgacaugcccaucaccaacgaccagaagaagcugaugagcaacaacgugcagaucgugagacagcagagcuacagcaucaugugcaucaucaaggaggaggugcuggccuacguggugcagcugccccuguacggcgugaucgacacccccugcuggaagcugcacaccagcccccugugcaccaccaacaccaaggagggcagcaacaucugccugaccagaaccgacagaggcugguacugcgacaacgccggcagcgugagcuucuucccccaggccgagaccugcaaggugcagagcaacagaguguucugcgacaccaugaacagcagaacccugcccagcgaggugaaccugugcaacguggacaucuucaaccccaaguacgacugcaagaucaugaccagcaagaccgacgugagcagcagcgugaucaccagccugggcgccaucgugagcugcuacggcaagaccaagugcaccgccagcaacaagaacagaggcaucaucaagaccuucagcaacggcugcgacuacgugagcaacaagggcguggacaccgugagcgugggcaacacccuguacuacgugaacaagcaggagggcaagagccuguacgugaagggcgagcccaucaucaacuucuacgacccccugguguuccccagcgacgaguucgacgccagcaucagccaggugaacgagaagaucaaccagagccuggccuucaucagaaagagcgacgagcugcugcacaacgugaacgccggcaagagcaccaccaacaucaugaucaccaccaucaucaucgugaucaucgugauccugcugagccugaucgccgugggccugcugcuguacugcaaggccagaugaggacuagucccuguucccagagcccacuuuuuuuucuuuuuuugaaauaaaauagccugucuuucagaucuaaaaaaaaaaaaaaaaaaaaaaaaaaaaaaaaaaaaaaaaaaaaaaaaaaaaaaaaaaaaaaaaugcaucccccccccccccccccccccccccccccccaaaggcucuuuucagagccaccagaauu

SEQ ID NO: 4233 - RNA, 1821 nt, Artificial Sequence
  mRNA product Design a-1 comprising derived and/or modified sequence from HRSV(A2)__F-del_DSCav1_mut0 (opt5)
gggagagucccgcagucggcguccagcggcucugcuuguucgugugugugucguugcaggccuuauucaagcuuaccauggagcugcucauccugaaggccaacgcuauuaccacaauccuuacggccgugaccuucugcuuugcgagcggccagaauauuacagaagaguucuaccaauccaccuguucugcugucagcaaaggguaucuguccgcccucagaacaggaugguacaccucuguuaucacaauugaacugagcaacaucaaggagaauaaaugcaacggcaccgacgccaaggugaaacuuaucaagcaggaacuggauaaguauaaaaaugcugugacggagcuccagcugcugaugcaguccacccccgccacagggucuggaagcgcuauugccuccggcgucgcgguguguaagguucuccaccuggagggggaagugaacaaaaucaagagcgcccuucugucuaccaauaaagcugucgugucccucagcaacggaguuucugugcugacauuuaagguccuugaccugaagaauuacauugauaaacaacuccugccuauccugaacaagcaguccugcagcauuucuaauaucgagaccgugauugaguuccagcagaaaaacaaucggcuccuggaaaucacgcgcgaguuuuccgugaacgccggcgucacaaccccgguuagcacauauaugcuuaccaauuccgaacugcucucucugaucaacgacaugcccauuaccaacgaucaaaagaaacuuaugagcaauaacgugcagaucgugagacagcaguccuacagcauuauguguaucauuaaggaggaaguccuggcuuaugugguucaacucccucuguacggcgugaucgacacacccugcuggaaacugcauacgucuccucucuguaccacaaauaccaaggagggguccaacaucugccugacacggaccgaucgcggaugguacugugacaaugccggcagcgucucuuucuuuccccaggcggaaacgugcaaggugcagagcaacagaguuuucugugauacaaugaacuccagaacccugccuucugaggugaaucucugcaaugucgacauuuuuaacccgaaauaugauugcaagaucaugaccagcaaaacagacguguccagcucugucauuaccucccugggggccaucgugagcuguuacggaaagacaaaaugcacggcuucuaauaagaaccggggcauuaucaagaccuucuccaaugggugugauuauguuagcaacaaaggaguggacacagucuccgugggcaauacccuuuacuauguuaacaagcaagagggcaaaucucuguacgugaagggggaacccaucauuaacuuuuaugacccucucgucuuccccagcgaugaguuugacgccuccaucucucaggugaaugagaaaauuaaccagagccuggcuuucauccgcaaguccgaugaacugcuccacaaugugaacgccggaaagagcacaaccaauauuaugaucacgaccauuaucaucguuauuaucgucauucugcuuucucugaucgccgugggccuccugcuguacugcaaagcuagaugaggacuagucccuguucccagagcccacuuuuuuuucuuuuuuugaaauaaaauagccugucuuucagaucuaaaaaaaaaaaaaaaaaaaaaaaaaaaaaaaaaaaaaaaaaaaaaaaaaaaaaaaaaaaaaaaaugcaucccccccccccccccccccccccccccccccaaaggcucuuuucagagccaccagaauu

SEQ ID NO: 4234 - RNA, 1821 nt, Artificial Sequence
  mRNA product Design a-1 comprising derived and/or modified sequence from HRSV(A2)__F-del_DSCav1_mut0 (opt6)
gggagagucccgcagucggcguccagcggcucugcuuguucgugugugugucguugcaggccuuauucaagcuuaccauggaauuacucauccucaaagcaaacgcaauaacaacaauacuaacagcagucacuuucugcuucgcauccggacaaaauaucacagaagaauuuuaccaauccaccugcucugcugucuccaaaggauaccuaucugcccucagaaccgguugguauacaucugucauaaccauagaacuaucaaacauuaaagaaaacaaauguaacggaacagacgcaaaagucaaacuuauaaaacaagaauuagacaaauacaaaaacgcagucacagaauuacaacuacuaaugcaaucaaccccagcaaccggaucaggauccgcaauagcuucaggaguagcaguauguaaaguucuacacuuagaaggagaagucaacaaaauuaaauccgcacuauuaucaaccaacaaagcagucguaucuuuaucaaacggaguaucuguacuuacauucaaaguacuagaccuaaaaaauuacauugauaaacaauuacuaccaauacuaaacaaacaaucauguuccaucucuaacauagaaacaguaauagaauuucaacaaaaaaauaacagauuacuugaaaucacccgagaauuuucaguaaacgcaggaguaaccacacccguaucuacauacaugcuaacaaacucugaacuucugagccuaauaaaugacaugccaauaaccaacgaccaaaaaaaacuaauguccaacaacguacaaauaguacgacaacaaucuuacucaaucaugugcauaaucaaagaagaaguacuagcuuauguaguccaacuuccacucuacggaguaauagacacccccugcuggaaacuacacacaucaccacuaugcacaacaaacacaaaagaaggcucaaacauaugccuaacaagaacugacagaggaugguauugugacaaugcaggcucugucucauucuuuccacaagccgaaacaugcaaaguucaaucaaaccgaguuuucugugacacaaugaacucuagaacucucccaucagaagucaacuuaugcaacguugacauauucaacccaaaauaugacuguaaaauaaugacuuccaaaacugauguaucauccuccgucauaacaucccuaggagcuauuguaucauguuacgggaaaaccaaaugcacagccucaaacaaaaaccgcgguaucauaaaaacauuuucaaacggaugugauuacguaagcaauaaaggaguagacaccguaucaguaggaaauacacuauacuauguaaauaaacaagaaggaaaaucacuauaugucaaaggagaaccaaucauaaauuucuaugacccacuuguauucccauccgaugaauuugacgcaagcauuucacaggucaacgaaaaaauaaaccaaucacuagccuucaucagaaaaucagacgaacuacuacauaacguaaacgccggaaaaucaacaaccaacauaaugauaacaacaaucauaauaguuaucauaguaauacuacuaucucuaauagcugucggacucuuacuauauugcaaagcccgauaaggacuagucccuguucccagagcccacuuuuuuuucuuuuuuugaaauaaaauagccugucuuucagaucuaaaaaaaaaaaaaaaaaaaaaaaaaaaaaaaaaaaaaaaaaaaaaaaaaaaaaaaaaaaaaaaaugcaucccccccccccccccccccccccccccccccaaaggcucuuuucagagccaccagaauu

SEQ ID NO: 4235 - RNA, 1821 nt, Artificial Sequence
  mRNA product Design a-1 comprising derived and/or modified sequence from HRSV(A2)__F-del_DSCav1_mut0 (opt11)
gggagagucccgcagucggcguccagcggcucugcuuguucgugugugugucguugcaggccuuauucaagcuuaccauggaacuacuaauccugaaagccaacgccauaaccacaauccuuaccgcagucaccuucugcuucgccuccggucaaaacaucacagaagaguucuaccaauccaccuguuccgcagucagcaaaggcuaccucuccgcacuccgaaccggaugguacaccagcgucaucaccaucgaacuauccaacauaaaggaaaauaagugcaaugguacagaugccaaggucaaacucauaaagcaagaacucgacaaauacaaaaacgccgucaccgaacuacaacuacuaaugcaaucuacccccgcaacaggcucagguuccgccauagccuccggcgucgccguuugcaaaguccuccaccucgaaggcgaaguaaacaaaaucaaauccgcccuacucucaaccaacaaagcagucgucucccucucaaacggagucucgguccucaccuucaaaguccucgaccucaaaaacuauauagacaaacaacuccuacccauacucaacaaacaguccugcagcauauccaacaucgaaaccgugaucgaguuccaacagaaaaacaacagacuccucgaaaucacucgagaguucuccguaaacgccggcgucacaaccccagucucaacauacaugcucaccaacagcgaacuccuaucacuaaucaacgacaugccuaucacaaaugaucagaagaaacuaaugagcaacaacguccaaaucguccgccaacaaucauacuccaucaugugcaucauaaaagaagaaguccuagccuacgugguccagcuaccccucuacggcguaauugacaccccuugcuggaaacuacacacuucaccccucugcacaaccaacaccaaagaagguucaaacaucugccucacacgaacagaccgcggcugguacugcgacaacgccggauccguauccuucuucccccaagcagaaaccugcaaaguucaauccaaccggguauucugcgacaccaugaacucaagaacccuucccuccgaaguaaaucuaugcaacgucgacauauucaacccaaaauacgacugcaaaaucaugaccuccaaaaccgaugucuccagcagcgucaucaccagccucggcgccaucgucuccugcuacggcaaaacaaaauguacagcauccaacaaaaaccgaggcauaaucaaaaccuucuccaacgggugcgauuacgucagcaacaaaggcgucgacaccgucuccgugggcaacacccuauacuacgucaacaaacaagaaggcaaaucacuguacguaaagggcgaacccaucaucaacuucuaugacccucugguguucccauccgaugaauuugacgcauccauaucucaggucaacgaaaagaucaaccaaucccucgccuucauacgcaaauccgacgaacuccuacacaacgucaacgcugguaaaagcaccaccaacaucaugaucaccacaaucaucaucgucauaaucguuauccuacucucccuuauagcagucggacuccuccucuacugcaaagcccgcuaaggacuagucccuguucccagagcccacuuuuuuuucuuuuuuugaaauaaaauagccugucuuucagaucuaaaaaaaaaaaaaaaaaaaaaaaaaaaaaaaaaaaaaaaaaaaaaaaaaaaaaaaaaaaaaaaaugcaucccccccccccccccccccccccccccccccaaaggcucuuuucagagccaccagaauu

SEQ ID NO: 4236 - RNA, 1840 nt, Artificial Sequence
  mRNA product Design a-2 comprising derived and/or modified sequence from HRSV(A2)__F-del_DSCav1_mut0 (opt1)
gggagaguccgcucagccagguugcagaagcggcuuagcguguguccuaaucuucucucugcguguagguaggccugugccgcaaacaagcuuaccauggagcugcucauccugaaggccaacgccaucaccaccauccugacggcggugaccuucugcuucgccagcggccagaacaucaccgaggaguucuaccaguccacgugcagcgccgucuccaagggguaccucagcgcccugcggaccggcugguacaccuccgugaucaccaucgagcugagcaacaucaaggagaacaagugcaacgggaccgacgccaaggugaagcucaucaagcaggagcuggacaaguacaagaacgcggucacggagcugcagcuccugaugcaguccaccccggcaaccggcuccggcuccgccaucgcgagcggcgucgccgugugcaaggugcugcaccucgagggggaggucaacaagaucaagagcgcccugcuguccaccaacaaggccguggugagccucuccaacggcgucagcgugcugaccuucaaggugcuggaccucaagaacuacaucgacaagcagcugcugcccauccugaacaagcagagcugcuccaucagcaacaucgagacggugaucgaguuccagcagaagaacaaccggcuccuggagaucacccgcgaguucagcgugaacgccggggucaccacccccguguccacguacaugcugaccaacagcgagcuccugucccugaucaacgacaugccgaucaccaacgaccagaagaagcucaugagcaacaacgugcagaucguccggcagcaguccuacagcaucaugugcaucaucaaggaggaggugcuggcguacgugguccagcugccccucuacggcgugaucgacacccccugcuggaagcugcacacgagcccccugugcaccaccaacaccaaggagggguccaacaucugccucacgcgcaccgaccggggcugguacugcgacaacgccggcagcgucuccuucuucccgcaggccgagaccugcaaggugcagagcaaccgcguguucugcgacaccaugaacucccggacgcugcccagcgagguaaaccucugcaacgucgacaucuucaaccccaaguacgacugcaagaucaugaccuccaagaccgacgugagcuccagcgugaucaccucccugggggccaucgucagcugcuacggcaagacgaagugcaccgccagcaacaagaaccgggggaucaucaagaccuucuccaacggcugcgacuacgugagcaacaagggcguggacaccguguccgucgggaacacccuguacuacgugaacaagcaggagggcaagagccucuacgugaagggggagcccaucaucaacuucuacgacccgcuggucuuccccuccgacgaguucgacgcgagcaucucccaggugaacgagaagaucaaccagagccuggccuucauccgcaaguccgacgagcugcuccacaacgugaacgccggcaagagcacgaccaacaucaugaucaccaccaucaucaucgucaucaucgugauccugcugucccucaucgccguggggcugcugcucuacugcaaggcccggugaggacuagucccuguucccagagcccacuuuuuuuucuuuuuuugaaauaaaauagccugucuuucagaucuaaaaaaaaaaaaaaaaaaaaaaaaaaaaaaaaaaaaaaaaaaaaaaaaaaaaaaaaaaaaaaaaugcaucccccccccccccccccccccccccccccccaaaggcucuuuucagagccaccagaauu

SEQ ID NO: 4237 - RNA, 1840 nt, Artificial Sequence
  mRNA product Design a-2 comprising derived and/or modified sequence from HRSV(A2)__F-del_DSCav1_mut0 (opt1)
gggagaguccgcucagccagguugcagaagcggcuuagcguguguccuaaucuucucucugcguguagguaggccugugccgcaaacaagcuuaccauggagcugcucauccugaaggccaacgccaucaccaccauccugacggcggugaccuucugcuucgccagcggccagaacaucaccgaggaguucuaccaguccacgugcagcgccgucuccaagggguaccucagcgcccugcgcaccggcugguacaccuccgugaucaccaucgagcugagcaacaucaaggagaacaagugcaacgggaccgacgccaaggugaagcucaucaagcaggagcuggacaaguacaagaacgcggucacggagcugcagcuccugaugcaguccacccccgccaccggcagcggguccgccaucgccagcggcguggcggugugcaagguccugcaccucgagggcgaggugaacaagaucaaguccgcccugcugagcaccaacaaggccguggucucccucagcaacgggguguccgugcugacguucaagguccuggaccucaagaacuacaucgacaagcagcugcugccgauccucaacaagcagagcugcuccaucagcaacaucgagaccgugaucgaguuccagcagaagaacaaccggcugcuggagaucacccgcgaguucuccgugaacgccggcgucaccacgcccgugagcaccuacaugcucaccaacagcgagcugcugucccucaucaacgacaugcccaucaccaacgaccagaagaagcugaugagcaacaacgugcagaucguccggcagcaguccuacagcaucaugugcaucaucaaggaggaggugcuggccuacgugguccagcucccccuguacggggugaucgacacgccgugcuggaagcugcacaccagcccccucugcaccaccaacacgaaggagggcuccaacaucugccugacccgcaccgaccgggggugguacugcgacaacgcgggcuccgugagcuucuucccccaggccgagaccugcaagguccaguccaaccgcguguucugcgacacgaugaacagccggacccuccccuccgaggucaaccugugcaacguggacaucuucaacccgaaguacgacugcaagaucaugaccagcaagaccgacguguccagcuccgucaucacgagccugggcgccaucguguccugcuacgggaagaccaagugcaccgccagcaacaagaaccggggcaucaucaagaccuucuccaacgggugcgacuacgugagcaacaagggcgucgacacggugagcgugggcaacacccucuacuacgucaacaagcaggaggggaagucccuguacgugaagggcgagcccaucaucaacuucuacgacccccugguguuccccagcgacgaguucgacgccuccaucagccaggucaacgagaagaucaaccagucccucgcguucauccgcaagagcgacgagcugcugcacaacgugaacgccgggaaguccaccaccaacaucaugaucaccacgaucaucaucgugaucaucgucauccuccugagccugaucgccgugggccuccugcuguacugcaaggcccggugaggacuagucccuguucccagagcccacuuuuuuuucuuuuuuugaaauaaaauagccugucuuucagaucuaaaaaaaaaaaaaaaaaaaaaaaaaaaaaaaaaaaaaaaaaaaaaaaaaaaaaaaaaaaaaaaaugcaucccccccccccccccccccccccccccccccaaaggcucuuuucagagccaccagaauu

SEQ ID NO: 4238 - RNA, 1840 nt, Artificial Sequence
  mRNA product Design a-2 comprising derived and/or modified sequence from HRSV(A2)__F-del_DSCav1_mut0 (opt2)
gggagaguccgcucagccagguugcagaagcggcuuagcguguguccuaaucuucucucugcguguagguaggccugugccgcaaacaagcuuaccauggagcuccucauccucaaggccaacgccaucaccaccauccucaccgccgucaccuucugcuucgccuccggccagaacaucaccgaggaguucuaccaguccaccugcuccgccgucuccaagggcuaccucuccgcccuccgcaccggcugguacaccuccgucaucaccaucgagcucuccaacaucaaggagaacaagugcaacggcaccgacgccaaggucaagcucaucaagcaggagcucgacaaguacaagaacgccgucaccgagcuccagcuccucaugcaguccacccccgccaccggcuccggcuccgccaucgccuccggcgucgccgucugcaagguccuccaccucgagggcgaggucaacaagaucaaguccgcccuccucuccaccaacaaggccgucgucucccucuccaacggcgucuccguccucaccuucaagguccucgaccucaagaacuacaucgacaagcagcuccuccccauccucaacaagcaguccugcuccaucuccaacaucgagaccgucaucgaguuccagcagaagaacaaccgccuccucgagaucacccgcgaguucuccgucaacgccggcgucaccacccccgucuccaccuacaugcucaccaacuccgagcuccucucccucaucaacgacaugcccaucaccaacgaccagaagaagcucauguccaacaacguccagaucguccgccagcaguccuacuccaucaugugcaucaucaaggaggagguccucgccuacgucguccagcucccccucuacggcgucaucgacacccccugcuggaagcuccacaccuccccccucugcaccaccaacaccaaggagggcuccaacaucugccucacccgcaccgaccgcggcugguacugcgacaacgccggcuccgucuccuucuucccccaggccgagaccugcaagguccaguccaaccgcgucuucugcgacaccaugaacucccgcacccuccccuccgaggucaaccucugcaacgucgacaucuucaaccccaaguacgacugcaagaucaugaccuccaagaccgacgucuccuccuccgucaucaccucccucggcgccaucgucuccugcuacggcaagaccaagugcaccgccuccaacaagaaccgcggcaucaucaagaccuucuccaacggcugcgacuacgucuccaacaagggcgucgacaccgucuccgucggcaacacccucuacuacgucaacaagcaggagggcaagucccucuacgucaagggcgagcccaucaucaacuucuacgacccccucgucuuccccuccgacgaguucgacgccuccaucucccaggucaacgagaagaucaaccagucccucgccuucauccgcaaguccgacgagcuccuccacaacgucaacgccggcaaguccaccaccaacaucaugaucaccaccaucaucaucgucaucaucgucauccuccucucccucaucgccgucggccuccuccucuacugcaaggcccgcugaggacuagucccuguucccagagcccacuuuuuuuucuuuuuuugaaauaaaauagccugucuuucagaucuaaaaaaaaaaaaaaaaaaaaaaaaaaaaaaaaaaaaaaaaaaaaaaaaaaaaaaaaaaaaaaaaugcaucccccccccccccccccccccccccccccccaaaggcucuuuucagagccaccagaauu

SEQ ID NO: 4239 - RNA, 1840 nt, Artificial Sequence
  mRNA product Design a-2 comprising derived and/or modified sequence from HRSV(A2)__F-del_DSCav1_mut0 (opt3)
gggagaguccgcucagccagguugcagaagcggcuuagcguguguccuaaucuucucucugcguguagguaggccugugccgcaaacaagcuuaccauggagcugcucauccuuaaggccaacgcuauuaccacaauacugacugcagugacguucugcuuugccagcggccagaauaucaccgaagaguucuaccaauccacauguucugcggucucaaaaggguauuugagugcuuuaagaacuggaugguacaccagcguuauuacaaucgaacuguccaacauuaaggagaauaaaugcaacgguaccgacgccaaggugaaacuaaucaagcaggaacucgauaaguauaaaaaugcaguaacugagcugcagcuucugaugcagucuacacccgccaccggcucggggucagcuauagcaagcggaguggccgucuguaagguguugcaccucgagggcgaaguuaacaaaaucaagagugcucugcuguccacgaauaaagccguggucucucucagcaacgguguguccguauuaacuuuuaagguucuggaccuuaagaauuacauugauaaacaauugcugccuauccuaaacaagcagucaugcaguauuagcaauaucgagaccgugauagaguuccagcagaaaaacaauaggcuccuggaaauuacacgggaguuuucugucaacgcgggggugacuaccccaguguccacauauaugcuuaccaauucagaacuguugagccucaucaacgacaugccgauuacgaacgaucaaaagaaacugaugaguaauaacguccagaucguucgccagcagucuuacuccaucauguguauuauaaaggaggaaguguuagcauauguagugcaacugccccucuacggagucaucgacacuccuugcuggaaacuucauacaagcccacuguguaccacuaauacaaaggagggcucgaacauuugcuugacccgaacggaucguggcugguacugugacaaugccgggucuguguccuucuuuccccaggcugaaaccugcaagguucagucaaacagaguguucugugauacaaugaauaguagaacucugccuagcgaggucaaccucugcaauguggacaucuuuaacccaaaauaugauugcaagauaaugaccuccaaaacagacguaucuagcucaguuauuaccagucugggagccaucguguccuguuacgguaagacuaaaugcacagcaagcaauaagaacaggggcaucauuaagaccuucucuaaugggugugauuaugucucaaacaaaggaguggacacugucagugugggcaauacgcuuuacuauguuaacaagcaagaggguaaaagccuguacgugaagggggaacccaucauuaacuuuuaugacccuuugguauucccauccgaugaguuugacgcuucuauaucgcaggucaaugagaaaaucaaccagagccucgccuucauucggaaguccgaugaacuguuacacaaugugaacgcgggaaagucaacaaccaauaucaugaucacuaccauuauaaucguuauuaucgugauucugcuaagucucaucgccgucggccugcuuuuguacugcaaagcacgcugaggacuagucccuguucccagagcccacuuuuuuuucuuuuuuugaaauaaaauagccugucuuucagaucuaaaaaaaaaaaaaaaaaaaaaaaaaaaaaaaaaaaaaaaaaaaaaaaaaaaaaaaaaaaaaaaaugcaucccccccccccccccccccccccccccccccaaaggcucuuuucagagccaccagaauu

SEQ ID NO: 4240 - RNA, 1840 nt, Artificial Sequence
  mRNA product Design a-2 comprising derived and/or modified sequence from HRSV(A2)__F-del_DSCav1_mut0 (opt4)
gggagaguccgcucagccagguugcagaagcggcuuagcguguguccuaaucuucucucugcguguagguaggccugugccgcaaacaagcuuaccauggagcugcugauccugaaggccaacgccaucaccaccauccugaccgccgugaccuucugcuucgccagcggccagaacaucaccgaggaguucuaccagagcaccugcagcgccgugagcaagggcuaccugagcgcccugagaaccggcugguacaccagcgugaucaccaucgagcugagcaacaucaaggagaacaagugcaacggcaccgacgccaaggugaagcugaucaagcaggagcuggacaaguacaagaacgccgugaccgagcugcagcugcugaugcagagcacccccgccaccggcagcggcagcgccaucgccagcggcguggccgugugcaaggugcugcaccuggagggcgaggugaacaagaucaagagcgcccugcugagcaccaacaaggccguggugagccugagcaacggcgugagcgugcugaccuucaaggugcuggaccugaagaacuacaucgacaagcagcugcugcccauccugaacaagcagagcugcagcaucagcaacaucgagaccgugaucgaguuccagcagaagaacaacagacugcuggagaucaccagagaguucagcgugaacgccggcgugaccacccccgugagcaccuacaugcugaccaacagcgagcugcugagccugaucaacgacaugcccaucaccaacgaccagaagaagcugaugagcaacaacgugcagaucgugagacagcagagcuacagcaucaugugcaucaucaaggaggaggugcuggccuacguggugcagcugccccuguacggcgugaucgacacccccugcuggaagcugcacaccagcccccugugcaccaccaacaccaaggagggcagcaacaucugccugaccagaaccgacagaggcugguacugcgacaacgccggcagcgugagcuucuucccccaggccgagaccugcaaggugcagagcaacagaguguucugcgacaccaugaacagcagaacccugcccagcgaggugaaccugugcaacguggacaucuucaaccccaaguacgacugcaagaucaugaccagcaagaccgacgugagcagcagcgugaucaccagccugggcgccaucgugagcugcuacggcaagaccaagugcaccgccagcaacaagaacagaggcaucaucaagaccuucagcaacggcugcgacuacgugagcaacaagggcguggacaccgugagcgugggcaacacccuguacuacgugaacaagcaggagggcaagagccuguacgugaagggcgagcccaucaucaacuucuacgacccccugguguuccccagcgacgaguucgacgccagcaucagccaggugaacgagaagaucaaccagagccuggccuucaucagaaagagcgacgagcugcugcacaacgugaacgccggcaagagcaccaccaacaucaugaucaccaccaucaucaucgugaucaucgugauccugcugagccugaucgccgugggccugcugcuguacugcaaggccagaugaggacuagucccuguucccagagcccacuuuuuuuucuuuuuuugaaauaaaauagccugucuuucagaucuaaaaaaaaaaaaaaaaaaaaaaaaaaaaaaaaaaaaaaaaaaaaaaaaaaaaaaaaaaaaaaaaugcaucccccccccccccccccccccccccccccccaaaggcucuuuucagagccaccagaauu

SEQ ID NO: 4241 - RNA, 1840 nt, Artificial Sequence
  mRNA product Design a-2 comprising derived and/or modified sequence from HRSV(A2)__F-del_DSCav1_mut0 (opt5)
gggagaguccgcucagccagguugcagaagcggcuuagcguguguccuaaucuucucucugcguguagguaggccugugccgcaaacaagcuuaccauggagcugcucauccugaaggccaacgcuauuaccacaauccuuacggccgugaccuucugcuuugcgagcggccagaauauuacagaagaguucuaccaauccaccuguucugcugucagcaaaggguaucuguccgcccucagaacaggaugguacaccucuguuaucacaauugaacugagcaacaucaaggagaauaaaugcaacggcaccgacgccaaggugaaacuuaucaagcaggaacuggauaaguauaaaaaugcugugacggagcuccagcugcugaugcaguccacccccgccacagggucuggaagcgcuauugccuccggcgucgcgguguguaagguucuccaccuggagggggaagugaacaaaaucaagagcgcccuucugucuaccaauaaagcugucgugucccucagcaacggaguuucugugcugacauuuaagguccuugaccugaagaauuacauugauaaacaacuccugccuauccugaacaagcaguccugcagcauuucuaauaucgagaccgugauugaguuccagcagaaaaacaaucggcuccuggaaaucacgcgcgaguuuuccgugaacgccggcgucacaaccccgguuagcacauauaugcuuaccaauuccgaacugcucucucugaucaacgacaugcccauuaccaacgaucaaaagaaacuuaugagcaauaacgugcagaucgugagacagcaguccuacagcauuauguguaucauuaaggaggaaguccuggcuuaugugguucaacucccucuguacggcgugaucgacacacccugcuggaaacugcauacgucuccucucuguaccacaaauaccaaggagggguccaacaucugccugacacggaccgaucgcggaugguacugugacaaugccggcagcgucucuuucuuuccccaggcggaaacgugcaaggugcagagcaacagaguuuucugugauacaaugaacuccagaacccugccuucugaggugaaucucugcaaugucgacauuuuuaacccgaaauaugauugcaagaucaugaccagcaaaacagacguguccagcucugucauuaccucccugggggccaucgugagcuguuacggaaagacaaaaugcacggcuucuaauaagaaccggggcauuaucaagaccuucuccaaugggugugauuauguuagcaacaaaggaguggacacagucuccgugggcaauacccuuuacuauguuaacaagcaagagggcaaaucucuguacgugaagggggaacccaucauuaacuuuuaugacccucucgucuuccccagcgaugaguuugacgccuccaucucucaggugaaugagaaaauuaaccagagccuggcuuucauccgcaaguccgaugaacugcuccacaaugugaacgccggaaagagcacaaccaauauuaugaucacgaccauuaucaucguuauuaucgucauucugcuuucucugaucgccgugggccuccugcuguacugcaaagcuagaugaggacuagucccuguucccagagcccacuuuuuuuucuuuuuuugaaauaaaauagccugucuuucagaucuaaaaaaaaaaaaaaaaaaaaaaaaaaaaaaaaaaaaaaaaaaaaaaaaaaaaaaaaaaaaaaaaugcaucccccccccccccccccccccccccccccccaaaggcucuuuucagagccaccagaauu

SEQ ID NO: 4242 - RNA, 1840 nt, Artificial Sequence
  mRNA product Design a-2 comprising derived and/or modified sequence from HRSV(A2)__F-del_DSCav1_mut0 (opt6)
gggagaguccgcucagccagguugcagaagcggcuuagcguguguccuaaucuucucucugcguguagguaggccugugccgcaaacaagcuuaccauggaauuacucauccucaaagcaaacgcaauaacaacaauacuaacagcagucacuuucugcuucgcauccggacaaaauaucacagaagaauuuuaccaauccaccugcucugcugucuccaaaggauaccuaucugcccucagaaccgguugguauacaucugucauaaccauagaacuaucaaacauuaaagaaaacaaauguaacggaacagacgcaaaagucaaacuuauaaaacaagaauuagacaaauacaaaaacgcagucacagaauuacaacuacuaaugcaaucaaccccagcaaccggaucaggauccgcaauagcuucaggaguagcaguauguaaaguucuacacuuagaaggagaagucaacaaaauuaaauccgcacuauuaucaaccaacaaagcagucguaucuuuaucaaacggaguaucuguacuuacauucaaaguacuagaccuaaaaaauuacauugauaaacaauuacuaccaauacuaaacaaacaaucauguuccaucucuaacauagaaacaguaauagaauuucaacaaaaaaauaacagauuacuugaaaucacccgagaauuuucaguaaacgcaggaguaaccacacccguaucuacauacaugcuaacaaacucugaacuucugagccuaauaaaugacaugccaauaaccaacgaccaaaaaaaacuaauguccaacaacguacaaauaguacgacaacaaucuuacucaaucaugugcauaaucaaagaagaaguacuagcuuauguaguccaacuuccacucuacggaguaauagacacccccugcuggaaacuacacacaucaccacuaugcacaacaaacacaaaagaaggcucaaacauaugccuaacaagaacugacagaggaugguauugugacaaugcaggcucugucucauucuuuccacaagccgaaacaugcaaaguucaaucaaaccgaguuuucugugacacaaugaacucuagaacucucccaucagaagucaacuuaugcaacguugacauauucaacccaaaauaugacuguaaaauaaugacuuccaaaacugauguaucauccuccgucauaacaucccuaggagcuauuguaucauguuacgggaaaaccaaaugcacagccucaaacaaaaaccgcgguaucauaaaaacauuuucaaacggaugugauuacguaagcaauaaaggaguagacaccguaucaguaggaaauacacuauacuauguaaauaaacaagaaggaaaaucacuauaugucaaaggagaaccaaucauaaauuucuaugacccacuuguauucccauccgaugaauuugacgcaagcauuucacaggucaacgaaaaaauaaaccaaucacuagccuucaucagaaaaucagacgaacuacuacauaacguaaacgccggaaaaucaacaaccaacauaaugauaacaacaaucauaauaguuaucauaguaauacuacuaucucuaauagcugucggacucuuacuauauugcaaagcccgauaaggacuagucccuguucccagagcccacuuuuuuuucuuuuuuugaaauaaaauagccugucuuucagaucuaaaaaaaaaaaaaaaaaaaaaaaaaaaaaaaaaaaaaaaaaaaaaaaaaaaaaaaaaaaaaaaaugcaucccccccccccccccccccccccccccccccaaaggcucuuuucagagccaccagaauu

SEQ ID NO: 4243 - RNA, 1840 nt, Artificial Sequence
  mRNA product Design a-2 comprising derived and/or modified sequence from HRSV(A2)__F-del_DSCav1_mut0 (opt11)
gggagaguccgcucagccagguugcagaagcggcuuagcguguguccuaaucuucucucugcguguagguaggccugugccgcaaacaagcuuaccauggaacuacuaauccugaaagccaacgccauaaccacaauccuuaccgcagucaccuucugcuucgccuccggucaaaacaucacagaagaguucuaccaauccaccuguuccgcagucagcaaaggcuaccucuccgcacuccgaaccggaugguacaccagcgucaucaccaucgaacuauccaacauaaaggaaaauaagugcaaugguacagaugccaaggucaaacucauaaagcaagaacucgacaaauacaaaaacgccgucaccgaacuacaacuacuaaugcaaucuacccccgcaacaggcucagguuccgccauagccuccggcgucgccguuugcaaaguccuccaccucgaaggcgaaguaaacaaaaucaaauccgcccuacucucaaccaacaaagcagucgucucccucucaaacggagucucgguccucaccuucaaaguccucgaccucaaaaacuauauagacaaacaacuccuacccauacucaacaaacaguccugcagcauauccaacaucgaaaccgugaucgaguuccaacagaaaaacaacagacuccucgaaaucacucgagaguucuccguaaacgccggcgucacaaccccagucucaacauacaugcucaccaacagcgaacuccuaucacuaaucaacgacaugccuaucacaaaugaucagaagaaacuaaugagcaacaacguccaaaucguccgccaacaaucauacuccaucaugugcaucauaaaagaagaaguccuagccuacgugguccagcuaccccucuacggcguaauugacaccccuugcuggaaacuacacacuucaccccucugcacaaccaacaccaaagaagguucaaacaucugccucacacgaacagaccgcggcugguacugcgacaacgccggauccguauccuucuucccccaagcagaaaccugcaaaguucaauccaaccggguauucugcgacaccaugaacucaagaacccuucccuccgaaguaaaucuaugcaacgucgacauauucaacccaaaauacgacugcaaaaucaugaccuccaaaaccgaugucuccagcagcgucaucaccagccucggcgccaucgucuccugcuacggcaaaacaaaauguacagcauccaacaaaaaccgaggcauaaucaaaaccuucuccaacgggugcgauuacgucagcaacaaaggcgucgacaccgucuccgugggcaacacccuauacuacgucaacaaacaagaaggcaaaucacuguacguaaagggcgaacccaucaucaacuucuaugacccucugguguucccauccgaugaauuugacgcauccauaucucaggucaacgaaaagaucaaccaaucccucgccuucauacgcaaauccgacgaacuccuacacaacgucaacgcugguaaaagcaccaccaacaucaugaucaccacaaucaucaucgucauaaucguuauccuacucucccuuauagcagucggacuccuccucuacugcaaagcccgcuaaggacuagucccuguucccagagcccacuuuuuuuucuuuuuuugaaauaaaauagccugucuuucagaucuaaaaaaaaaaaaaaaaaaaaaaaaaaaaaaaaaaaaaaaaaaaaaaaaaaaaaaaaaaaaaaaaugcaucccccccccccccccccccccccccccccccaaaggcucuuuucagagccaccagaauu

SEQ ID NO: 4244 - RNA, 1918 nt, Artificial Sequence
  mRNA product Design a-3 comprising derived and/or modified sequence from HRSV(A2)__F-del_DSCav1_mut0 (opt1)
gggagagggcgcuuggcuugcaaggacccugagcugcggcauugaagcacacccaacccaacucgacugaagucagccucacugaaccggaucugagaaucuucucucucugggcuugccagggcucuccgaaccuagcuagcauccucuucaauuccaacuagaaagcuuaccauggagcugcucauccugaaggccaacgccaucaccaccauccugacggcggugaccuucugcuucgccagcggccagaacaucaccgaggaguucuaccaguccacgugcagcgccgucuccaagggguaccucagcgcccugcggaccggcugguacaccuccgugaucaccaucgagcugagcaacaucaaggagaacaagugcaacgggaccgacgccaaggugaagcucaucaagcaggagcuggacaaguacaagaacgcggucacggagcugcagcuccugaugcaguccaccccggcaaccggcuccggcuccgccaucgcgagcggcgucgccgugugcaaggugcugcaccucgagggggaggucaacaagaucaagagcgcccugcuguccaccaacaaggccguggugagccucuccaacggcgucagcgugcugaccuucaaggugcuggaccucaagaacuacaucgacaagcagcugcugcccauccugaacaagcagagcugcuccaucagcaacaucgagacggugaucgaguuccagcagaagaacaaccggcuccuggagaucacccgcgaguucagcgugaacgccggggucaccacccccguguccacguacaugcugaccaacagcgagcuccugucccugaucaacgacaugccgaucaccaacgaccagaagaagcucaugagcaacaacgugcagaucguccggcagcaguccuacagcaucaugugcaucaucaaggaggaggugcuggcguacgugguccagcugccccucuacggcgugaucgacacccccugcuggaagcugcacacgagcccccugugcaccaccaacaccaaggagggguccaacaucugccucacgcgcaccgaccggggcugguacugcgacaacgccggcagcgucuccuucuucccgcaggccgagaccugcaaggugcagagcaaccgcguguucugcgacaccaugaacucccggacgcugcccagcgagguaaaccucugcaacgucgacaucuucaaccccaaguacgacugcaagaucaugaccuccaagaccgacgugagcuccagcgugaucaccucccugggggccaucgucagcugcuacggcaagacgaagugcaccgccagcaacaagaaccgggggaucaucaagaccuucuccaacggcugcgacuacgugagcaacaagggcguggacaccguguccgucgggaacacccuguacuacgugaacaagcaggagggcaagagccucuacgugaagggggagcccaucaucaacuucuacgacccgcuggucuuccccuccgacgaguucgacgcgagcaucucccaggugaacgagaagaucaaccagagccuggccuucauccgcaaguccgacgagcugcuccacaacgugaacgccggcaagagcacgaccaacaucaugaucaccaccaucaucaucgucaucaucgugauccugcugucccucaucgccguggggcugcugcucuacugcaaggcccggugaggacuagucccuguucccagagcccacuuuuuuuucuuuuuuugaaauaaaauagccugucuuucagaucuaaaaaaaaaaaaaaaaaaaaaaaaaaaaaaaaaaaaaaaaaaaaaaaaaaaaaaaaaaaaaaaaugcaucccccccccccccccccccccccccccccccaaaggcucuuuucagagccaccagaauu

SEQ ID NO: 4245 - RNA, 1918 nt, Artificial Sequence
  mRNA product Design a-3 comprising derived and/or modified sequence from HRSV(A2)__F-del_DSCav1_mut0 (opt1)
gggagagggcgcuuggcuugcaaggacccugagcugcggcauugaagcacacccaacccaacucgacugaagucagccucacugaaccggaucugagaaucuucucucucugggcuugccagggcucuccgaaccuagcuagcauccucuucaauuccaacuagaaagcuuaccauggagcugcucauccugaaggccaacgccaucaccaccauccugacggcggugaccuucugcuucgccagcggccagaacaucaccgaggaguucuaccaguccacgugcagcgccgucuccaagggguaccucagcgcccugcgcaccggcugguacaccuccgugaucaccaucgagcugagcaacaucaaggagaacaagugcaacgggaccgacgccaaggugaagcucaucaagcaggagcuggacaaguacaagaacgcggucacggagcugcagcuccugaugcaguccacccccgccaccggcagcggguccgccaucgccagcggcguggcggugugcaagguccugcaccucgagggcgaggugaacaagaucaaguccgcccugcugagcaccaacaaggccguggucucccucagcaacgggguguccgugcugacguucaagguccuggaccucaagaacuacaucgacaagcagcugcugccgauccucaacaagcagagcugcuccaucagcaacaucgagaccgugaucgaguuccagcagaagaacaaccggcugcuggagaucacccgcgaguucuccgugaacgccggcgucaccacgcccgugagcaccuacaugcucaccaacagcgagcugcugucccucaucaacgacaugcccaucaccaacgaccagaagaagcugaugagcaacaacgugcagaucguccggcagcaguccuacagcaucaugugcaucaucaaggaggaggugcuggccuacgugguccagcucccccuguacggggugaucgacacgccgugcuggaagcugcacaccagcccccucugcaccaccaacacgaaggagggcuccaacaucugccugacccgcaccgaccgggggugguacugcgacaacgcgggcuccgugagcuucuucccccaggccgagaccugcaagguccaguccaaccgcguguucugcgacacgaugaacagccggacccuccccuccgaggucaaccugugcaacguggacaucuucaacccgaaguacgacugcaagaucaugaccagcaagaccgacguguccagcuccgucaucacgagccugggcgccaucguguccugcuacgggaagaccaagugcaccgccagcaacaagaaccggggcaucaucaagaccuucuccaacgggugcgacuacgugagcaacaagggcgucgacacggugagcgugggcaacacccucuacuacgucaacaagcaggaggggaagucccuguacgugaagggcgagcccaucaucaacuucuacgacccccugguguuccccagcgacgaguucgacgccuccaucagccaggucaacgagaagaucaaccagucccucgcguucauccgcaagagcgacgagcugcugcacaacgugaacgccgggaaguccaccaccaacaucaugaucaccacgaucaucaucgugaucaucgucauccuccugagccugaucgccgugggccuccugcuguacugcaaggcccggugaggacuagucccuguucccagagcccacuuuuuuuucuuuuuuugaaauaaaauagccugucuuucagaucuaaaaaaaaaaaaaaaaaaaaaaaaaaaaaaaaaaaaaaaaaaaaaaaaaaaaaaaaaaaaaaaaugcaucccccccccccccccccccccccccccccccaaaggcucuuuucagagccaccagaauu

SEQ ID NO: 4246 - RNA, 1918 nt, Artificial Sequence
  mRNA product Design a-3 comprising derived and/or modified sequence from HRSV(A2)__F-del_DSCav1_mut0 (opt2)
gggagagggcgcuuggcuugcaaggacccugagcugcggcauugaagcacacccaacccaacucgacugaagucagccucacugaaccggaucugagaaucuucucucucugggcuugccagggcucuccgaaccuagcuagcauccucuucaauuccaacuagaaagcuuaccauggagcuccucauccucaaggccaacgccaucaccaccauccucaccgccgucaccuucugcuucgccuccggccagaacaucaccgaggaguucuaccaguccaccugcuccgccgucuccaagggcuaccucuccgcccuccgcaccggcugguacaccuccgucaucaccaucgagcucuccaacaucaaggagaacaagugcaacggcaccgacgccaaggucaagcucaucaagcaggagcucgacaaguacaagaacgccgucaccgagcuccagcuccucaugcaguccacccccgccaccggcuccggcuccgccaucgccuccggcgucgccgucugcaagguccuccaccucgagggcgaggucaacaagaucaaguccgcccuccucuccaccaacaaggccgucgucucccucuccaacggcgucuccguccucaccuucaagguccucgaccucaagaacuacaucgacaagcagcuccuccccauccucaacaagcaguccugcuccaucuccaacaucgagaccgucaucgaguuccagcagaagaacaaccgccuccucgagaucacccgcgaguucuccgucaacgccggcgucaccacccccgucuccaccuacaugcucaccaacuccgagcuccucucccucaucaacgacaugcccaucaccaacgaccagaagaagcucauguccaacaacguccagaucguccgccagcaguccuacuccaucaugugcaucaucaaggaggagguccucgccuacgucguccagcucccccucuacggcgucaucgacacccccugcuggaagcuccacaccuccccccucugcaccaccaacaccaaggagggcuccaacaucugccucacccgcaccgaccgcggcugguacugcgacaacgccggcuccgucuccuucuucccccaggccgagaccugcaagguccaguccaaccgcgucuucugcgacaccaugaacucccgcacccuccccuccgaggucaaccucugcaacgucgacaucuucaaccccaaguacgacugcaagaucaugaccuccaagaccgacgucuccuccuccgucaucaccucccucggcgccaucgucuccugcuacggcaagaccaagugcaccgccuccaacaagaaccgcggcaucaucaagaccuucuccaacggcugcgacuacgucuccaacaagggcgucgacaccgucuccgucggcaacacccucuacuacgucaacaagcaggagggcaagucccucuacgucaagggcgagcccaucaucaacuucuacgacccccucgucuuccccuccgacgaguucgacgccuccaucucccaggucaacgagaagaucaaccagucccucgccuucauccgcaaguccgacgagcuccuccacaacgucaacgccggcaaguccaccaccaacaucaugaucaccaccaucaucaucgucaucaucgucauccuccucucccucaucgccgucggccuccuccucuacugcaaggcccgcugaggacuagucccuguucccagagcccacuuuuuuuucuuuuuuugaaauaaaauagccugucuuucagaucuaaaaaaaaaaaaaaaaaaaaaaaaaaaaaaaaaaaaaaaaaaaaaaaaaaaaaaaaaaaaaaaaugcaucccccccccccccccccccccccccccccccaaaggcucuuuucagagccaccagaauu

SEQ ID NO: 4247 - RNA, 1918 nt, Artificial Sequence
  mRNA product Design a-3 comprising derived and/or modified sequence from HRSV(A2)__F-del_DSCav1_mut0 (opt3)
gggagagggcgcuuggcuugcaaggacccugagcugcggcauugaagcacacccaacccaacucgacugaagucagccucacugaaccggaucugagaaucuucucucucugggcuugccagggcucuccgaaccuagcuagcauccucuucaauuccaacuagaaagcuuaccauggagcugcucauccuuaaggccaacgcuauuaccacaauacugacugcagugacguucugcuuugccagcggccagaauaucaccgaagaguucuaccaauccacauguucugcggucucaaaaggguauuugagugcuuuaagaacuggaugguacaccagcguuauuacaaucgaacuguccaacauuaaggagaauaaaugcaacgguaccgacgccaaggugaaacuaaucaagcaggaacucgauaaguauaaaaaugcaguaacugagcugcagcuucugaugcagucuacacccgccaccggcucggggucagcuauagcaagcggaguggccgucuguaagguguugcaccucgagggcgaaguuaacaaaaucaagagugcucugcuguccacgaauaaagccguggucucucucagcaacgguguguccguauuaacuuuuaagguucuggaccuuaagaauuacauugauaaacaauugcugccuauccuaaacaagcagucaugcaguauuagcaauaucgagaccgugauagaguuccagcagaaaaacaauaggcuccuggaaauuacacgggaguuuucugucaacgcgggggugacuaccccaguguccacauauaugcuuaccaauucagaacuguugagccucaucaacgacaugccgauuacgaacgaucaaaagaaacugaugaguaauaacguccagaucguucgccagcagucuuacuccaucauguguauuauaaaggaggaaguguuagcauauguagugcaacugccccucuacggagucaucgacacuccuugcuggaaacuucauacaagcccacuguguaccacuaauacaaaggagggcucgaacauuugcuugacccgaacggaucguggcugguacugugacaaugccgggucuguguccuucuuuccccaggcugaaaccugcaagguucagucaaacagaguguucugugauacaaugaauaguagaacucugccuagcgaggucaaccucugcaauguggacaucuuuaacccaaaauaugauugcaagauaaugaccuccaaaacagacguaucuagcucaguuauuaccagucugggagccaucguguccuguuacgguaagacuaaaugcacagcaagcaauaagaacaggggcaucauuaagaccuucucuaaugggugugauuaugucucaaacaaaggaguggacacugucagugugggcaauacgcuuuacuauguuaacaagcaagaggguaaaagccuguacgugaagggggaacccaucauuaacuuuuaugacccuuugguauucccauccgaugaguuugacgcuucuauaucgcaggucaaugagaaaaucaaccagagccucgccuucauucggaaguccgaugaacuguuacacaaugugaacgcgggaaagucaacaaccaauaucaugaucacuaccauuauaaucguuauuaucgugauucugcuaagucucaucgccgucggccugcuuuuguacugcaaagcacgcugaggacuagucccuguucccagagcccacuuuuuuuucuuuuuuugaaauaaaauagccugucuuucagaucuaaaaaaaaaaaaaaaaaaaaaaaaaaaaaaaaaaaaaaaaaaaaaaaaaaaaaaaaaaaaaaaaugcaucccccccccccccccccccccccccccccccaaaggcucuuuucagagccaccagaauu

SEQ ID NO: 4248 - RNA, 1918 nt, Artificial Sequence
  mRNA product Design a-3 comprising derived and/or modified sequence from HRSV(A2)__F-del_DSCav1_mut0 (opt4)
gggagagggcgcuuggcuugcaaggacccugagcugcggcauugaagcacacccaacccaacucgacugaagucagccucacugaaccggaucugagaaucuucucucucugggcuugccagggcucuccgaaccuagcuagcauccucuucaauuccaacuagaaagcuuaccauggagcugcugauccugaaggccaacgccaucaccaccauccugaccgccgugaccuucugcuucgccagcggccagaacaucaccgaggaguucuaccagagcaccugcagcgccgugagcaagggcuaccugagcgcccugagaaccggcugguacaccagcgugaucaccaucgagcugagcaacaucaaggagaacaagugcaacggcaccgacgccaaggugaagcugaucaagcaggagcuggacaaguacaagaacgccgugaccgagcugcagcugcugaugcagagcacccccgccaccggcagcggcagcgccaucgccagcggcguggccgugugcaaggugcugcaccuggagggcgaggugaacaagaucaagagcgcccugcugagcaccaacaaggccguggugagccugagcaacggcgugagcgugcugaccuucaaggugcuggaccugaagaacuacaucgacaagcagcugcugcccauccugaacaagcagagcugcagcaucagcaacaucgagaccgugaucgaguuccagcagaagaacaacagacugcuggagaucaccagagaguucagcgugaacgccggcgugaccacccccgugagcaccuacaugcugaccaacagcgagcugcugagccugaucaacgacaugcccaucaccaacgaccagaagaagcugaugagcaacaacgugcagaucgugagacagcagagcuacagcaucaugugcaucaucaaggaggaggugcuggccuacguggugcagcugccccuguacggcgugaucgacacccccugcuggaagcugcacaccagcccccugugcaccaccaacaccaaggagggcagcaacaucugccugaccagaaccgacagaggcugguacugcgacaacgccggcagcgugagcuucuucccccaggccgagaccugcaaggugcagagcaacagaguguucugcgacaccaugaacagcagaacccugcccagcgaggugaaccugugcaacguggacaucuucaaccccaaguacgacugcaagaucaugaccagcaagaccgacgugagcagcagcgugaucaccagccugggcgccaucgugagcugcuacggcaagaccaagugcaccgccagcaacaagaacagaggcaucaucaagaccuucagcaacggcugcgacuacgugagcaacaagggcguggacaccgugagcgugggcaacacccuguacuacgugaacaagcaggagggcaagagccuguacgugaagggcgagcccaucaucaacuucuacgacccccugguguuccccagcgacgaguucgacgccagcaucagccaggugaacgagaagaucaaccagagccuggccuucaucagaaagagcgacgagcugcugcacaacgugaacgccggcaagagcaccaccaacaucaugaucaccaccaucaucaucgugaucaucgugauccugcugagccugaucgccgugggccugcugcuguacugcaaggccagaugaggacuagucccuguucccagagcccacuuuuuuuucuuuuuuugaaauaaaauagccugucuuucagaucuaaaaaaaaaaaaaaaaaaaaaaaaaaaaaaaaaaaaaaaaaaaaaaaaaaaaaaaaaaaaaaaaugcaucccccccccccccccccccccccccccccccaaaggcucuuuucagagccaccagaauu

SEQ ID NO: 4249 - RNA, 1918 nt, Artificial Sequence
  mRNA product Design a-3 comprising derived and/or modified sequence from HRSV(A2)__F-del_DSCav1_mut0 (opt5)
gggagagggcgcuuggcuugcaaggacccugagcugcggcauugaagcacacccaacccaacucgacugaagucagccucacugaaccggaucugagaaucuucucucucugggcuugccagggcucuccgaaccuagcuagcauccucuucaauuccaacuagaaagcuuaccauggagcugcucauccugaaggccaacgcuauuaccacaauccuuacggccgugaccuucugcuuugcgagcggccagaauauuacagaagaguucuaccaauccaccuguucugcugucagcaaaggguaucuguccgcccucagaacaggaugguacaccucuguuaucacaauugaacugagcaacaucaaggagaauaaaugcaacggcaccgacgccaaggugaaacuuaucaagcaggaacuggauaaguauaaaaaugcugugacggagcuccagcugcugaugcaguccacccccgccacagggucuggaagcgcuauugccuccggcgucgcgguguguaagguucuccaccuggagggggaagugaacaaaaucaagagcgcccuucugucuaccaauaaagcugucgugucccucagcaacggaguuucugugcugacauuuaagguccuugaccugaagaauuacauugauaaacaacuccugccuauccugaacaagcaguccugcagcauuucuaauaucgagaccgugauugaguuccagcagaaaaacaaucggcuccuggaaaucacgcgcgaguuuuccgugaacgccggcgucacaaccccgguuagcacauauaugcuuaccaauuccgaacugcucucucugaucaacgacaugcccauuaccaacgaucaaaagaaacuuaugagcaauaacgugcagaucgugagacagcaguccuacagcauuauguguaucauuaaggaggaaguccuggcuuaugugguucaacucccucuguacggcgugaucgacacacccugcuggaaacugcauacgucuccucucuguaccacaaauaccaaggagggguccaacaucugccugacacggaccgaucgcggaugguacugugacaaugccggcagcgucucuuucuuuccccaggcggaaacgugcaaggugcagagcaacagaguuuucugugauacaaugaacuccagaacccugccuucugaggugaaucucugcaaugucgacauuuuuaacccgaaauaugauugcaagaucaugaccagcaaaacagacguguccagcucugucauuaccucccugggggccaucgugagcuguuacggaaagacaaaaugcacggcuucuaauaagaaccggggcauuaucaagaccuucuccaaugggugugauuauguuagcaacaaaggaguggacacagucuccgugggcaauacccuuuacuauguuaacaagcaagagggcaaaucucuguacgugaagggggaacccaucauuaacuuuuaugacccucucgucuuccccagcgaugaguuugacgccuccaucucucaggugaaugagaaaauuaaccagagccuggcuuucauccgcaaguccgaugaacugcuccacaaugugaacgccggaaagagcacaaccaauauuaugaucacgaccauuaucaucguuauuaucgucauucugcuuucucugaucgccgugggccuccugcuguacugcaaagcuagaugaggacuagucccuguucccagagcccacuuuuuuuucuuuuuuugaaauaaaauagccugucuuucagaucuaaaaaaaaaaaaaaaaaaaaaaaaaaaaaaaaaaaaaaaaaaaaaaaaaaaaaaaaaaaaaaaaugcaucccccccccccccccccccccccccccccccaaaggcucuuuucagagccaccagaauu

SEQ ID NO: 4250 - RNA, 1918 nt, Artificial Sequence
  mRNA product Design a-3 comprising derived and/or modified sequence from HRSV(A2)__F-del_DSCav1_mut0 (opt6)
gggagagggcgcuuggcuugcaaggacccugagcugcggcauugaagcacacccaacccaacucgacugaagucagccucacugaaccggaucugagaaucuucucucucugggcuugccagggcucuccgaaccuagcuagcauccucuucaauuccaacuagaaagcuuaccauggaauuacucauccucaaagcaaacgcaauaacaacaauacuaacagcagucacuuucugcuucgcauccggacaaaauaucacagaagaauuuuaccaauccaccugcucugcugucuccaaaggauaccuaucugcccucagaaccgguugguauacaucugucauaaccauagaacuaucaaacauuaaagaaaacaaauguaacggaacagacgcaaaagucaaacuuauaaaacaagaauuagacaaauacaaaaacgcagucacagaauuacaacuacuaaugcaaucaaccccagcaaccggaucaggauccgcaauagcuucaggaguagcaguauguaaaguucuacacuuagaaggagaagucaacaaaauuaaauccgcacuauuaucaaccaacaaagcagucguaucuuuaucaaacggaguaucuguacuuacauucaaaguacuagaccuaaaaaauuacauugauaaacaauuacuaccaauacuaaacaaacaaucauguuccaucucuaacauagaaacaguaauagaauuucaacaaaaaaauaacagauuacuugaaaucacccgagaauuuucaguaaacgcaggaguaaccacacccguaucuacauacaugcuaacaaacucugaacuucugagccuaauaaaugacaugccaauaaccaacgaccaaaaaaaacuaauguccaacaacguacaaauaguacgacaacaaucuuacucaaucaugugcauaaucaaagaagaaguacuagcuuauguaguccaacuuccacucuacggaguaauagacacccccugcuggaaacuacacacaucaccacuaugcacaacaaacacaaaagaaggcucaaacauaugccuaacaagaacugacagaggaugguauugugacaaugcaggcucugucucauucuuuccacaagccgaaacaugcaaaguucaaucaaaccgaguuuucugugacacaaugaacucuagaacucucccaucagaagucaacuuaugcaacguugacauauucaacccaaaauaugacuguaaaauaaugacuuccaaaacugauguaucauccuccgucauaacaucccuaggagcuauuguaucauguuacgggaaaaccaaaugcacagccucaaacaaaaaccgcgguaucauaaaaacauuuucaaacggaugugauuacguaagcaauaaaggaguagacaccguaucaguaggaaauacacuauacuauguaaauaaacaagaaggaaaaucacuauaugucaaaggagaaccaaucauaaauuucuaugacccacuuguauucccauccgaugaauuugacgcaagcauuucacaggucaacgaaaaaauaaaccaaucacuagccuucaucagaaaaucagacgaacuacuacauaacguaaacgccggaaaaucaacaaccaacauaaugauaacaacaaucauaauaguuaucauaguaauacuacuaucucuaauagcugucggacucuuacuauauugcaaagcccgauaaggacuagucccuguucccagagcccacuuuuuuuucuuuuuuugaaauaaaauagccugucuuucagaucuaaaaaaaaaaaaaaaaaaaaaaaaaaaaaaaaaaaaaaaaaaaaaaaaaaaaaaaaaaaaaaaaugcaucccccccccccccccccccccccccccccccaaaggcucuuuucagagccaccagaauu

SEQ ID NO: 4251 - RNA, 1918 nt, Artificial Sequence
  mRNA product Design a-3 comprising derived and/or modified sequence from HRSV(A2)__F-del_DSCav1_mut0 (opt11)
gggagagggcgcuuggcuugcaaggacccugagcugcggcauugaagcacacccaacccaacucgacugaagucagccucacugaaccggaucugagaaucuucucucucugggcuugccagggcucuccgaaccuagcuagcauccucuucaauuccaacuagaaagcuuaccauggaacuacuaauccugaaagccaacgccauaaccacaauccuuaccgcagucaccuucugcuucgccuccggucaaaacaucacagaagaguucuaccaauccaccuguuccgcagucagcaaaggcuaccucuccgcacuccgaaccggaugguacaccagcgucaucaccaucgaacuauccaacauaaaggaaaauaagugcaaugguacagaugccaaggucaaacucauaaagcaagaacucgacaaauacaaaaacgccgucaccgaacuacaacuacuaaugcaaucuacccccgcaacaggcucagguuccgccauagccuccggcgucgccguuugcaaaguccuccaccucgaaggcgaaguaaacaaaaucaaauccgcccuacucucaaccaacaaagcagucgucucccucucaaacggagucucgguccucaccuucaaaguccucgaccucaaaaacuauauagacaaacaacuccuacccauacucaacaaacaguccugcagcauauccaacaucgaaaccgugaucgaguuccaacagaaaaacaacagacuccucgaaaucacucgagaguucuccguaaacgccggcgucacaaccccagucucaacauacaugcucaccaacagcgaacuccuaucacuaaucaacgacaugccuaucacaaaugaucagaagaaacuaaugagcaacaacguccaaaucguccgccaacaaucauacuccaucaugugcaucauaaaagaagaaguccuagccuacgugguccagcuaccccucuacggcguaauugacaccccuugcuggaaacuacacacuucaccccucugcacaaccaacaccaaagaagguucaaacaucugccucacacgaacagaccgcggcugguacugcgacaacgccggauccguauccuucuucccccaagcagaaaccugcaaaguucaauccaaccggguauucugcgacaccaugaacucaagaacccuucccuccgaaguaaaucuaugcaacgucgacauauucaacccaaaauacgacugcaaaaucaugaccuccaaaaccgaugucuccagcagcgucaucaccagccucggcgccaucgucuccugcuacggcaaaacaaaauguacagcauccaacaaaaaccgaggcauaaucaaaaccuucuccaacgggugcgauuacgucagcaacaaaggcgucgacaccgucuccgugggcaacacccuauacuacgucaacaaacaagaaggcaaaucacuguacguaaagggcgaacccaucaucaacuucuaugacccucugguguucccauccgaugaauuugacgcauccauaucucaggucaacgaaaagaucaaccaaucccucgccuucauacgcaaauccgacgaacuccuacacaacgucaacgcugguaaaagcaccaccaacaucaugaucaccacaaucaucaucgucauaaucguuauccuacucucccuuauagcagucggacuccuccucuacugcaaagcccgcuaaggacuagucccuguucccagagcccacuuuuuuuucuuuuuuugaaauaaaauagccugucuuucagaucuaaaaaaaaaaaaaaaaaaaaaaaaaaaaaaaaaaaaaaaaaaaaaaaaaaaaaaaaaaaaaaaaugcaucccccccccccccccccccccccccccccccaaaggcucuuuucagagccaccagaauu

SEQ ID NO: 4252 - RNA, 1867 nt, Artificial Sequence
  mRNA product Design a-4 comprising derived and/or modified sequence from HRSV(A2)__F-del_DSCav1_mut0 (opt1)
gggagacuccugucgggcggaaguaggaggaguagaguuuaaaaacaguacucuuuuuccgguucgggacguaguugaagcaacgacaagccggauaaccgcucuugagacaggaagcuuaccauggagcugcucauccugaaggccaacgccaucaccaccauccugacggcggugaccuucugcuucgccagcggccagaacaucaccgaggaguucuaccaguccacgugcagcgccgucuccaagggguaccucagcgcccugcggaccggcugguacaccuccgugaucaccaucgagcugagcaacaucaaggagaacaagugcaacgggaccgacgccaaggugaagcucaucaagcaggagcuggacaaguacaagaacgcggucacggagcugcagcuccugaugcaguccaccccggcaaccggcuccggcuccgccaucgcgagcggcgucgccgugugcaaggugcugcaccucgagggggaggucaacaagaucaagagcgcccugcuguccaccaacaaggccguggugagccucuccaacggcgucagcgugcugaccuucaaggugcuggaccucaagaacuacaucgacaagcagcugcugcccauccugaacaagcagagcugcuccaucagcaacaucgagacggugaucgaguuccagcagaagaacaaccggcuccuggagaucacccgcgaguucagcgugaacgccggggucaccacccccguguccacguacaugcugaccaacagcgagcuccugucccugaucaacgacaugccgaucaccaacgaccagaagaagcucaugagcaacaacgugcagaucguccggcagcaguccuacagcaucaugugcaucaucaaggaggaggugcuggcguacgugguccagcugccccucuacggcgugaucgacacccccugcuggaagcugcacacgagcccccugugcaccaccaacaccaaggagggguccaacaucugccucacgcgcaccgaccggggcugguacugcgacaacgccggcagcgucuccuucuucccgcaggccgagaccugcaaggugcagagcaaccgcguguucugcgacaccaugaacucccggacgcugcccagcgagguaaaccucugcaacgucgacaucuucaaccccaaguacgacugcaagaucaugaccuccaagaccgacgugagcuccagcgugaucaccucccugggggccaucgucagcugcuacggcaagacgaagugcaccgccagcaacaagaaccgggggaucaucaagaccuucuccaacggcugcgacuacgugagcaacaagggcguggacaccguguccgucgggaacacccuguacuacgugaacaagcaggagggcaagagccucuacgugaagggggagcccaucaucaacuucuacgacccgcuggucuuccccuccgacgaguucgacgcgagcaucucccaggugaacgagaagaucaaccagagccuggccuucauccgcaaguccgacgagcugcuccacaacgugaacgccggcaagagcacgaccaacaucaugaucaccaccaucaucaucgucaucaucgugauccugcugucccucaucgccguggggcugcugcucuacugcaaggcccggugaggacuagucccuguucccagagcccacuuuuuuuucuuuuuuugaaauaaaauagccugucuuucagaucuaaaaaaaaaaaaaaaaaaaaaaaaaaaaaaaaaaaaaaaaaaaaaaaaaaaaaaaaaaaaaaaaugcaucccccccccccccccccccccccccccccccaaaggcucuuuucagagccaccagaauu

SEQ ID NO: 4253 - RNA, 1867 nt, Artificial Sequence
  mRNA product Design a-4 comprising derived and/or modified sequence from HRSV(A2)__F-del_DSCav1_mut0 (opt1)
gggagacuccugucgggcggaaguaggaggaguagaguuuaaaaacaguacucuuuuuccgguucgggacguaguugaagcaacgacaagccggauaaccgcucuugagacaggaagcuuaccauggagcugcucauccugaaggccaacgccaucaccaccauccugacggcggugaccuucugcuucgccagcggccagaacaucaccgaggaguucuaccaguccacgugcagcgccgucuccaagggguaccucagcgcccugcgcaccggcugguacaccuccgugaucaccaucgagcugagcaacaucaaggagaacaagugcaacgggaccgacgccaaggugaagcucaucaagcaggagcuggacaaguacaagaacgcggucacggagcugcagcuccugaugcaguccacccccgccaccggcagcggguccgccaucgccagcggcguggcggugugcaagguccugcaccucgagggcgaggugaacaagaucaaguccgcccugcugagcaccaacaaggccguggucucccucagcaacgggguguccgugcugacguucaagguccuggaccucaagaacuacaucgacaagcagcugcugccgauccucaacaagcagagcugcuccaucagcaacaucgagaccgugaucgaguuccagcagaagaacaaccggcugcuggagaucacccgcgaguucuccgugaacgccggcgucaccacgcccgugagcaccuacaugcucaccaacagcgagcugcugucccucaucaacgacaugcccaucaccaacgaccagaagaagcugaugagcaacaacgugcagaucguccggcagcaguccuacagcaucaugugcaucaucaaggaggaggugcuggccuacgugguccagcucccccuguacggggugaucgacacgccgugcuggaagcugcacaccagcccccucugcaccaccaacacgaaggagggcuccaacaucugccugacccgcaccgaccgggggugguacugcgacaacgcgggcuccgugagcuucuucccccaggccgagaccugcaagguccaguccaaccgcguguucugcgacacgaugaacagccggacccuccccuccgaggucaaccugugcaacguggacaucuucaacccgaaguacgacugcaagaucaugaccagcaagaccgacguguccagcuccgucaucacgagccugggcgccaucguguccugcuacgggaagaccaagugcaccgccagcaacaagaaccggggcaucaucaagaccuucuccaacgggugcgacuacgugagcaacaagggcgucgacacggugagcgugggcaacacccucuacuacgucaacaagcaggaggggaagucccuguacgugaagggcgagcccaucaucaacuucuacgacccccugguguuccccagcgacgaguucgacgccuccaucagccaggucaacgagaagaucaaccagucccucgcguucauccgcaagagcgacgagcugcugcacaacgugaacgccgggaaguccaccaccaacaucaugaucaccacgaucaucaucgugaucaucgucauccuccugagccugaucgccgugggccuccugcuguacugcaaggcccggugaggacuagucccuguucccagagcccacuuuuuuuucuuuuuuugaaauaaaauagccugucuuucagaucuaaaaaaaaaaaaaaaaaaaaaaaaaaaaaaaaaaaaaaaaaaaaaaaaaaaaaaaaaaaaaaaaugcaucccccccccccccccccccccccccccccccaaaggcucuuuucagagccaccagaauu

SEQ ID NO: 4254 - RNA, 1867 nt, Artificial Sequence
  mRNA product Design a-4 comprising derived and/or modified sequence from HRSV(A2)__F-del_DSCav1_mut0 (opt2)
gggagacuccugucgggcggaaguaggaggaguagaguuuaaaaacaguacucuuuuuccgguucgggacguaguugaagcaacgacaagccggauaaccgcucuugagacaggaagcuuaccauggagcuccucauccucaaggccaacgccaucaccaccauccucaccgccgucaccuucugcuucgccuccggccagaacaucaccgaggaguucuaccaguccaccugcuccgccgucuccaagggcuaccucuccgcccuccgcaccggcugguacaccuccgucaucaccaucgagcucuccaacaucaaggagaacaagugcaacggcaccgacgccaaggucaagcucaucaagcaggagcucgacaaguacaagaacgccgucaccgagcuccagcuccucaugcaguccacccccgccaccggcuccggcuccgccaucgccuccggcgucgccgucugcaagguccuccaccucgagggcgaggucaacaagaucaaguccgcccuccucuccaccaacaaggccgucgucucccucuccaacggcgucuccguccucaccuucaagguccucgaccucaagaacuacaucgacaagcagcuccuccccauccucaacaagcaguccugcuccaucuccaacaucgagaccgucaucgaguuccagcagaagaacaaccgccuccucgagaucacccgcgaguucuccgucaacgccggcgucaccacccccgucuccaccuacaugcucaccaacuccgagcuccucucccucaucaacgacaugcccaucaccaacgaccagaagaagcucauguccaacaacguccagaucguccgccagcaguccuacuccaucaugugcaucaucaaggaggagguccucgccuacgucguccagcucccccucuacggcgucaucgacacccccugcuggaagcuccacaccuccccccucugcaccaccaacaccaaggagggcuccaacaucugccucacccgcaccgaccgcggcugguacugcgacaacgccggcuccgucuccuucuucccccaggccgagaccugcaagguccaguccaaccgcgucuucugcgacaccaugaacucccgcacccuccccuccgaggucaaccucugcaacgucgacaucuucaaccccaaguacgacugcaagaucaugaccuccaagaccgacgucuccuccuccgucaucaccucccucggcgccaucgucuccugcuacggcaagaccaagugcaccgccuccaacaagaaccgcggcaucaucaagaccuucuccaacggcugcgacuacgucuccaacaagggcgucgacaccgucuccgucggcaacacccucuacuacgucaacaagcaggagggcaagucccucuacgucaagggcgagcccaucaucaacuucuacgacccccucgucuuccccuccgacgaguucgacgccuccaucucccaggucaacgagaagaucaaccagucccucgccuucauccgcaaguccgacgagcuccuccacaacgucaacgccggcaaguccaccaccaacaucaugaucaccaccaucaucaucgucaucaucgucauccuccucucccucaucgccgucggccuccuccucuacugcaaggcccgcugaggacuagucccuguucccagagcccacuuuuuuuucuuuuuuugaaauaaaauagccugucuuucagaucuaaaaaaaaaaaaaaaaaaaaaaaaaaaaaaaaaaaaaaaaaaaaaaaaaaaaaaaaaaaaaaaaugcaucccccccccccccccccccccccccccccccaaaggcucuuuucagagccaccagaauu

SEQ ID NO: 4255 - RNA, 1867 nt, Artificial Sequence
  mRNA product Design a-4 comprising derived and/or modified sequence from HRSV(A2)__F-del_DSCav1_mut0 (opt3)
gggagacuccugucgggcggaaguaggaggaguagaguuuaaaaacaguacucuuuuuccgguucgggacguaguugaagcaacgacaagccggauaaccgcucuugagacaggaagcuuaccauggagcugcucauccuuaaggccaacgcuauuaccacaauacugacugcagugacguucugcuuugccagcggccagaauaucaccgaagaguucuaccaauccacauguucugcggucucaaaaggguauuugagugcuuuaagaacuggaugguacaccagcguuauuacaaucgaacuguccaacauuaaggagaauaaaugcaacgguaccgacgccaaggugaaacuaaucaagcaggaacucgauaaguauaaaaaugcaguaacugagcugcagcuucugaugcagucuacacccgccaccggcucggggucagcuauagcaagcggaguggccgucuguaagguguugcaccucgagggcgaaguuaacaaaaucaagagugcucugcuguccacgaauaaagccguggucucucucagcaacgguguguccguauuaacuuuuaagguucuggaccuuaagaauuacauugauaaacaauugcugccuauccuaaacaagcagucaugcaguauuagcaauaucgagaccgugauagaguuccagcagaaaaacaauaggcuccuggaaauuacacgggaguuuucugucaacgcgggggugacuaccccaguguccacauauaugcuuaccaauucagaacuguugagccucaucaacgacaugccgauuacgaacgaucaaaagaaacugaugaguaauaacguccagaucguucgccagcagucuuacuccaucauguguauuauaaaggaggaaguguuagcauauguagugcaacugccccucuacggagucaucgacacuccuugcuggaaacuucauacaagcccacuguguaccacuaauacaaaggagggcucgaacauuugcuugacccgaacggaucguggcugguacugugacaaugccgggucuguguccuucuuuccccaggcugaaaccugcaagguucagucaaacagaguguucugugauacaaugaauaguagaacucugccuagcgaggucaaccucugcaauguggacaucuuuaacccaaaauaugauugcaagauaaugaccuccaaaacagacguaucuagcucaguuauuaccagucugggagccaucguguccuguuacgguaagacuaaaugcacagcaagcaauaagaacaggggcaucauuaagaccuucucuaaugggugugauuaugucucaaacaaaggaguggacacugucagugugggcaauacgcuuuacuauguuaacaagcaagaggguaaaagccuguacgugaagggggaacccaucauuaacuuuuaugacccuuugguauucccauccgaugaguuugacgcuucuauaucgcaggucaaugagaaaaucaaccagagccucgccuucauucggaaguccgaugaacuguuacacaaugugaacgcgggaaagucaacaaccaauaucaugaucacuaccauuauaaucguuauuaucgugauucugcuaagucucaucgccgucggccugcuuuuguacugcaaagcacgcugaggacuagucccuguucccagagcccacuuuuuuuucuuuuuuugaaauaaaauagccugucuuucagaucuaaaaaaaaaaaaaaaaaaaaaaaaaaaaaaaaaaaaaaaaaaaaaaaaaaaaaaaaaaaaaaaaugcaucccccccccccccccccccccccccccccccaaaggcucuuuucagagccaccagaauu

SEQ ID NO: 4256 - RNA, 1867 nt, Artificial Sequence
  mRNA product Design a-4 comprising derived and/or modified sequence from HRSV(A2)__F-del_DSCav1_mut0 (opt4)
gggagacuccugucgggcggaaguaggaggaguagaguuuaaaaacaguacucuuuuuccgguucgggacguaguugaagcaacgacaagccggauaaccgcucuugagacaggaagcuuaccauggagcugcugauccugaaggccaacgccaucaccaccauccugaccgccgugaccuucugcuucgccagcggccagaacaucaccgaggaguucuaccagagcaccugcagcgccgugagcaagggcuaccugagcgcccugagaaccggcugguacaccagcgugaucaccaucgagcugagcaacaucaaggagaacaagugcaacggcaccgacgccaaggugaagcugaucaagcaggagcuggacaaguacaagaacgccgugaccgagcugcagcugcugaugcagagcacccccgccaccggcagcggcagcgccaucgccagcggcguggccgugugcaaggugcugcaccuggagggcgaggugaacaagaucaagagcgcccugcugagcaccaacaaggccguggugagccugagcaacggcgugagcgugcugaccuucaaggugcuggaccugaagaacuacaucgacaagcagcugcugcccauccugaacaagcagagcugcagcaucagcaacaucgagaccgugaucgaguuccagcagaagaacaacagacugcuggagaucaccagagaguucagcgugaacgccggcgugaccacccccgugagcaccuacaugcugaccaacagcgagcugcugagccugaucaacgacaugcccaucaccaacgaccagaagaagcugaugagcaacaacgugcagaucgugagacagcagagcuacagcaucaugugcaucaucaaggaggaggugcuggccuacguggugcagcugccccuguacggcgugaucgacacccccugcuggaagcugcacaccagcccccugugcaccaccaacaccaaggagggcagcaacaucugccugaccagaaccgacagaggcugguacugcgacaacgccggcagcgugagcuucuucccccaggccgagaccugcaaggugcagagcaacagaguguucugcgacaccaugaacagcagaacccugcccagcgaggugaaccugugcaacguggacaucuucaaccccaaguacgacugcaagaucaugaccagcaagaccgacgugagcagcagcgugaucaccagccugggcgccaucgugagcugcuacggcaagaccaagugcaccgccagcaacaagaacagaggcaucaucaagaccuucagcaacggcugcgacuacgugagcaacaagggcguggacaccgugagcgugggcaacacccuguacuacgugaacaagcaggagggcaagagccuguacgugaagggcgagcccaucaucaacuucuacgacccccugguguuccccagcgacgaguucgacgccagcaucagccaggugaacgagaagaucaaccagagccuggccuucaucagaaagagcgacgagcugcugcacaacgugaacgccggcaagagcaccaccaacaucaugaucaccaccaucaucaucgugaucaucgugauccugcugagccugaucgccgugggccugcugcuguacugcaaggccagaugaggacuagucccuguucccagagcccacuuuuuuuucuuuuuuugaaauaaaauagccugucuuucagaucuaaaaaaaaaaaaaaaaaaaaaaaaaaaaaaaaaaaaaaaaaaaaaaaaaaaaaaaaaaaaaaaaugcaucccccccccccccccccccccccccccccccaaaggcucuuuucagagccaccagaauu

SEQ ID NO: 4257 - RNA, 1867 nt, Artificial Sequence
  mRNA product Design a-4 comprising derived and/or modified sequence from HRSV(A2)__F-del_DSCav1_mut0 (opt5)
gggagacuccugucgggcggaaguaggaggaguagaguuuaaaaacaguacucuuuuuccgguucgggacguaguugaagcaacgacaagccggauaaccgcucuugagacaggaagcuuaccauggagcugcucauccugaaggccaacgcuauuaccacaauccuuacggccgugaccuucugcuuugcgagcggccagaauauuacagaagaguucuaccaauccaccuguucugcugucagcaaaggguaucuguccgcccucagaacaggaugguacaccucuguuaucacaauugaacugagcaacaucaaggagaauaaaugcaacggcaccgacgccaaggugaaacuuaucaagcaggaacuggauaaguauaaaaaugcugugacggagcuccagcugcugaugcaguccacccccgccacagggucuggaagcgcuauugccuccggcgucgcgguguguaagguucuccaccuggagggggaagugaacaaaaucaagagcgcccuucugucuaccaauaaagcugucgugucccucagcaacggaguuucugugcugacauuuaagguccuugaccugaagaauuacauugauaaacaacuccugccuauccugaacaagcaguccugcagcauuucuaauaucgagaccgugauugaguuccagcagaaaaacaaucggcuccuggaaaucacgcgcgaguuuuccgugaacgccggcgucacaaccccgguuagcacauauaugcuuaccaauuccgaacugcucucucugaucaacgacaugcccauuaccaacgaucaaaagaaacuuaugagcaauaacgugcagaucgugagacagcaguccuacagcauuauguguaucauuaaggaggaaguccuggcuuaugugguucaacucccucuguacggcgugaucgacacacccugcuggaaacugcauacgucuccucucuguaccacaaauaccaaggagggguccaacaucugccugacacggaccgaucgcggaugguacugugacaaugccggcagcgucucuuucuuuccccaggcggaaacgugcaaggugcagagcaacagaguuuucugugauacaaugaacuccagaacccugccuucugaggugaaucucugcaaugucgacauuuuuaacccgaaauaugauugcaagaucaugaccagcaaaacagacguguccagcucugucauuaccucccugggggccaucgugagcuguuacggaaagacaaaaugcacggcuucuaauaagaaccggggcauuaucaagaccuucuccaaugggugugauuauguuagcaacaaaggaguggacacagucuccgugggcaauacccuuuacuauguuaacaagcaagagggcaaaucucuguacgugaagggggaacccaucauuaacuuuuaugacccucucgucuuccccagcgaugaguuugacgccuccaucucucaggugaaugagaaaauuaaccagagccuggcuuucauccgcaaguccgaugaacugcuccacaaugugaacgccggaaagagcacaaccaauauuaugaucacgaccauuaucaucguuauuaucgucauucugcuuucucugaucgccgugggccuccugcuguacugcaaagcuagaugaggacuagucccuguucccagagcccacuuuuuuuucuuuuuuugaaauaaaauagccugucuuucagaucuaaaaaaaaaaaaaaaaaaaaaaaaaaaaaaaaaaaaaaaaaaaaaaaaaaaaaaaaaaaaaaaaugcaucccccccccccccccccccccccccccccccaaaggcucuuuucagagccaccagaauu

SEQ ID NO: 4258 - RNA, 1867 nt, Artificial Sequence
  mRNA product Design a-4 comprising derived and/or modified sequence from HRSV(A2)__F-del_DSCav1_mut0 (opt6)
gggagacuccugucgggcggaaguaggaggaguagaguuuaaaaacaguacucuuuuuccgguucgggacguaguugaagcaacgacaagccggauaaccgcucuugagacaggaagcuuaccauggaauuacucauccucaaagcaaacgcaauaacaacaauacuaacagcagucacuuucugcuucgcauccggacaaaauaucacagaagaauuuuaccaauccaccugcucugcugucuccaaaggauaccuaucugcccucagaaccgguugguauacaucugucauaaccauagaacuaucaaacauuaaagaaaacaaauguaacggaacagacgcaaaagucaaacuuauaaaacaagaauuagacaaauacaaaaacgcagucacagaauuacaacuacuaaugcaaucaaccccagcaaccggaucaggauccgcaauagcuucaggaguagcaguauguaaaguucuacacuuagaaggagaagucaacaaaauuaaauccgcacuauuaucaaccaacaaagcagucguaucuuuaucaaacggaguaucuguacuuacauucaaaguacuagaccuaaaaaauuacauugauaaacaauuacuaccaauacuaaacaaacaaucauguuccaucucuaacauagaaacaguaauagaauuucaacaaaaaaauaacagauuacuugaaaucacccgagaauuuucaguaaacgcaggaguaaccacacccguaucuacauacaugcuaacaaacucugaacuucugagccuaauaaaugacaugccaauaaccaacgaccaaaaaaaacuaauguccaacaacguacaaauaguacgacaacaaucuuacucaaucaugugcauaaucaaagaagaaguacuagcuuauguaguccaacuuccacucuacggaguaauagacacccccugcuggaaacuacacacaucaccacuaugcacaacaaacacaaaagaaggcucaaacauaugccuaacaagaacugacagaggaugguauugugacaaugcaggcucugucucauucuuuccacaagccgaaacaugcaaaguucaaucaaaccgaguuuucugugacacaaugaacucuagaacucucccaucagaagucaacuuaugcaacguugacauauucaacccaaaauaugacuguaaaauaaugacuuccaaaacugauguaucauccuccgucauaacaucccuaggagcuauuguaucauguuacgggaaaaccaaaugcacagccucaaacaaaaaccgcgguaucauaaaaacauuuucaaacggaugugauuacguaagcaauaaaggaguagacaccguaucaguaggaaauacacuauacuauguaaauaaacaagaaggaaaaucacuauaugucaaaggagaaccaaucauaaauuucuaugacccacuuguauucccauccgaugaauuugacgcaagcauuucacaggucaacgaaaaaauaaaccaaucacuagccuucaucagaaaaucagacgaacuacuacauaacguaaacgccggaaaaucaacaaccaacauaaugauaacaacaaucauaauaguuaucauaguaauacuacuaucucuaauagcugucggacucuuacuauauugcaaagcccgauaaggacuagucccuguucccagagcccacuuuuuuuucuuuuuuugaaauaaaauagccugucuuucagaucuaaaaaaaaaaaaaaaaaaaaaaaaaaaaaaaaaaaaaaaaaaaaaaaaaaaaaaaaaaaaaaaaugcaucccccccccccccccccccccccccccccccaaaggcucuuuucagagccaccagaauu

SEQ ID NO: 4259 - RNA, 1867 nt, Artificial Sequence
  mRNA product Design a-4 comprising derived and/or modified sequence from HRSV(A2)__F-del_DSCav1_mut0 (opt11)
gggagacuccugucgggcggaaguaggaggaguagaguuuaaaaacaguacucuuuuuccgguucgggacguaguugaagcaacgacaagccggauaaccgcucuugagacaggaagcuuaccauggaacuacuaauccugaaagccaacgccauaaccacaauccuuaccgcagucaccuucugcuucgccuccggucaaaacaucacagaagaguucuaccaauccaccuguuccgcagucagcaaaggcuaccucuccgcacuccgaaccggaugguacaccagcgucaucaccaucgaacuauccaacauaaaggaaaauaagugcaaugguacagaugccaaggucaaacucauaaagcaagaacucgacaaauacaaaaacgccgucaccgaacuacaacuacuaaugcaaucuacccccgcaacaggcucagguuccgccauagccuccggcgucgccguuugcaaaguccuccaccucgaaggcgaaguaaacaaaaucaaauccgcccuacucucaaccaacaaagcagucgucucccucucaaacggagucucgguccucaccuucaaaguccucgaccucaaaaacuauauagacaaacaacuccuacccauacucaacaaacaguccugcagcauauccaacaucgaaaccgugaucgaguuccaacagaaaaacaacagacuccucgaaaucacucgagaguucuccguaaacgccggcgucacaaccccagucucaacauacaugcucaccaacagcgaacuccuaucacuaaucaacgacaugccuaucacaaaugaucagaagaaacuaaugagcaacaacguccaaaucguccgccaacaaucauacuccaucaugugcaucauaaaagaagaaguccuagccuacgugguccagcuaccccucuacggcguaauugacaccccuugcuggaaacuacacacuucaccccucugcacaaccaacaccaaagaagguucaaacaucugccucacacgaacagaccgcggcugguacugcgacaacgccggauccguauccuucuucccccaagcagaaaccugcaaaguucaauccaaccggguauucugcgacaccaugaacucaagaacccuucccuccgaaguaaaucuaugcaacgucgacauauucaacccaaaauacgacugcaaaaucaugaccuccaaaaccgaugucuccagcagcgucaucaccagccucggcgccaucgucuccugcuacggcaaaacaaaauguacagcauccaacaaaaaccgaggcauaaucaaaaccuucuccaacgggugcgauuacgucagcaacaaaggcgucgacaccgucuccgugggcaacacccuauacuacgucaacaaacaagaaggcaaaucacuguacguaaagggcgaacccaucaucaacuucuaugacccucugguguucccauccgaugaauuugacgcauccauaucucaggucaacgaaaagaucaaccaaucccucgccuucauacgcaaauccgacgaacuccuacacaacgucaacgcugguaaaagcaccaccaacaucaugaucaccacaaucaucaucgucauaaucguuauccuacucucccuuauagcagucggacuccuccucuacugcaaagcccgcuaaggacuagucccuguucccagagcccacuuuuuuuucuuuuuuugaaauaaaauagccugucuuucagaucuaaaaaaaaaaaaaaaaaaaaaaaaaaaaaaaaaaaaaaaaaaaaaaaaaaaaaaaaaaaaaaaaugcaucccccccccccccccccccccccccccccccaaaggcucuuuucagagccaccagaauu

SEQ ID NO: 4260 - RNA, 1813 nt, Artificial Sequence
  mRNA product Design a-5 comprising derived and/or modified sequence from HRSV(A2)__F-del_DSCav1_mut0 (opt1)
gggagacuuucccauucuguagcagaauuugguguugccuguggucuuggucccgcggagaagcuuaccauggagcugcucauccugaaggccaacgccaucaccaccauccugacggcggugaccuucugcuucgccagcggccagaacaucaccgaggaguucuaccaguccacgugcagcgccgucuccaagggguaccucagcgcccugcggaccggcugguacaccuccgugaucaccaucgagcugagcaacaucaaggagaacaagugcaacgggaccgacgccaaggugaagcucaucaagcaggagcuggacaaguacaagaacgcggucacggagcugcagcuccugaugcaguccaccccggcaaccggcuccggcuccgccaucgcgagcggcgucgccgugugcaaggugcugcaccucgagggggaggucaacaagaucaagagcgcccugcuguccaccaacaaggccguggugagccucuccaacggcgucagcgugcugaccuucaaggugcuggaccucaagaacuacaucgacaagcagcugcugcccauccugaacaagcagagcugcuccaucagcaacaucgagacggugaucgaguuccagcagaagaacaaccggcuccuggagaucacccgcgaguucagcgugaacgccggggucaccacccccguguccacguacaugcugaccaacagcgagcuccugucccugaucaacgacaugccgaucaccaacgaccagaagaagcucaugagcaacaacgugcagaucguccggcagcaguccuacagcaucaugugcaucaucaaggaggaggugcuggcguacgugguccagcugccccucuacggcgugaucgacacccccugcuggaagcugcacacgagcccccugugcaccaccaacaccaaggagggguccaacaucugccucacgcgcaccgaccggggcugguacugcgacaacgccggcagcgucuccuucuucccgcaggccgagaccugcaaggugcagagcaaccgcguguucugcgacaccaugaacucccggacgcugcccagcgagguaaaccucugcaacgucgacaucuucaaccccaaguacgacugcaagaucaugaccuccaagaccgacgugagcuccagcgugaucaccucccugggggccaucgucagcugcuacggcaagacgaagugcaccgccagcaacaagaaccgggggaucaucaagaccuucuccaacggcugcgacuacgugagcaacaagggcguggacaccguguccgucgggaacacccuguacuacgugaacaagcaggagggcaagagccucuacgugaagggggagcccaucaucaacuucuacgacccgcuggucuuccccuccgacgaguucgacgcgagcaucucccaggugaacgagaagaucaaccagagccuggccuucauccgcaaguccgacgagcugcuccacaacgugaacgccggcaagagcacgaccaacaucaugaucaccaccaucaucaucgucaucaucgugauccugcugucccucaucgccguggggcugcugcucuacugcaaggcccggugaggacuagucccuguucccagagcccacuuuuuuuucuuuuuuugaaauaaaauagccugucuuucagaucuaaaaaaaaaaaaaaaaaaaaaaaaaaaaaaaaaaaaaaaaaaaaaaaaaaaaaaaaaaaaaaaaugcaucccccccccccccccccccccccccccccccaaaggcucuuuucagagccaccagaauu

SEQ ID NO: 4261 - RNA, 1813 nt, Artificial Sequence
  mRNA product Design a-5 comprising derived and/or modified sequence from HRSV(A2)__F-del_DSCav1_mut0 (opt1)
gggagacuuucccauucuguagcagaauuugguguugccuguggucuuggucccgcggagaagcuuaccauggagcugcucauccugaaggccaacgccaucaccaccauccugacggcggugaccuucugcuucgccagcggccagaacaucaccgaggaguucuaccaguccacgugcagcgccgucuccaagggguaccucagcgcccugcgcaccggcugguacaccuccgugaucaccaucgagcugagcaacaucaaggagaacaagugcaacgggaccgacgccaaggugaagcucaucaagcaggagcuggacaaguacaagaacgcggucacggagcugcagcuccugaugcaguccacccccgccaccggcagcggguccgccaucgccagcggcguggcggugugcaagguccugcaccucgagggcgaggugaacaagaucaaguccgcccugcugagcaccaacaaggccguggucucccucagcaacgggguguccgugcugacguucaagguccuggaccucaagaacuacaucgacaagcagcugcugccgauccucaacaagcagagcugcuccaucagcaacaucgagaccgugaucgaguuccagcagaagaacaaccggcugcuggagaucacccgcgaguucuccgugaacgccggcgucaccacgcccgugagcaccuacaugcucaccaacagcgagcugcugucccucaucaacgacaugcccaucaccaacgaccagaagaagcugaugagcaacaacgugcagaucguccggcagcaguccuacagcaucaugugcaucaucaaggaggaggugcuggccuacgugguccagcucccccuguacggggugaucgacacgccgugcuggaagcugcacaccagcccccucugcaccaccaacacgaaggagggcuccaacaucugccugacccgcaccgaccgggggugguacugcgacaacgcgggcuccgugagcuucuucccccaggccgagaccugcaagguccaguccaaccgcguguucugcgacacgaugaacagccggacccuccccuccgaggucaaccugugcaacguggacaucuucaacccgaaguacgacugcaagaucaugaccagcaagaccgacguguccagcuccgucaucacgagccugggcgccaucguguccugcuacgggaagaccaagugcaccgccagcaacaagaaccggggcaucaucaagaccuucuccaacgggugcgacuacgugagcaacaagggcgucgacacggugagcgugggcaacacccucuacuacgucaacaagcaggaggggaagucccuguacgugaagggcgagcccaucaucaacuucuacgacccccugguguuccccagcgacgaguucgacgccuccaucagccaggucaacgagaagaucaaccagucccucgcguucauccgcaagagcgacgagcugcugcacaacgugaacgccgggaaguccaccaccaacaucaugaucaccacgaucaucaucgugaucaucgucauccuccugagccugaucgccgugggccuccugcuguacugcaaggcccggugaggacuagucccuguucccagagcccacuuuuuuuucuuuuuuugaaauaaaauagccugucuuucagaucuaaaaaaaaaaaaaaaaaaaaaaaaaaaaaaaaaaaaaaaaaaaaaaaaaaaaaaaaaaaaaaaaugcaucccccccccccccccccccccccccccccccaaaggcucuuuucagagccaccagaauu

SEQ ID NO: 4262 - RNA, 1813 nt, Artificial Sequence
  mRNA product Design a-5 comprising derived and/or modified sequence from HRSV(A2)__F-del_DSCav1_mut0 (opt2)
gggagacuuucccauucuguagcagaauuugguguugccuguggucuuggucccgcggagaagcuuaccauggagcuccucauccucaaggccaacgccaucaccaccauccucaccgccgucaccuucugcuucgccuccggccagaacaucaccgaggaguucuaccaguccaccugcuccgccgucuccaagggcuaccucuccgcccuccgcaccggcugguacaccuccgucaucaccaucgagcucuccaacaucaaggagaacaagugcaacggcaccgacgccaaggucaagcucaucaagcaggagcucgacaaguacaagaacgccgucaccgagcuccagcuccucaugcaguccacccccgccaccggcuccggcuccgccaucgccuccggcgucgccgucugcaagguccuccaccucgagggcgaggucaacaagaucaaguccgcccuccucuccaccaacaaggccgucgucucccucuccaacggcgucuccguccucaccuucaagguccucgaccucaagaacuacaucgacaagcagcuccuccccauccucaacaagcaguccugcuccaucuccaacaucgagaccgucaucgaguuccagcagaagaacaaccgccuccucgagaucacccgcgaguucuccgucaacgccggcgucaccacccccgucuccaccuacaugcucaccaacuccgagcuccucucccucaucaacgacaugcccaucaccaacgaccagaagaagcucauguccaacaacguccagaucguccgccagcaguccuacuccaucaugugcaucaucaaggaggagguccucgccuacgucguccagcucccccucuacggcgucaucgacacccccugcuggaagcuccacaccuccccccucugcaccaccaacaccaaggagggcuccaacaucugccucacccgcaccgaccgcggcugguacugcgacaacgccggcuccgucuccuucuucccccaggccgagaccugcaagguccaguccaaccgcgucuucugcgacaccaugaacucccgcacccuccccuccgaggucaaccucugcaacgucgacaucuucaaccccaaguacgacugcaagaucaugaccuccaagaccgacgucuccuccuccgucaucaccucccucggcgccaucgucuccugcuacggcaagaccaagugcaccgccuccaacaagaaccgcggcaucaucaagaccuucuccaacggcugcgacuacgucuccaacaagggcgucgacaccgucuccgucggcaacacccucuacuacgucaacaagcaggagggcaagucccucuacgucaagggcgagcccaucaucaacuucuacgacccccucgucuuccccuccgacgaguucgacgccuccaucucccaggucaacgagaagaucaaccagucccucgccuucauccgcaaguccgacgagcuccuccacaacgucaacgccggcaaguccaccaccaacaucaugaucaccaccaucaucaucgucaucaucgucauccuccucucccucaucgccgucggccuccuccucuacugcaaggcccgcugaggacuagucccuguucccagagcccacuuuuuuuucuuuuuuugaaauaaaauagccugucuuucagaucuaaaaaaaaaaaaaaaaaaaaaaaaaaaaaaaaaaaaaaaaaaaaaaaaaaaaaaaaaaaaaaaaugcaucccccccccccccccccccccccccccccccaaaggcucuuuucagagccaccagaauu

SEQ ID NO: 4263 - RNA, 1813 nt, Artificial Sequence
  mRNA product Design a-5 comprising derived and/or modified sequence from HRSV(A2)__F-del_DSCav1_mut0 (opt3)
gggagacuuucccauucuguagcagaauuugguguugccuguggucuuggucccgcggagaagcuuaccauggagcugcucauccuuaaggccaacgcuauuaccacaauacugacugcagugacguucugcuuugccagcggccagaauaucaccgaagaguucuaccaauccacauguucugcggucucaaaaggguauuugagugcuuuaagaacuggaugguacaccagcguuauuacaaucgaacuguccaacauuaaggagaauaaaugcaacgguaccgacgccaaggugaaacuaaucaagcaggaacucgauaaguauaaaaaugcaguaacugagcugcagcuucugaugcagucuacacccgccaccggcucggggucagcuauagcaagcggaguggccgucuguaagguguugcaccucgagggcgaaguuaacaaaaucaagagugcucugcuguccacgaauaaagccguggucucucucagcaacgguguguccguauuaacuuuuaagguucuggaccuuaagaauuacauugauaaacaauugcugccuauccuaaacaagcagucaugcaguauuagcaauaucgagaccgugauagaguuccagcagaaaaacaauaggcuccuggaaauuacacgggaguuuucugucaacgcgggggugacuaccccaguguccacauauaugcuuaccaauucagaacuguugagccucaucaacgacaugccgauuacgaacgaucaaaagaaacugaugaguaauaacguccagaucguucgccagcagucuuacuccaucauguguauuauaaaggaggaaguguuagcauauguagugcaacugccccucuacggagucaucgacacuccuugcuggaaacuucauacaagcccacuguguaccacuaauacaaaggagggcucgaacauuugcuugacccgaacggaucguggcugguacugugacaaugccgggucuguguccuucuuuccccaggcugaaaccugcaagguucagucaaacagaguguucugugauacaaugaauaguagaacucugccuagcgaggucaaccucugcaauguggacaucuuuaacccaaaauaugauugcaagauaaugaccuccaaaacagacguaucuagcucaguuauuaccagucugggagccaucguguccuguuacgguaagacuaaaugcacagcaagcaauaagaacaggggcaucauuaagaccuucucuaaugggugugauuaugucucaaacaaaggaguggacacugucagugugggcaauacgcuuuacuauguuaacaagcaagaggguaaaagccuguacgugaagggggaacccaucauuaacuuuuaugacccuuugguauucccauccgaugaguuugacgcuucuauaucgcaggucaaugagaaaaucaaccagagccucgccuucauucggaaguccgaugaacuguuacacaaugugaacgcgggaaagucaacaaccaauaucaugaucacuaccauuauaaucguuauuaucgugauucugcuaagucucaucgccgucggccugcuuuuguacugcaaagcacgcugaggacuagucccuguucccagagcccacuuuuuuuucuuuuuuugaaauaaaauagccugucuuucagaucuaaaaaaaaaaaaaaaaaaaaaaaaaaaaaaaaaaaaaaaaaaaaaaaaaaaaaaaaaaaaaaaaugcaucccccccccccccccccccccccccccccccaaaggcucuuuucagagccaccagaauu

SEQ ID NO: 4264 - RNA, 1813 nt, Artificial Sequence
  mRNA product Design a-5 comprising derived and/or modified sequence from HRSV(A2)__F-del_DSCav1_mut0 (opt4)
gggagacuuucccauucuguagcagaauuugguguugccuguggucuuggucccgcggagaagcuuaccauggagcugcugauccugaaggccaacgccaucaccaccauccugaccgccgugaccuucugcuucgccagcggccagaacaucaccgaggaguucuaccagagcaccugcagcgccgugagcaagggcuaccugagcgcccugagaaccggcugguacaccagcgugaucaccaucgagcugagcaacaucaaggagaacaagugcaacggcaccgacgccaaggugaagcugaucaagcaggagcuggacaaguacaagaacgccgugaccgagcugcagcugcugaugcagagcacccccgccaccggcagcggcagcgccaucgccagcggcguggccgugugcaaggugcugcaccuggagggcgaggugaacaagaucaagagcgcccugcugagcaccaacaaggccguggugagccugagcaacggcgugagcgugcugaccuucaaggugcuggaccugaagaacuacaucgacaagcagcugcugcccauccugaacaagcagagcugcagcaucagcaacaucgagaccgugaucgaguuccagcagaagaacaacagacugcuggagaucaccagagaguucagcgugaacgccggcgugaccacccccgugagcaccuacaugcugaccaacagcgagcugcugagccugaucaacgacaugcccaucaccaacgaccagaagaagcugaugagcaacaacgugcagaucgugagacagcagagcuacagcaucaugugcaucaucaaggaggaggugcuggccuacguggugcagcugccccuguacggcgugaucgacacccccugcuggaagcugcacaccagcccccugugcaccaccaacaccaaggagggcagcaacaucugccugaccagaaccgacagaggcugguacugcgacaacgccggcagcgugagcuucuucccccaggccgagaccugcaaggugcagagcaacagaguguucugcgacaccaugaacagcagaacccugcccagcgaggugaaccugugcaacguggacaucuucaaccccaaguacgacugcaagaucaugaccagcaagaccgacgugagcagcagcgugaucaccagccugggcgccaucgugagcugcuacggcaagaccaagugcaccgccagcaacaagaacagaggcaucaucaagaccuucagcaacggcugcgacuacgugagcaacaagggcguggacaccgugagcgugggcaacacccuguacuacgugaacaagcaggagggcaagagccuguacgugaagggcgagcccaucaucaacuucuacgacccccugguguuccccagcgacgaguucgacgccagcaucagccaggugaacgagaagaucaaccagagccuggccuucaucagaaagagcgacgagcugcugcacaacgugaacgccggcaagagcaccaccaacaucaugaucaccaccaucaucaucgugaucaucgugauccugcugagccugaucgccgugggccugcugcuguacugcaaggccagaugaggacuagucccuguucccagagcccacuuuuuuuucuuuuuuugaaauaaaauagccugucuuucagaucuaaaaaaaaaaaaaaaaaaaaaaaaaaaaaaaaaaaaaaaaaaaaaaaaaaaaaaaaaaaaaaaaugcaucccccccccccccccccccccccccccccccaaaggcucuuuucagagccaccagaauu

SEQ ID NO: 4265 - RNA, 1813 nt, Artificial Sequence
  mRNA product Design a-5 comprising derived and/or modified sequence from HRSV(A2)__F-del_DSCav1_mut0 (opt5)
gggagacuuucccauucuguagcagaauuugguguugccuguggucuuggucccgcggagaagcuuaccauggagcugcucauccugaaggccaacgcuauuaccacaauccuuacggccgugaccuucugcuuugcgagcggccagaauauuacagaagaguucuaccaauccaccuguucugcugucagcaaaggguaucuguccgcccucagaacaggaugguacaccucuguuaucacaauugaacugagcaacaucaaggagaauaaaugcaacggcaccgacgccaaggugaaacuuaucaagcaggaacuggauaaguauaaaaaugcugugacggagcuccagcugcugaugcaguccacccccgccacagggucuggaagcgcuauugccuccggcgucgcgguguguaagguucuccaccuggagggggaagugaacaaaaucaagagcgcccuucugucuaccaauaaagcugucgugucccucagcaacggaguuucugugcugacauuuaagguccuugaccugaagaauuacauugauaaacaacuccugccuauccugaacaagcaguccugcagcauuucuaauaucgagaccgugauugaguuccagcagaaaaacaaucggcuccuggaaaucacgcgcgaguuuuccgugaacgccggcgucacaaccccgguuagcacauauaugcuuaccaauuccgaacugcucucucugaucaacgacaugcccauuaccaacgaucaaaagaaacuuaugagcaauaacgugcagaucgugagacagcaguccuacagcauuauguguaucauuaaggaggaaguccuggcuuaugugguucaacucccucuguacggcgugaucgacacacccugcuggaaacugcauacgucuccucucuguaccacaaauaccaaggagggguccaacaucugccugacacggaccgaucgcggaugguacugugacaaugccggcagcgucucuuucuuuccccaggcggaaacgugcaaggugcagagcaacagaguuuucugugauacaaugaacuccagaacccugccuucugaggugaaucucugcaaugucgacauuuuuaacccgaaauaugauugcaagaucaugaccagcaaaacagacguguccagcucugucauuaccucccugggggccaucgugagcuguuacggaaagacaaaaugcacggcuucuaauaagaaccggggcauuaucaagaccuucuccaaugggugugauuauguuagcaacaaaggaguggacacagucuccgugggcaauacccuuuacuauguuaacaagcaagagggcaaaucucuguacgugaagggggaacccaucauuaacuuuuaugacccucucgucuuccccagcgaugaguuugacgccuccaucucucaggugaaugagaaaauuaaccagagccuggcuuucauccgcaaguccgaugaacugcuccacaaugugaacgccggaaagagcacaaccaauauuaugaucacgaccauuaucaucguuauuaucgucauucugcuuucucugaucgccgugggccuccugcuguacugcaaagcuagaugaggacuagucccuguucccagagcccacuuuuuuuucuuuuuuugaaauaaaauagccugucuuucagaucuaaaaaaaaaaaaaaaaaaaaaaaaaaaaaaaaaaaaaaaaaaaaaaaaaaaaaaaaaaaaaaaaugcaucccccccccccccccccccccccccccccccaaaggcucuuuucagagccaccagaauu

SEQ ID NO: 4266 - RNA, 1813 nt, Artificial Sequence
  mRNA product Design a-5 comprising derived and/or modified sequence from HRSV(A2)__F-del_DSCav1_mut0 (opt6)
gggagacuuucccauucuguagcagaauuugguguugccuguggucuuggucccgcggagaagcuuaccauggaauuacucauccucaaagcaaacgcaauaacaacaauacuaacagcagucacuuucugcuucgcauccggacaaaauaucacagaagaauuuuaccaauccaccugcucugcugucuccaaaggauaccuaucugcccucagaaccgguugguauacaucugucauaaccauagaacuaucaaacauuaaagaaaacaaauguaacggaacagacgcaaaagucaaacuuauaaaacaagaauuagacaaauacaaaaacgcagucacagaauuacaacuacuaaugcaaucaaccccagcaaccggaucaggauccgcaauagcuucaggaguagcaguauguaaaguucuacacuuagaaggagaagucaacaaaauuaaauccgcacuauuaucaaccaacaaagcagucguaucuuuaucaaacggaguaucuguacuuacauucaaaguacuagaccuaaaaaauuacauugauaaacaauuacuaccaauacuaaacaaacaaucauguuccaucucuaacauagaaacaguaauagaauuucaacaaaaaaauaacagauuacuugaaaucacccgagaauuuucaguaaacgcaggaguaaccacacccguaucuacauacaugcuaacaaacucugaacuucugagccuaauaaaugacaugccaauaaccaacgaccaaaaaaaacuaauguccaacaacguacaaauaguacgacaacaaucuuacucaaucaugugcauaaucaaagaagaaguacuagcuuauguaguccaacuuccacucuacggaguaauagacacccccugcuggaaacuacacacaucaccacuaugcacaacaaacacaaaagaaggcucaaacauaugccuaacaagaacugacagaggaugguauugugacaaugcaggcucugucucauucuuuccacaagccgaaacaugcaaaguucaaucaaaccgaguuuucugugacacaaugaacucuagaacucucccaucagaagucaacuuaugcaacguugacauauucaacccaaaauaugacuguaaaauaaugacuuccaaaacugauguaucauccuccgucauaacaucccuaggagcuauuguaucauguuacgggaaaaccaaaugcacagccucaaacaaaaaccgcgguaucauaaaaacauuuucaaacggaugugauuacguaagcaauaaaggaguagacaccguaucaguaggaaauacacuauacuauguaaauaaacaagaaggaaaaucacuauaugucaaaggagaaccaaucauaaauuucuaugacccacuuguauucccauccgaugaauuugacgcaagcauuucacaggucaacgaaaaaauaaaccaaucacuagccuucaucagaaaaucagacgaacuacuacauaacguaaacgccggaaaaucaacaaccaacauaaugauaacaacaaucauaauaguuaucauaguaauacuacuaucucuaauagcugucggacucuuacuauauugcaaagcccgauaaggacuagucccuguucccagagcccacuuuuuuuucuuuuuuugaaauaaaauagccugucuuucagaucuaaaaaaaaaaaaaaaaaaaaaaaaaaaaaaaaaaaaaaaaaaaaaaaaaaaaaaaaaaaaaaaaugcaucccccccccccccccccccccccccccccccaaaggcucuuuucagagccaccagaauu

SEQ ID NO: 4267 - RNA, 1813 nt, Artificial Sequence
  mRNA product Design a-5 comprising derived and/or modified sequence from HRSV(A2)__F-del_DSCav1_mut0 (opt11)
gggagacuuucccauucuguagcagaauuugguguugccuguggucuuggucccgcggagaagcuuaccauggaacuacuaauccugaaagccaacgccauaaccacaauccuuaccgcagucaccuucugcuucgccuccggucaaaacaucacagaagaguucuaccaauccaccuguuccgcagucagcaaaggcuaccucuccgcacuccgaaccggaugguacaccagcgucaucaccaucgaacuauccaacauaaaggaaaauaagugcaaugguacagaugccaaggucaaacucauaaagcaagaacucgacaaauacaaaaacgccgucaccgaacuacaacuacuaaugcaaucuacccccgcaacaggcucagguuccgccauagccuccggcgucgccguuugcaaaguccuccaccucgaaggcgaaguaaacaaaaucaaauccgcccuacucucaaccaacaaagcagucgucucccucucaaacggagucucgguccucaccuucaaaguccucgaccucaaaaacuauauagacaaacaacuccuacccauacucaacaaacaguccugcagcauauccaacaucgaaaccgugaucgaguuccaacagaaaaacaacagacuccucgaaaucacucgagaguucuccguaaacgccggcgucacaaccccagucucaacauacaugcucaccaacagcgaacuccuaucacuaaucaacgacaugccuaucacaaaugaucagaagaaacuaaugagcaacaacguccaaaucguccgccaacaaucauacuccaucaugugcaucauaaaagaagaaguccuagccuacgugguccagcuaccccucuacggcguaauugacaccccuugcuggaaacuacacacuucaccccucugcacaaccaacaccaaagaagguucaaacaucugccucacacgaacagaccgcggcugguacugcgacaacgccggauccguauccuucuucccccaagcagaaaccugcaaaguucaauccaaccggguauucugcgacaccaugaacucaagaacccuucccuccgaaguaaaucuaugcaacgucgacauauucaacccaaaauacgacugcaaaaucaugaccuccaaaaccgaugucuccagcagcgucaucaccagccucggcgccaucgucuccugcuacggcaaaacaaaauguacagcauccaacaaaaaccgaggcauaaucaaaaccuucuccaacgggugcgauuacgucagcaacaaaggcgucgacaccgucuccgugggcaacacccuauacuacgucaacaaacaagaaggcaaaucacuguacguaaagggcgaacccaucaucaacuucuaugacccucugguguucccauccgaugaauuugacgcauccauaucucaggucaacgaaaagaucaaccaaucccucgccuucauacgcaaauccgacgaacuccuacacaacgucaacgcugguaaaagcaccaccaacaucaugaucaccacaaucaucaucgucauaaucguuauccuacucucccuuauagcagucggacuccuccucuacugcaaagcccgcuaaggacuagucccuguucccagagcccacuuuuuuuucuuuuuuugaaauaaaauagccugucuuucagaucuaaaaaaaaaaaaaaaaaaaaaaaaaaaaaaaaaaaaaaaaaaaaaaaaaaaaaaaaaaaaaaaaugcaucccccccccccccccccccccccccccccccaaaggcucuuuucagagccaccagaauu

SEQ ID NO: 4268 - RNA, 1994 nt, Artificial Sequence
  mRNA product Design b-1 comprising derived and/or modified sequence from HRSV(A2)__F-del_DSCav1_mut0 (opt1)
gggagacggagacggccugcaggaccugcucucucagcccucagccgaggccuacgccgagccgagugcgcagccgacgaccgggaggagccgcagccuucaacucugagguacugugauccgcgcugcccgccgggccgccccaguccgcugcugcggcaccuccuucccucgcgcccucuucgcucgccagcgccuucccugugagccugcgucaccgcggccgccaagcuuaccauggagcugcucauccugaaggccaacgccaucaccaccauccugacggcggugaccuucugcuucgccagcggccagaacaucaccgaggaguucuaccaguccacgugcagcgccgucuccaagggguaccucagcgcccugcggaccggcugguacaccuccgugaucaccaucgagcugagcaacaucaaggagaacaagugcaacgggaccgacgccaaggugaagcucaucaagcaggagcuggacaaguacaagaacgcggucacggagcugcagcuccugaugcaguccaccccggcaaccggcuccggcuccgccaucgcgagcggcgucgccgugugcaaggugcugcaccucgagggggaggucaacaagaucaagagcgcccugcuguccaccaacaaggccguggugagccucuccaacggcgucagcgugcugaccuucaaggugcuggaccucaagaacuacaucgacaagcagcugcugcccauccugaacaagcagagcugcuccaucagcaacaucgagacggugaucgaguuccagcagaagaacaaccggcuccuggagaucacccgcgaguucagcgugaacgccggggucaccacccccguguccacguacaugcugaccaacagcgagcuccugucccugaucaacgacaugccgaucaccaacgaccagaagaagcucaugagcaacaacgugcagaucguccggcagcaguccuacagcaucaugugcaucaucaaggaggaggugcuggcguacgugguccagcugccccucuacggcgugaucgacacccccugcuggaagcugcacacgagcccccugugcaccaccaacaccaaggagggguccaacaucugccucacgcgcaccgaccggggcugguacugcgacaacgccggcagcgucuccuucuucccgcaggccgagaccugcaaggugcagagcaaccgcguguucugcgacaccaugaacucccggacgcugcccagcgagguaaaccucugcaacgucgacaucuucaaccccaaguacgacugcaagaucaugaccuccaagaccgacgugagcuccagcgugaucaccucccugggggccaucgucagcugcuacggcaagacgaagugcaccgccagcaacaagaaccgggggaucaucaagaccuucuccaacggcugcgacuacgugagcaacaagggcguggacaccguguccgucgggaacacccuguacuacgugaacaagcaggagggcaagagccucuacgugaagggggagcccaucaucaacuucuacgacccgcuggucuuccccuccgacgaguucgacgcgagcaucucccaggugaacgagaagaucaaccagagccuggccuucauccgcaaguccgacgagcugcuccacaacgugaacgccggcaagagcacgaccaacaucaugaucaccaccaucaucaucgucaucaucgugauccugcugucccucaucgccguggggcugcugcucuacugcaaggcccggugaggacuaguguccaccugucccuccugggcugcuggauugucucguuuuccugccaaauaaacaggaucagcgcuuuacagaucuaaaaaaaaaaaaaaaaaaaaaaaaaaaaaaaaaaaaaaaaaaaaaaaaaaaaaaaaaaaaaaaaugcaucccccccccccccccccccccccccccccccaaaggcucuuuucagagccaccagaauu

SEQ ID NO: 4269 - RNA, 1994 nt, Artificial Sequence
  mRNA product Design b-1 comprising derived and/or modified sequence from HRSV(A2)__F-del_DSCav1_mut0 (opt1)
gggagacggagacggccugcaggaccugcucucucagcccucagccgaggccuacgccgagccgagugcgcagccgacgaccgggaggagccgcagccuucaacucugagguacugugauccgcgcugcccgccgggccgccccaguccgcugcugcggcaccuccuucccucgcgcccucuucgcucgccagcgccuucccugugagccugcgucaccgcggccgccaagcuuaccauggagcugcucauccugaaggccaacgccaucaccaccauccugacggcggugaccuucugcuucgccagcggccagaacaucaccgaggaguucuaccaguccacgugcagcgccgucuccaagggguaccucagcgcccugcgcaccggcugguacaccuccgugaucaccaucgagcugagcaacaucaaggagaacaagugcaacgggaccgacgccaaggugaagcucaucaagcaggagcuggacaaguacaagaacgcggucacggagcugcagcuccugaugcaguccacccccgccaccggcagcggguccgccaucgccagcggcguggcggugugcaagguccugcaccucgagggcgaggugaacaagaucaaguccgcccugcugagcaccaacaaggccguggucucccucagcaacgggguguccgugcugacguucaagguccuggaccucaagaacuacaucgacaagcagcugcugccgauccucaacaagcagagcugcuccaucagcaacaucgagaccgugaucgaguuccagcagaagaacaaccggcugcuggagaucacccgcgaguucuccgugaacgccggcgucaccacgcccgugagcaccuacaugcucaccaacagcgagcugcugucccucaucaacgacaugcccaucaccaacgaccagaagaagcugaugagcaacaacgugcagaucguccggcagcaguccuacagcaucaugugcaucaucaaggaggaggugcuggccuacgugguccagcucccccuguacggggugaucgacacgccgugcuggaagcugcacaccagcccccucugcaccaccaacacgaaggagggcuccaacaucugccugacccgcaccgaccgggggugguacugcgacaacgcgggcuccgugagcuucuucccccaggccgagaccugcaagguccaguccaaccgcguguucugcgacacgaugaacagccggacccuccccuccgaggucaaccugugcaacguggacaucuucaacccgaaguacgacugcaagaucaugaccagcaagaccgacguguccagcuccgucaucacgagccugggcgccaucguguccugcuacgggaagaccaagugcaccgccagcaacaagaaccggggcaucaucaagaccuucuccaacgggugcgacuacgugagcaacaagggcgucgacacggugagcgugggcaacacccucuacuacgucaacaagcaggaggggaagucccuguacgugaagggcgagcccaucaucaacuucuacgacccccugguguuccccagcgacgaguucgacgccuccaucagccaggucaacgagaagaucaaccagucccucgcguucauccgcaagagcgacgagcugcugcacaacgugaacgccgggaaguccaccaccaacaucaugaucaccacgaucaucaucgugaucaucgucauccuccugagccugaucgccgugggccuccugcuguacugcaaggcccggugaggacuaguguccaccugucccuccugggcugcuggauugucucguuuuccugccaaauaaacaggaucagcgcuuuacagaucuaaaaaaaaaaaaaaaaaaaaaaaaaaaaaaaaaaaaaaaaaaaaaaaaaaaaaaaaaaaaaaaaugcaucccccccccccccccccccccccccccccccaaaggcucuuuucagagccaccagaauu

SEQ ID NO: 4270 - RNA, 1994 nt, Artificial Sequence
  mRNA product Design b-1 comprising derived and/or modified sequence from HRSV(A2)__F-del_DSCav1_mut0 (opt2)
gggagacggagacggccugcaggaccugcucucucagcccucagccgaggccuacgccgagccgagugcgcagccgacgaccgggaggagccgcagccuucaacucugagguacugugauccgcgcugcccgccgggccgccccaguccgcugcugcggcaccuccuucccucgcgcccucuucgcucgccagcgccuucccugugagccugcgucaccgcggccgccaagcuuaccauggagcuccucauccucaaggccaacgccaucaccaccauccucaccgccgucaccuucugcuucgccuccggccagaacaucaccgaggaguucuaccaguccaccugcuccgccgucuccaagggcuaccucuccgcccuccgcaccggcugguacaccuccgucaucaccaucgagcucuccaacaucaaggagaacaagugcaacggcaccgacgccaaggucaagcucaucaagcaggagcucgacaaguacaagaacgccgucaccgagcuccagcuccucaugcaguccacccccgccaccggcuccggcuccgccaucgccuccggcgucgccgucugcaagguccuccaccucgagggcgaggucaacaagaucaaguccgcccuccucuccaccaacaaggccgucgucucccucuccaacggcgucuccguccucaccuucaagguccucgaccucaagaacuacaucgacaagcagcuccuccccauccucaacaagcaguccugcuccaucuccaacaucgagaccgucaucgaguuccagcagaagaacaaccgccuccucgagaucacccgcgaguucuccgucaacgccggcgucaccacccccgucuccaccuacaugcucaccaacuccgagcuccucucccucaucaacgacaugcccaucaccaacgaccagaagaagcucauguccaacaacguccagaucguccgccagcaguccuacuccaucaugugcaucaucaaggaggagguccucgccuacgucguccagcucccccucuacggcgucaucgacacccccugcuggaagcuccacaccuccccccucugcaccaccaacaccaaggagggcuccaacaucugccucacccgcaccgaccgcggcugguacugcgacaacgccggcuccgucuccuucuucccccaggccgagaccugcaagguccaguccaaccgcgucuucugcgacaccaugaacucccgcacccuccccuccgaggucaaccucugcaacgucgacaucuucaaccccaaguacgacugcaagaucaugaccuccaagaccgacgucuccuccuccgucaucaccucccucggcgccaucgucuccugcuacggcaagaccaagugcaccgccuccaacaagaaccgcggcaucaucaagaccuucuccaacggcugcgacuacgucuccaacaagggcgucgacaccgucuccgucggcaacacccucuacuacgucaacaagcaggagggcaagucccucuacgucaagggcgagcccaucaucaacuucuacgacccccucgucuuccccuccgacgaguucgacgccuccaucucccaggucaacgagaagaucaaccagucccucgccuucauccgcaaguccgacgagcuccuccacaacgucaacgccggcaaguccaccaccaacaucaugaucaccaccaucaucaucgucaucaucgucauccuccucucccucaucgccgucggccuccuccucuacugcaaggcccgcugaggacuaguguccaccugucccuccugggcugcuggauugucucguuuuccugccaaauaaacaggaucagcgcuuuacagaucuaaaaaaaaaaaaaaaaaaaaaaaaaaaaaaaaaaaaaaaaaaaaaaaaaaaaaaaaaaaaaaaaugcaucccccccccccccccccccccccccccccccaaaggcucuuuucagagccaccagaauu

SEQ ID NO: 4271 - RNA, 1994 nt, Artificial Sequence
  mRNA product Design b-1 comprising derived and/or modified sequence from HRSV(A2)__F-del_DSCav1_mut0 (opt3)
gggagacggagacggccugcaggaccugcucucucagcccucagccgaggccuacgccgagccgagugcgcagccgacgaccgggaggagccgcagccuucaacucugagguacugugauccgcgcugcccgccgggccgccccaguccgcugcugcggcaccuccuucccucgcgcccucuucgcucgccagcgccuucccugugagccugcgucaccgcggccgccaagcuuaccauggagcugcucauccuuaaggccaacgcuauuaccacaauacugacugcagugacguucugcuuugccagcggccagaauaucaccgaagaguucuaccaauccacauguucugcggucucaaaaggguauuugagugcuuuaagaacuggaugguacaccagcguuauuacaaucgaacuguccaacauuaaggagaauaaaugcaacgguaccgacgccaaggugaaacuaaucaagcaggaacucgauaaguauaaaaaugcaguaacugagcugcagcuucugaugcagucuacacccgccaccggcucggggucagcuauagcaagcggaguggccgucuguaagguguugcaccucgagggcgaaguuaacaaaaucaagagugcucugcuguccacgaauaaagccguggucucucucagcaacgguguguccguauuaacuuuuaagguucuggaccuuaagaauuacauugauaaacaauugcugccuauccuaaacaagcagucaugcaguauuagcaauaucgagaccgugauagaguuccagcagaaaaacaauaggcuccuggaaauuacacgggaguuuucugucaacgcgggggugacuaccccaguguccacauauaugcuuaccaauucagaacuguugagccucaucaacgacaugccgauuacgaacgaucaaaagaaacugaugaguaauaacguccagaucguucgccagcagucuuacuccaucauguguauuauaaaggaggaaguguuagcauauguagugcaacugccccucuacggagucaucgacacuccuugcuggaaacuucauacaagcccacuguguaccacuaauacaaaggagggcucgaacauuugcuugacccgaacggaucguggcugguacugugacaaugccgggucuguguccuucuuuccccaggcugaaaccugcaagguucagucaaacagaguguucugugauacaaugaauaguagaacucugccuagcgaggucaaccucugcaauguggacaucuuuaacccaaaauaugauugcaagauaaugaccuccaaaacagacguaucuagcucaguuauuaccagucugggagccaucguguccuguuacgguaagacuaaaugcacagcaagcaauaagaacaggggcaucauuaagaccuucucuaaugggugugauuaugucucaaacaaaggaguggacacugucagugugggcaauacgcuuuacuauguuaacaagcaagaggguaaaagccuguacgugaagggggaacccaucauuaacuuuuaugacccuuugguauucccauccgaugaguuugacgcuucuauaucgcaggucaaugagaaaaucaaccagagccucgccuucauucggaaguccgaugaacuguuacacaaugugaacgcgggaaagucaacaaccaauaucaugaucacuaccauuauaaucguuauuaucgugauucugcuaagucucaucgccgucggccugcuuuuguacugcaaagcacgcugaggacuaguguccaccugucccuccugggcugcuggauugucucguuuuccugccaaauaaacaggaucagcgcuuuacagaucuaaaaaaaaaaaaaaaaaaaaaaaaaaaaaaaaaaaaaaaaaaaaaaaaaaaaaaaaaaaaaaaaugcaucccccccccccccccccccccccccccccccaaaggcucuuuucagagccaccagaauu

SEQ ID NO: 4272 - RNA, 1994 nt, Artificial Sequence
  mRNA product Design b-1 comprising derived and/or modified sequence from HRSV(A2)__F-del_DSCav1_mut0 (opt4)
gggagacggagacggccugcaggaccugcucucucagcccucagccgaggccuacgccgagccgagugcgcagccgacgaccgggaggagccgcagccuucaacucugagguacugugauccgcgcugcccgccgggccgccccaguccgcugcugcggcaccuccuucccucgcgcccucuucgcucgccagcgccuucccugugagccugcgucaccgcggccgccaagcuuaccauggagcugcugauccugaaggccaacgccaucaccaccauccugaccgccgugaccuucugcuucgccagcggccagaacaucaccgaggaguucuaccagagcaccugcagcgccgugagcaagggcuaccugagcgcccugagaaccggcugguacaccagcgugaucaccaucgagcugagcaacaucaaggagaacaagugcaacggcaccgacgccaaggugaagcugaucaagcaggagcuggacaaguacaagaacgccgugaccgagcugcagcugcugaugcagagcacccccgccaccggcagcggcagcgccaucgccagcggcguggccgugugcaaggugcugcaccuggagggcgaggugaacaagaucaagagcgcccugcugagcaccaacaaggccguggugagccugagcaacggcgugagcgugcugaccuucaaggugcuggaccugaagaacuacaucgacaagcagcugcugcccauccugaacaagcagagcugcagcaucagcaacaucgagaccgugaucgaguuccagcagaagaacaacagacugcuggagaucaccagagaguucagcgugaacgccggcgugaccacccccgugagcaccuacaugcugaccaacagcgagcugcugagccugaucaacgacaugcccaucaccaacgaccagaagaagcugaugagcaacaacgugcagaucgugagacagcagagcuacagcaucaugugcaucaucaaggaggaggugcuggccuacguggugcagcugccccuguacggcgugaucgacacccccugcuggaagcugcacaccagcccccugugcaccaccaacaccaaggagggcagcaacaucugccugaccagaaccgacagaggcugguacugcgacaacgccggcagcgugagcuucuucccccaggccgagaccugcaaggugcagagcaacagaguguucugcgacaccaugaacagcagaacccugcccagcgaggugaaccugugcaacguggacaucuucaaccccaaguacgacugcaagaucaugaccagcaagaccgacgugagcagcagcgugaucaccagccugggcgccaucgugagcugcuacggcaagaccaagugcaccgccagcaacaagaacagaggcaucaucaagaccuucagcaacggcugcgacuacgugagcaacaagggcguggacaccgugagcgugggcaacacccuguacuacgugaacaagcaggagggcaagagccuguacgugaagggcgagcccaucaucaacuucuacgacccccugguguuccccagcgacgaguucgacgccagcaucagccaggugaacgagaagaucaaccagagccuggccuucaucagaaagagcgacgagcugcugcacaacgugaacgccggcaagagcaccaccaacaucaugaucaccaccaucaucaucgugaucaucgugauccugcugagccugaucgccgugggccugcugcuguacugcaaggccagaugaggacuaguguccaccugucccuccugggcugcuggauugucucguuuuccugccaaauaaacaggaucagcgcuuuacagaucuaaaaaaaaaaaaaaaaaaaaaaaaaaaaaaaaaaaaaaaaaaaaaaaaaaaaaaaaaaaaaaaaugcaucccccccccccccccccccccccccccccccaaaggcucuuuucagagccaccagaauu

SEQ ID NO: 4273 - RNA, 1994 nt, Artificial Sequence
  mRNA product Design b-1 comprising derived and/or modified sequence from HRSV(A2)__F-del_DSCav1_mut0 (opt5)
gggagacggagacggccugcaggaccugcucucucagcccucagccgaggccuacgccgagccgagugcgcagccgacgaccgggaggagccgcagccuucaacucugagguacugugauccgcgcugcccgccgggccgccccaguccgcugcugcggcaccuccuucccucgcgcccucuucgcucgccagcgccuucccugugagccugcgucaccgcggccgccaagcuuaccauggagcugcucauccugaaggccaacgcuauuaccacaauccuuacggccgugaccuucugcuuugcgagcggccagaauauuacagaagaguucuaccaauccaccuguucugcugucagcaaaggguaucuguccgcccucagaacaggaugguacaccucuguuaucacaauugaacugagcaacaucaaggagaauaaaugcaacggcaccgacgccaaggugaaacuuaucaagcaggaacuggauaaguauaaaaaugcugugacggagcuccagcugcugaugcaguccacccccgccacagggucuggaagcgcuauugccuccggcgucgcgguguguaagguucuccaccuggagggggaagugaacaaaaucaagagcgcccuucugucuaccaauaaagcugucgugucccucagcaacggaguuucugugcugacauuuaagguccuugaccugaagaauuacauugauaaacaacuccugccuauccugaacaagcaguccugcagcauuucuaauaucgagaccgugauugaguuccagcagaaaaacaaucggcuccuggaaaucacgcgcgaguuuuccgugaacgccggcgucacaaccccgguuagcacauauaugcuuaccaauuccgaacugcucucucugaucaacgacaugcccauuaccaacgaucaaaagaaacuuaugagcaauaacgugcagaucgugagacagcaguccuacagcauuauguguaucauuaaggaggaaguccuggcuuaugugguucaacucccucuguacggcgugaucgacacacccugcuggaaacugcauacgucuccucucuguaccacaaauaccaaggagggguccaacaucugccugacacggaccgaucgcggaugguacugugacaaugccggcagcgucucuuucuuuccccaggcggaaacgugcaaggugcagagcaacagaguuuucugugauacaaugaacuccagaacccugccuucugaggugaaucucugcaaugucgacauuuuuaacccgaaauaugauugcaagaucaugaccagcaaaacagacguguccagcucugucauuaccucccugggggccaucgugagcuguuacggaaagacaaaaugcacggcuucuaauaagaaccggggcauuaucaagaccuucuccaaugggugugauuauguuagcaacaaaggaguggacacagucuccgugggcaauacccuuuacuauguuaacaagcaagagggcaaaucucuguacgugaagggggaacccaucauuaacuuuuaugacccucucgucuuccccagcgaugaguuugacgccuccaucucucaggugaaugagaaaauuaaccagagccuggcuuucauccgcaaguccgaugaacugcuccacaaugugaacgccggaaagagcacaaccaauauuaugaucacgaccauuaucaucguuauuaucgucauucugcuuucucugaucgccgugggccuccugcuguacugcaaagcuagaugaggacuaguguccaccugucccuccugggcugcuggauugucucguuuuccugccaaauaaacaggaucagcgcuuuacagaucuaaaaaaaaaaaaaaaaaaaaaaaaaaaaaaaaaaaaaaaaaaaaaaaaaaaaaaaaaaaaaaaaugcaucccccccccccccccccccccccccccccccaaaggcucuuuucagagccaccagaauu

SEQ ID NO: 4274 - RNA, 1994 nt, Artificial Sequence
  mRNA product Design b-1 comprising derived and/or modified sequence from HRSV(A2)__F-del_DSCav1_mut0 (opt6)
gggagacggagacggccugcaggaccugcucucucagcccucagccgaggccuacgccgagccgagugcgcagccgacgaccgggaggagccgcagccuucaacucugagguacugugauccgcgcugcccgccgggccgccccaguccgcugcugcggcaccuccuucccucgcgcccucuucgcucgccagcgccuucccugugagccugcgucaccgcggccgccaagcuuaccauggaauuacucauccucaaagcaaacgcaauaacaacaauacuaacagcagucacuuucugcuucgcauccggacaaaauaucacagaagaauuuuaccaauccaccugcucugcugucuccaaaggauaccuaucugcccucagaaccgguugguauacaucugucauaaccauagaacuaucaaacauuaaagaaaacaaauguaacggaacagacgcaaaagucaaacuuauaaaacaagaauuagacaaauacaaaaacgcagucacagaauuacaacuacuaaugcaaucaaccccagcaaccggaucaggauccgcaauagcuucaggaguagcaguauguaaaguucuacacuuagaaggagaagucaacaaaauuaaauccgcacuauuaucaaccaacaaagcagucguaucuuuaucaaacggaguaucuguacuuacauucaaaguacuagaccuaaaaaauuacauugauaaacaauuacuaccaauacuaaacaaacaaucauguuccaucucuaacauagaaacaguaauagaauuucaacaaaaaaauaacagauuacuugaaaucacccgagaauuuucaguaaacgcaggaguaaccacacccguaucuacauacaugcuaacaaacucugaacuucugagccuaauaaaugacaugccaauaaccaacgaccaaaaaaaacuaauguccaacaacguacaaauaguacgacaacaaucuuacucaaucaugugcauaaucaaagaagaaguacuagcuuauguaguccaacuuccacucuacggaguaauagacacccccugcuggaaacuacacacaucaccacuaugcacaacaaacacaaaagaaggcucaaacauaugccuaacaagaacugacagaggaugguauugugacaaugcaggcucugucucauucuuuccacaagccgaaacaugcaaaguucaaucaaaccgaguuuucugugacacaaugaacucuagaacucucccaucagaagucaacuuaugcaacguugacauauucaacccaaaauaugacuguaaaauaaugacuuccaaaacugauguaucauccuccgucauaacaucccuaggagcuauuguaucauguuacgggaaaaccaaaugcacagccucaaacaaaaaccgcgguaucauaaaaacauuuucaaacggaugugauuacguaagcaauaaaggaguagacaccguaucaguaggaaauacacuauacuauguaaauaaacaagaaggaaaaucacuauaugucaaaggagaaccaaucauaaauuucuaugacccacuuguauucccauccgaugaauuugacgcaagcauuucacaggucaacgaaaaaauaaaccaaucacuagccuucaucagaaaaucagacgaacuacuacauaacguaaacgccggaaaaucaacaaccaacauaaugauaacaacaaucauaauaguuaucauaguaauacuacuaucucuaauagcugucggacucuuacuauauugcaaagcccgauaaggacuaguguccaccugucccuccugggcugcuggauugucucguuuuccugccaaauaaacaggaucagcgcuuuacagaucuaaaaaaaaaaaaaaaaaaaaaaaaaaaaaaaaaaaaaaaaaaaaaaaaaaaaaaaaaaaaaaaaugcaucccccccccccccccccccccccccccccccaaaggcucuuuucagagccaccagaauu

SEQ ID NO: 4275 - RNA, 1994 nt, Artificial Sequence
  mRNA product Design b-1 comprising derived and/or modified sequence from HRSV(A2)__F-del_DSCav1_mut0 (opt11)
gggagacggagacggccugcaggaccugcucucucagcccucagccgaggccuacgccgagccgagugcgcagccgacgaccgggaggagccgcagccuucaacucugagguacugugauccgcgcugcccgccgggccgccccaguccgcugcugcggcaccuccuucccucgcgcccucuucgcucgccagcgccuucccugugagccugcgucaccgcggccgccaagcuuaccauggaacuacuaauccugaaagccaacgccauaaccacaauccuuaccgcagucaccuucugcuucgccuccggucaaaacaucacagaagaguucuaccaauccaccuguuccgcagucagcaaaggcuaccucuccgcacuccgaaccggaugguacaccagcgucaucaccaucgaacuauccaacauaaaggaaaauaagugcaaugguacagaugccaaggucaaacucauaaagcaagaacucgacaaauacaaaaacgccgucaccgaacuacaacuacuaaugcaaucuacccccgcaacaggcucagguuccgccauagccuccggcgucgccguuugcaaaguccuccaccucgaaggcgaaguaaacaaaaucaaauccgcccuacucucaaccaacaaagcagucgucucccucucaaacggagucucgguccucaccuucaaaguccucgaccucaaaaacuauauagacaaacaacuccuacccauacucaacaaacaguccugcagcauauccaacaucgaaaccgugaucgaguuccaacagaaaaacaacagacuccucgaaaucacucgagaguucuccguaaacgccggcgucacaaccccagucucaacauacaugcucaccaacagcgaacuccuaucacuaaucaacgacaugccuaucacaaaugaucagaagaaacuaaugagcaacaacguccaaaucguccgccaacaaucauacuccaucaugugcaucauaaaagaagaaguccuagccuacgugguccagcuaccccucuacggcguaauugacaccccuugcuggaaacuacacacuucaccccucugcacaaccaacaccaaagaagguucaaacaucugccucacacgaacagaccgcggcugguacugcgacaacgccggauccguauccuucuucccccaagcagaaaccugcaaaguucaauccaaccggguauucugcgacaccaugaacucaagaacccuucccuccgaaguaaaucuaugcaacgucgacauauucaacccaaaauacgacugcaaaaucaugaccuccaaaaccgaugucuccagcagcgucaucaccagccucggcgccaucgucuccugcuacggcaaaacaaaauguacagcauccaacaaaaaccgaggcauaaucaaaaccuucuccaacgggugcgauuacgucagcaacaaaggcgucgacaccgucuccgugggcaacacccuauacuacgucaacaaacaagaaggcaaaucacuguacguaaagggcgaacccaucaucaacuucuaugacccucugguguucccauccgaugaauuugacgcauccauaucucaggucaacgaaaagaucaaccaaucccucgccuucauacgcaaauccgacgaacuccuacacaacgucaacgcugguaaaagcaccaccaacaucaugaucaccacaaucaucaucgucauaaucguuauccuacucucccuuauagcagucggacuccuccucuacugcaaagcccgcuaaggacuaguguccaccugucccuccugggcugcuggauugucucguuuuccugccaaauaaacaggaucagcgcuuuacagaucuaaaaaaaaaaaaaaaaaaaaaaaaaaaaaaaaaaaaaaaaaaaaaaaaaaaaaaaaaaaaaaaaugcaucccccccccccccccccccccccccccccccaaaggcucuuuucagagccaccagaauu

SEQ ID NO: 4276 - RNA, 1814 nt, Artificial Sequence
  mRNA product Design b-2 comprising derived and/or modified sequence from HRSV(A2)__F-del_DSCav1_mut0 (opt1)
gggagagccucugcuggaguccggggaguggcguuggcugcuagagcgaagcuuaccauggagcugcucauccugaaggccaacgccaucaccaccauccugacggcggugaccuucugcuucgccagcggccagaacaucaccgaggaguucuaccaguccacgugcagcgccgucuccaagggguaccucagcgcccugcggaccggcugguacaccuccgugaucaccaucgagcugagcaacaucaaggagaacaagugcaacgggaccgacgccaaggugaagcucaucaagcaggagcuggacaaguacaagaacgcggucacggagcugcagcuccugaugcaguccaccccggcaaccggcuccggcuccgccaucgcgagcggcgucgccgugugcaaggugcugcaccucgagggggaggucaacaagaucaagagcgcccugcuguccaccaacaaggccguggugagccucuccaacggcgucagcgugcugaccuucaaggugcuggaccucaagaacuacaucgacaagcagcugcugcccauccugaacaagcagagcugcuccaucagcaacaucgagacggugaucgaguuccagcagaagaacaaccggcuccuggagaucacccgcgaguucagcgugaacgccggggucaccacccccguguccacguacaugcugaccaacagcgagcuccugucccugaucaacgacaugccgaucaccaacgaccagaagaagcucaugagcaacaacgugcagaucguccggcagcaguccuacagcaucaugugcaucaucaaggaggaggugcuggcguacgugguccagcugccccucuacggcgugaucgacacccccugcuggaagcugcacacgagcccccugugcaccaccaacaccaaggagggguccaacaucugccucacgcgcaccgaccggggcugguacugcgacaacgccggcagcgucuccuucuucccgcaggccgagaccugcaaggugcagagcaaccgcguguucugcgacaccaugaacucccggacgcugcccagcgagguaaaccucugcaacgucgacaucuucaaccccaaguacgacugcaagaucaugaccuccaagaccgacgugagcuccagcgugaucaccucccugggggccaucgucagcugcuacggcaagacgaagugcaccgccagcaacaagaaccgggggaucaucaagaccuucuccaacggcugcgacuacgugagcaacaagggcguggacaccguguccgucgggaacacccuguacuacgugaacaagcaggagggcaagagccucuacgugaagggggagcccaucaucaacuucuacgacccgcuggucuuccccuccgacgaguucgacgcgagcaucucccaggugaacgagaagaucaaccagagccuggccuucauccgcaaguccgacgagcugcuccacaacgugaacgccggcaagagcacgaccaacaucaugaucaccaccaucaucaucgucaucaucgugauccugcugucccucaucgccguggggcugcugcucuacugcaaggcccggugaggacuaguguccaccugucccuccugggcugcuggauugucucguuuuccugccaaauaaacaggaucagcgcuuuacagaucuaaaaaaaaaaaaaaaaaaaaaaaaaaaaaaaaaaaaaaaaaaaaaaaaaaaaaaaaaaaaaaaaugcaucccccccccccccccccccccccccccccccaaaggcucuuuucagagccaccagaauu

SEQ ID NO: 4277 - RNA, 1814 nt, Artificial Sequence
  mRNA product Design b-2 comprising derived and/or modified sequence from HRSV(A2)__F-del_DSCav1_mut0 (opt1)
gggagagccucugcuggaguccggggaguggcguuggcugcuagagcgaagcuuaccauggagcugcucauccugaaggccaacgccaucaccaccauccugacggcggugaccuucugcuucgccagcggccagaacaucaccgaggaguucuaccaguccacgugcagcgccgucuccaagggguaccucagcgcccugcgcaccggcugguacaccuccgugaucaccaucgagcugagcaacaucaaggagaacaagugcaacgggaccgacgccaaggugaagcucaucaagcaggagcuggacaaguacaagaacgcggucacggagcugcagcuccugaugcaguccacccccgccaccggcagcggguccgccaucgccagcggcguggcggugugcaagguccugcaccucgagggcgaggugaacaagaucaaguccgcccugcugagcaccaacaaggccguggucucccucagcaacgggguguccgugcugacguucaagguccuggaccucaagaacuacaucgacaagcagcugcugccgauccucaacaagcagagcugcuccaucagcaacaucgagaccgugaucgaguuccagcagaagaacaaccggcugcuggagaucacccgcgaguucuccgugaacgccggcgucaccacgcccgugagcaccuacaugcucaccaacagcgagcugcugucccucaucaacgacaugcccaucaccaacgaccagaagaagcugaugagcaacaacgugcagaucguccggcagcaguccuacagcaucaugugcaucaucaaggaggaggugcuggccuacgugguccagcucccccuguacggggugaucgacacgccgugcuggaagcugcacaccagcccccucugcaccaccaacacgaaggagggcuccaacaucugccugacccgcaccgaccgggggugguacugcgacaacgcgggcuccgugagcuucuucccccaggccgagaccugcaagguccaguccaaccgcguguucugcgacacgaugaacagccggacccuccccuccgaggucaaccugugcaacguggacaucuucaacccgaaguacgacugcaagaucaugaccagcaagaccgacguguccagcuccgucaucacgagccugggcgccaucguguccugcuacgggaagaccaagugcaccgccagcaacaagaaccggggcaucaucaagaccuucuccaacgggugcgacuacgugagcaacaagggcgucgacacggugagcgugggcaacacccucuacuacgucaacaagcaggaggggaagucccuguacgugaagggcgagcccaucaucaacuucuacgacccccugguguuccccagcgacgaguucgacgccuccaucagccaggucaacgagaagaucaaccagucccucgcguucauccgcaagagcgacgagcugcugcacaacgugaacgccgggaaguccaccaccaacaucaugaucaccacgaucaucaucgugaucaucgucauccuccugagccugaucgccgugggccuccugcuguacugcaaggcccggugaggacuaguguccaccugucccuccugggcugcuggauugucucguuuuccugccaaauaaacaggaucagcgcuuuacagaucuaaaaaaaaaaaaaaaaaaaaaaaaaaaaaaaaaaaaaaaaaaaaaaaaaaaaaaaaaaaaaaaaugcaucccccccccccccccccccccccccccccccaaaggcucuuuucagagccaccagaauu

SEQ ID NO: 4278 - RNA, 1814 nt, Artificial Sequence
  mRNA product Design b-2 comprising derived and/or modified sequence from HRSV(A2)__F-del_DSCav1_mut0 (opt2)
gggagagccucugcuggaguccggggaguggcguuggcugcuagagcgaagcuuaccauggagcuccucauccucaaggccaacgccaucaccaccauccucaccgccgucaccuucugcuucgccuccggccagaacaucaccgaggaguucuaccaguccaccugcuccgccgucuccaagggcuaccucuccgcccuccgcaccggcugguacaccuccgucaucaccaucgagcucuccaacaucaaggagaacaagugcaacggcaccgacgccaaggucaagcucaucaagcaggagcucgacaaguacaagaacgccgucaccgagcuccagcuccucaugcaguccacccccgccaccggcuccggcuccgccaucgccuccggcgucgccgucugcaagguccuccaccucgagggcgaggucaacaagaucaaguccgcccuccucuccaccaacaaggccgucgucucccucuccaacggcgucuccguccucaccuucaagguccucgaccucaagaacuacaucgacaagcagcuccuccccauccucaacaagcaguccugcuccaucuccaacaucgagaccgucaucgaguuccagcagaagaacaaccgccuccucgagaucacccgcgaguucuccgucaacgccggcgucaccacccccgucuccaccuacaugcucaccaacuccgagcuccucucccucaucaacgacaugcccaucaccaacgaccagaagaagcucauguccaacaacguccagaucguccgccagcaguccuacuccaucaugugcaucaucaaggaggagguccucgccuacgucguccagcucccccucuacggcgucaucgacacccccugcuggaagcuccacaccuccccccucugcaccaccaacaccaaggagggcuccaacaucugccucacccgcaccgaccgcggcugguacugcgacaacgccggcuccgucuccuucuucccccaggccgagaccugcaagguccaguccaaccgcgucuucugcgacaccaugaacucccgcacccuccccuccgaggucaaccucugcaacgucgacaucuucaaccccaaguacgacugcaagaucaugaccuccaagaccgacgucuccuccuccgucaucaccucccucggcgccaucgucuccugcuacggcaagaccaagugcaccgccuccaacaagaaccgcggcaucaucaagaccuucuccaacggcugcgacuacgucuccaacaagggcgucgacaccgucuccgucggcaacacccucuacuacgucaacaagcaggagggcaagucccucuacgucaagggcgagcccaucaucaacuucuacgacccccucgucuuccccuccgacgaguucgacgccuccaucucccaggucaacgagaagaucaaccagucccucgccuucauccgcaaguccgacgagcuccuccacaacgucaacgccggcaaguccaccaccaacaucaugaucaccaccaucaucaucgucaucaucgucauccuccucucccucaucgccgucggccuccuccucuacugcaaggcccgcugaggacuaguguccaccugucccuccugggcugcuggauugucucguuuuccugccaaauaaacaggaucagcgcuuuacagaucuaaaaaaaaaaaaaaaaaaaaaaaaaaaaaaaaaaaaaaaaaaaaaaaaaaaaaaaaaaaaaaaaugcaucccccccccccccccccccccccccccccccaaaggcucuuuucagagccaccagaauu

SEQ ID NO: 4279 - RNA, 1814 nt, Artificial Sequence
  mRNA product Design b-2 comprising derived and/or modified sequence from HRSV(A2)__F-del_DSCav1_mut0 (opt3)
gggagagccucugcuggaguccggggaguggcguuggcugcuagagcgaagcuuaccauggagcugcucauccuuaaggccaacgcuauuaccacaauacugacugcagugacguucugcuuugccagcggccagaauaucaccgaagaguucuaccaauccacauguucugcggucucaaaaggguauuugagugcuuuaagaacuggaugguacaccagcguuauuacaaucgaacuguccaacauuaaggagaauaaaugcaacgguaccgacgccaaggugaaacuaaucaagcaggaacucgauaaguauaaaaaugcaguaacugagcugcagcuucugaugcagucuacacccgccaccggcucggggucagcuauagcaagcggaguggccgucuguaagguguugcaccucgagggcgaaguuaacaaaaucaagagugcucugcuguccacgaauaaagccguggucucucucagcaacgguguguccguauuaacuuuuaagguucuggaccuuaagaauuacauugauaaacaauugcugccuauccuaaacaagcagucaugcaguauuagcaauaucgagaccgugauagaguuccagcagaaaaacaauaggcuccuggaaauuacacgggaguuuucugucaacgcgggggugacuaccccaguguccacauauaugcuuaccaauucagaacuguugagccucaucaacgacaugccgauuacgaacgaucaaaagaaacugaugaguaauaacguccagaucguucgccagcagucuuacuccaucauguguauuauaaaggaggaaguguuagcauauguagugcaacugccccucuacggagucaucgacacuccuugcuggaaacuucauacaagcccacuguguaccacuaauacaaaggagggcucgaacauuugcuugacccgaacggaucguggcugguacugugacaaugccgggucuguguccuucuuuccccaggcugaaaccugcaagguucagucaaacagaguguucugugauacaaugaauaguagaacucugccuagcgaggucaaccucugcaauguggacaucuuuaacccaaaauaugauugcaagauaaugaccuccaaaacagacguaucuagcucaguuauuaccagucugggagccaucguguccuguuacgguaagacuaaaugcacagcaagcaauaagaacaggggcaucauuaagaccuucucuaaugggugugauuaugucucaaacaaaggaguggacacugucagugugggcaauacgcuuuacuauguuaacaagcaagaggguaaaagccuguacgugaagggggaacccaucauuaacuuuuaugacccuuugguauucccauccgaugaguuugacgcuucuauaucgcaggucaaugagaaaaucaaccagagccucgccuucauucggaaguccgaugaacuguuacacaaugugaacgcgggaaagucaacaaccaauaucaugaucacuaccauuauaaucguuauuaucgugauucugcuaagucucaucgccgucggccugcuuuuguacugcaaagcacgcugaggacuaguguccaccugucccuccugggcugcuggauugucucguuuuccugccaaauaaacaggaucagcgcuuuacagaucuaaaaaaaaaaaaaaaaaaaaaaaaaaaaaaaaaaaaaaaaaaaaaaaaaaaaaaaaaaaaaaaaugcaucccccccccccccccccccccccccccccccaaaggcucuuuucagagccaccagaauu

SEQ ID NO: 4280 - RNA, 1814 nt, Artificial Sequence
  mRNA product Design b-2 comprising derived and/or modified sequence from HRSV(A2)__F-del_DSCav1_mut0 (opt4)
gggagagccucugcuggaguccggggaguggcguuggcugcuagagcgaagcuuaccauggagcugcugauccugaaggccaacgccaucaccaccauccugaccgccgugaccuucugcuucgccagcggccagaacaucaccgaggaguucuaccagagcaccugcagcgccgugagcaagggcuaccugagcgcccugagaaccggcugguacaccagcgugaucaccaucgagcugagcaacaucaaggagaacaagugcaacggcaccgacgccaaggugaagcugaucaagcaggagcuggacaaguacaagaacgccgugaccgagcugcagcugcugaugcagagcacccccgccaccggcagcggcagcgccaucgccagcggcguggccgugugcaaggugcugcaccuggagggcgaggugaacaagaucaagagcgcccugcugagcaccaacaaggccguggugagccugagcaacggcgugagcgugcugaccuucaaggugcuggaccugaagaacuacaucgacaagcagcugcugcccauccugaacaagcagagcugcagcaucagcaacaucgagaccgugaucgaguuccagcagaagaacaacagacugcuggagaucaccagagaguucagcgugaacgccggcgugaccacccccgugagcaccuacaugcugaccaacagcgagcugcugagccugaucaacgacaugcccaucaccaacgaccagaagaagcugaugagcaacaacgugcagaucgugagacagcagagcuacagcaucaugugcaucaucaaggaggaggugcuggccuacguggugcagcugccccuguacggcgugaucgacacccccugcuggaagcugcacaccagcccccugugcaccaccaacaccaaggagggcagcaacaucugccugaccagaaccgacagaggcugguacugcgacaacgccggcagcgugagcuucuucccccaggccgagaccugcaaggugcagagcaacagaguguucugcgacaccaugaacagcagaacccugcccagcgaggugaaccugugcaacguggacaucuucaaccccaaguacgacugcaagaucaugaccagcaagaccgacgugagcagcagcgugaucaccagccugggcgccaucgugagcugcuacggcaagaccaagugcaccgccagcaacaagaacagaggcaucaucaagaccuucagcaacggcugcgacuacgugagcaacaagggcguggacaccgugagcgugggcaacacccuguacuacgugaacaagcaggagggcaagagccuguacgugaagggcgagcccaucaucaacuucuacgacccccugguguuccccagcgacgaguucgacgccagcaucagccaggugaacgagaagaucaaccagagccuggccuucaucagaaagagcgacgagcugcugcacaacgugaacgccggcaagagcaccaccaacaucaugaucaccaccaucaucaucgugaucaucgugauccugcugagccugaucgccgugggccugcugcuguacugcaaggccagaugaggacuaguguccaccugucccuccugggcugcuggauugucucguuuuccugccaaauaaacaggaucagcgcuuuacagaucuaaaaaaaaaaaaaaaaaaaaaaaaaaaaaaaaaaaaaaaaaaaaaaaaaaaaaaaaaaaaaaaaugcaucccccccccccccccccccccccccccccccaaaggcucuuuucagagccaccagaauu

SEQ ID NO: 4281 - RNA, 1814 nt, Artificial Sequence
  mRNA product Design b-2 comprising derived and/or modified sequence from HRSV(A2)__F-del_DSCav1_mut0 (opt5)
gggagagccucugcuggaguccggggaguggcguuggcugcuagagcgaagcuuaccauggagcugcucauccugaaggccaacgcuauuaccacaauccuuacggccgugaccuucugcuuugcgagcggccagaauauuacagaagaguucuaccaauccaccuguucugcugucagcaaaggguaucuguccgcccucagaacaggaugguacaccucuguuaucacaauugaacugagcaacaucaaggagaauaaaugcaacggcaccgacgccaaggugaaacuuaucaagcaggaacuggauaaguauaaaaaugcugugacggagcuccagcugcugaugcaguccacccccgccacagggucuggaagcgcuauugccuccggcgucgcgguguguaagguucuccaccuggagggggaagugaacaaaaucaagagcgcccuucugucuaccaauaaagcugucgugucccucagcaacggaguuucugugcugacauuuaagguccuugaccugaagaauuacauugauaaacaacuccugccuauccugaacaagcaguccugcagcauuucuaauaucgagaccgugauugaguuccagcagaaaaacaaucggcuccuggaaaucacgcgcgaguuuuccgugaacgccggcgucacaaccccgguuagcacauauaugcuuaccaauuccgaacugcucucucugaucaacgacaugcccauuaccaacgaucaaaagaaacuuaugagcaauaacgugcagaucgugagacagcaguccuacagcauuauguguaucauuaaggaggaaguccuggcuuaugugguucaacucccucuguacggcgugaucgacacacccugcuggaaacugcauacgucuccucucuguaccacaaauaccaaggagggguccaacaucugccugacacggaccgaucgcggaugguacugugacaaugccggcagcgucucuuucuuuccccaggcggaaacgugcaaggugcagagcaacagaguuuucugugauacaaugaacuccagaacccugccuucugaggugaaucucugcaaugucgacauuuuuaacccgaaauaugauugcaagaucaugaccagcaaaacagacguguccagcucugucauuaccucccugggggccaucgugagcuguuacggaaagacaaaaugcacggcuucuaauaagaaccggggcauuaucaagaccuucuccaaugggugugauuauguuagcaacaaaggaguggacacagucuccgugggcaauacccuuuacuauguuaacaagcaagagggcaaaucucuguacgugaagggggaacccaucauuaacuuuuaugacccucucgucuuccccagcgaugaguuugacgccuccaucucucaggugaaugagaaaauuaaccagagccuggcuuucauccgcaaguccgaugaacugcuccacaaugugaacgccggaaagagcacaaccaauauuaugaucacgaccauuaucaucguuauuaucgucauucugcuuucucugaucgccgugggccuccugcuguacugcaaagcuagaugaggacuaguguccaccugucccuccugggcugcuggauugucucguuuuccugccaaauaaacaggaucagcgcuuuacagaucuaaaaaaaaaaaaaaaaaaaaaaaaaaaaaaaaaaaaaaaaaaaaaaaaaaaaaaaaaaaaaaaaugcaucccccccccccccccccccccccccccccccaaaggcucuuuucagagccaccagaauu

SEQ ID NO: 4282 - RNA, 1814 nt, Artificial Sequence
  mRNA product Design b-2 comprising derived and/or modified sequence from HRSV(A2)__F-del_DSCav1_mut0 (opt6)
gggagagccucugcuggaguccggggaguggcguuggcugcuagagcgaagcuuaccauggaauuacucauccucaaagcaaacgcaauaacaacaauacuaacagcagucacuuucugcuucgcauccggacaaaauaucacagaagaauuuuaccaauccaccugcucugcugucuccaaaggauaccuaucugcccucagaaccgguugguauacaucugucauaaccauagaacuaucaaacauuaaagaaaacaaauguaacggaacagacgcaaaagucaaacuuauaaaacaagaauuagacaaauacaaaaacgcagucacagaauuacaacuacuaaugcaaucaaccccagcaaccggaucaggauccgcaauagcuucaggaguagcaguauguaaaguucuacacuuagaaggagaagucaacaaaauuaaauccgcacuauuaucaaccaacaaagcagucguaucuuuaucaaacggaguaucuguacuuacauucaaaguacuagaccuaaaaaauuacauugauaaacaauuacuaccaauacuaaacaaacaaucauguuccaucucuaacauagaaacaguaauagaauuucaacaaaaaaauaacagauuacuugaaaucacccgagaauuuucaguaaacgcaggaguaaccacacccguaucuacauacaugcuaacaaacucugaacuucugagccuaauaaaugacaugccaauaaccaacgaccaaaaaaaacuaauguccaacaacguacaaauaguacgacaacaaucuuacucaaucaugugcauaaucaaagaagaaguacuagcuuauguaguccaacuuccacucuacggaguaauagacacccccugcuggaaacuacacacaucaccacuaugcacaacaaacacaaaagaaggcucaaacauaugccuaacaagaacugacagaggaugguauugugacaaugcaggcucugucucauucuuuccacaagccgaaacaugcaaaguucaaucaaaccgaguuuucugugacacaaugaacucuagaacucucccaucagaagucaacuuaugcaacguugacauauucaacccaaaauaugacuguaaaauaaugacuuccaaaacugauguaucauccuccgucauaacaucccuaggagcuauuguaucauguuacgggaaaaccaaaugcacagccucaaacaaaaaccgcgguaucauaaaaacauuuucaaacggaugugauuacguaagcaauaaaggaguagacaccguaucaguaggaaauacacuauacuauguaaauaaacaagaaggaaaaucacuauaugucaaaggagaaccaaucauaaauuucuaugacccacuuguauucccauccgaugaauuugacgcaagcauuucacaggucaacgaaaaaauaaaccaaucacuagccuucaucagaaaaucagacgaacuacuacauaacguaaacgccggaaaaucaacaaccaacauaaugauaacaacaaucauaauaguuaucauaguaauacuacuaucucuaauagcugucggacucuuacuauauugcaaagcccgauaaggacuaguguccaccugucccuccugggcugcuggauugucucguuuuccugccaaauaaacaggaucagcgcuuuacagaucuaaaaaaaaaaaaaaaaaaaaaaaaaaaaaaaaaaaaaaaaaaaaaaaaaaaaaaaaaaaaaaaaugcaucccccccccccccccccccccccccccccccaaaggcucuuuucagagccaccagaauu

SEQ ID NO: 4283 - RNA, 1814 nt, Artificial Sequence
  mRNA product Design b-2 comprising derived and/or modified sequence from HRSV(A2)__F-del_DSCav1_mut0 (opt11)
gggagagccucugcuggaguccggggaguggcguuggcugcuagagcgaagcuuaccauggaacuacuaauccugaaagccaacgccauaaccacaauccuuaccgcagucaccuucugcuucgccuccggucaaaacaucacagaagaguucuaccaauccaccuguuccgcagucagcaaaggcuaccucuccgcacuccgaaccggaugguacaccagcgucaucaccaucgaacuauccaacauaaaggaaaauaagugcaaugguacagaugccaaggucaaacucauaaagcaagaacucgacaaauacaaaaacgccgucaccgaacuacaacuacuaaugcaaucuacccccgcaacaggcucagguuccgccauagccuccggcgucgccguuugcaaaguccuccaccucgaaggcgaaguaaacaaaaucaaauccgcccuacucucaaccaacaaagcagucgucucccucucaaacggagucucgguccucaccuucaaaguccucgaccucaaaaacuauauagacaaacaacuccuacccauacucaacaaacaguccugcagcauauccaacaucgaaaccgugaucgaguuccaacagaaaaacaacagacuccucgaaaucacucgagaguucuccguaaacgccggcgucacaaccccagucucaacauacaugcucaccaacagcgaacuccuaucacuaaucaacgacaugccuaucacaaaugaucagaagaaacuaaugagcaacaacguccaaaucguccgccaacaaucauacuccaucaugugcaucauaaaagaagaaguccuagccuacgugguccagcuaccccucuacggcguaauugacaccccuugcuggaaacuacacacuucaccccucugcacaaccaacaccaaagaagguucaaacaucugccucacacgaacagaccgcggcugguacugcgacaacgccggauccguauccuucuucccccaagcagaaaccugcaaaguucaauccaaccggguauucugcgacaccaugaacucaagaacccuucccuccgaaguaaaucuaugcaacgucgacauauucaacccaaaauacgacugcaaaaucaugaccuccaaaaccgaugucuccagcagcgucaucaccagccucggcgccaucgucuccugcuacggcaaaacaaaauguacagcauccaacaaaaaccgaggcauaaucaaaaccuucuccaacgggugcgauuacgucagcaacaaaggcgucgacaccgucuccgugggcaacacccuauacuacgucaacaaacaagaaggcaaaucacuguacguaaagggcgaacccaucaucaacuucuaugacccucugguguucccauccgaugaauuugacgcauccauaucucaggucaacgaaaagaucaaccaaucccucgccuucauacgcaaauccgacgaacuccuacacaacgucaacgcugguaaaagcaccaccaacaucaugaucaccacaaucaucaucgucauaaucguuauccuacucucccuuauagcagucggacuccuccucuacugcaaagcccgcuaaggacuaguguccaccugucccuccugggcugcuggauugucucguuuuccugccaaauaaacaggaucagcgcuuuacagaucuaaaaaaaaaaaaaaaaaaaaaaaaaaaaaaaaaaaaaaaaaaaaaaaaaaaaaaaaaaaaaaaaugcaucccccccccccccccccccccccccccccccaaaggcucuuuucagagccaccagaauu

SEQ ID NO: 4284 - RNA, 1834 nt, Artificial Sequence
  mRNA product Design b-3 comprising derived and/or modified sequence from HRSV(A2)__F-del_DSCav1_mut0 (opt1)
gggagagucccgcagucggcguccagcggcucugcuuguucgugugugugucguugcaggccuuauucaagcuuaccauggagcugcucauccugaaggccaacgccaucaccaccauccugacggcggugaccuucugcuucgccagcggccagaacaucaccgaggaguucuaccaguccacgugcagcgccgucuccaagggguaccucagcgcccugcggaccggcugguacaccuccgugaucaccaucgagcugagcaacaucaaggagaacaagugcaacgggaccgacgccaaggugaagcucaucaagcaggagcuggacaaguacaagaacgcggucacggagcugcagcuccugaugcaguccaccccggcaaccggcuccggcuccgccaucgcgagcggcgucgccgugugcaaggugcugcaccucgagggggaggucaacaagaucaagagcgcccugcuguccaccaacaaggccguggugagccucuccaacggcgucagcgugcugaccuucaaggugcuggaccucaagaacuacaucgacaagcagcugcugcccauccugaacaagcagagcugcuccaucagcaacaucgagacggugaucgaguuccagcagaagaacaaccggcuccuggagaucacccgcgaguucagcgugaacgccggggucaccacccccguguccacguacaugcugaccaacagcgagcuccugucccugaucaacgacaugccgaucaccaacgaccagaagaagcucaugagcaacaacgugcagaucguccggcagcaguccuacagcaucaugugcaucaucaaggaggaggugcuggcguacgugguccagcugccccucuacggcgugaucgacacccccugcuggaagcugcacacgagcccccugugcaccaccaacaccaaggagggguccaacaucugccucacgcgcaccgaccggggcugguacugcgacaacgccggcagcgucuccuucuucccgcaggccgagaccugcaaggugcagagcaaccgcguguucugcgacaccaugaacucccggacgcugcccagcgagguaaaccucugcaacgucgacaucuucaaccccaaguacgacugcaagaucaugaccuccaagaccgacgugagcuccagcgugaucaccucccugggggccaucgucagcugcuacggcaagacgaagugcaccgccagcaacaagaaccgggggaucaucaagaccuucuccaacggcugcgacuacgugagcaacaagggcguggacaccguguccgucgggaacacccuguacuacgugaacaagcaggagggcaagagccucuacgugaagggggagcccaucaucaacuucuacgacccgcuggucuuccccuccgacgaguucgacgcgagcaucucccaggugaacgagaagaucaaccagagccuggccuucauccgcaaguccgacgagcugcuccacaacgugaacgccggcaagagcacgaccaacaucaugaucaccaccaucaucaucgucaucaucgugauccugcugucccucaucgccguggggcugcugcucuacugcaaggcccggugaggacuaguguccaccugucccuccugggcugcuggauugucucguuuuccugccaaauaaacaggaucagcgcuuuacagaucuaaaaaaaaaaaaaaaaaaaaaaaaaaaaaaaaaaaaaaaaaaaaaaaaaaaaaaaaaaaaaaaaugcaucccccccccccccccccccccccccccccccaaaggcucuuuucagagccaccagaauu

SEQ ID NO: 4285 - RNA, 1834 nt, Artificial Sequence
  mRNA product Design b-3 comprising derived and/or modified sequence from HRSV(A2)__F-del_DSCav1_mut0 (opt1)
gggagagucccgcagucggcguccagcggcucugcuuguucgugugugugucguugcaggccuuauucaagcuuaccauggagcugcucauccugaaggccaacgccaucaccaccauccugacggcggugaccuucugcuucgccagcggccagaacaucaccgaggaguucuaccaguccacgugcagcgccgucuccaagggguaccucagcgcccugcgcaccggcugguacaccuccgugaucaccaucgagcugagcaacaucaaggagaacaagugcaacgggaccgacgccaaggugaagcucaucaagcaggagcuggacaaguacaagaacgcggucacggagcugcagcuccugaugcaguccacccccgccaccggcagcggguccgccaucgccagcggcguggcggugugcaagguccugcaccucgagggcgaggugaacaagaucaaguccgcccugcugagcaccaacaaggccguggucucccucagcaacgggguguccgugcugacguucaagguccuggaccucaagaacuacaucgacaagcagcugcugccgauccucaacaagcagagcugcuccaucagcaacaucgagaccgugaucgaguuccagcagaagaacaaccggcugcuggagaucacccgcgaguucuccgugaacgccggcgucaccacgcccgugagcaccuacaugcucaccaacagcgagcugcugucccucaucaacgacaugcccaucaccaacgaccagaagaagcugaugagcaacaacgugcagaucguccggcagcaguccuacagcaucaugugcaucaucaaggaggaggugcuggccuacgugguccagcucccccuguacggggugaucgacacgccgugcuggaagcugcacaccagcccccucugcaccaccaacacgaaggagggcuccaacaucugccugacccgcaccgaccgggggugguacugcgacaacgcgggcuccgugagcuucuucccccaggccgagaccugcaagguccaguccaaccgcguguucugcgacacgaugaacagccggacccuccccuccgaggucaaccugugcaacguggacaucuucaacccgaaguacgacugcaagaucaugaccagcaagaccgacguguccagcuccgucaucacgagccugggcgccaucguguccugcuacgggaagaccaagugcaccgccagcaacaagaaccggggcaucaucaagaccuucuccaacgggugcgacuacgugagcaacaagggcgucgacacggugagcgugggcaacacccucuacuacgucaacaagcaggaggggaagucccuguacgugaagggcgagcccaucaucaacuucuacgacccccugguguuccccagcgacgaguucgacgccuccaucagccaggucaacgagaagaucaaccagucccucgcguucauccgcaagagcgacgagcugcugcacaacgugaacgccgggaaguccaccaccaacaucaugaucaccacgaucaucaucgugaucaucgucauccuccugagccugaucgccgugggccuccugcuguacugcaaggcccggugaggacuaguguccaccugucccuccugggcugcuggauugucucguuuuccugccaaauaaacaggaucagcgcuuuacagaucuaaaaaaaaaaaaaaaaaaaaaaaaaaaaaaaaaaaaaaaaaaaaaaaaaaaaaaaaaaaaaaaaugcaucccccccccccccccccccccccccccccccaaaggcucuuuucagagccaccagaauu

SEQ ID NO: 4286 - RNA, 1834 nt, Artificial Sequence
  mRNA product Design b-3 comprising derived and/or modified sequence from HRSV(A2)__F-del_DSCav1_mut0 (opt2)
gggagagucccgcagucggcguccagcggcucugcuuguucgugugugugucguugcaggccuuauucaagcuuaccauggagcuccucauccucaaggccaacgccaucaccaccauccucaccgccgucaccuucugcuucgccuccggccagaacaucaccgaggaguucuaccaguccaccugcuccgccgucuccaagggcuaccucuccgcccuccgcaccggcugguacaccuccgucaucaccaucgagcucuccaacaucaaggagaacaagugcaacggcaccgacgccaaggucaagcucaucaagcaggagcucgacaaguacaagaacgccgucaccgagcuccagcuccucaugcaguccacccccgccaccggcuccggcuccgccaucgccuccggcgucgccgucugcaagguccuccaccucgagggcgaggucaacaagaucaaguccgcccuccucuccaccaacaaggccgucgucucccucuccaacggcgucuccguccucaccuucaagguccucgaccucaagaacuacaucgacaagcagcuccuccccauccucaacaagcaguccugcuccaucuccaacaucgagaccgucaucgaguuccagcagaagaacaaccgccuccucgagaucacccgcgaguucuccgucaacgccggcgucaccacccccgucuccaccuacaugcucaccaacuccgagcuccucucccucaucaacgacaugcccaucaccaacgaccagaagaagcucauguccaacaacguccagaucguccgccagcaguccuacuccaucaugugcaucaucaaggaggagguccucgccuacgucguccagcucccccucuacggcgucaucgacacccccugcuggaagcuccacaccuccccccucugcaccaccaacaccaaggagggcuccaacaucugccucacccgcaccgaccgcggcugguacugcgacaacgccggcuccgucuccuucuucccccaggccgagaccugcaagguccaguccaaccgcgucuucugcgacaccaugaacucccgcacccuccccuccgaggucaaccucugcaacgucgacaucuucaaccccaaguacgacugcaagaucaugaccuccaagaccgacgucuccuccuccgucaucaccucccucggcgccaucgucuccugcuacggcaagaccaagugcaccgccuccaacaagaaccgcggcaucaucaagaccuucuccaacggcugcgacuacgucuccaacaagggcgucgacaccgucuccgucggcaacacccucuacuacgucaacaagcaggagggcaagucccucuacgucaagggcgagcccaucaucaacuucuacgacccccucgucuuccccuccgacgaguucgacgccuccaucucccaggucaacgagaagaucaaccagucccucgccuucauccgcaaguccgacgagcuccuccacaacgucaacgccggcaaguccaccaccaacaucaugaucaccaccaucaucaucgucaucaucgucauccuccucucccucaucgccgucggccuccuccucuacugcaaggcccgcugaggacuaguguccaccugucccuccugggcugcuggauugucucguuuuccugccaaauaaacaggaucagcgcuuuacagaucuaaaaaaaaaaaaaaaaaaaaaaaaaaaaaaaaaaaaaaaaaaaaaaaaaaaaaaaaaaaaaaaaugcaucccccccccccccccccccccccccccccccaaaggcucuuuucagagccaccagaauu

SEQ ID NO: 4287 - RNA, 1834 nt, Artificial Sequence
  mRNA product Design b-3 comprising derived and/or modified sequence from HRSV(A2)__F-del_DSCav1_mut0 (opt3)
gggagagucccgcagucggcguccagcggcucugcuuguucgugugugugucguugcaggccuuauucaagcuuaccauggagcugcucauccuuaaggccaacgcuauuaccacaauacugacugcagugacguucugcuuugccagcggccagaauaucaccgaagaguucuaccaauccacauguucugcggucucaaaaggguauuugagugcuuuaagaacuggaugguacaccagcguuauuacaaucgaacuguccaacauuaaggagaauaaaugcaacgguaccgacgccaaggugaaacuaaucaagcaggaacucgauaaguauaaaaaugcaguaacugagcugcagcuucugaugcagucuacacccgccaccggcucggggucagcuauagcaagcggaguggccgucuguaagguguugcaccucgagggcgaaguuaacaaaaucaagagugcucugcuguccacgaauaaagccguggucucucucagcaacgguguguccguauuaacuuuuaagguucuggaccuuaagaauuacauugauaaacaauugcugccuauccuaaacaagcagucaugcaguauuagcaauaucgagaccgugauagaguuccagcagaaaaacaauaggcuccuggaaauuacacgggaguuuucugucaacgcgggggugacuaccccaguguccacauauaugcuuaccaauucagaacuguugagccucaucaacgacaugccgauuacgaacgaucaaaagaaacugaugaguaauaacguccagaucguucgccagcagucuuacuccaucauguguauuauaaaggaggaaguguuagcauauguagugcaacugccccucuacggagucaucgacacuccuugcuggaaacuucauacaagcccacuguguaccacuaauacaaaggagggcucgaacauuugcuugacccgaacggaucguggcugguacugugacaaugccgggucuguguccuucuuuccccaggcugaaaccugcaagguucagucaaacagaguguucugugauacaaugaauaguagaacucugccuagcgaggucaaccucugcaauguggacaucuuuaacccaaaauaugauugcaagauaaugaccuccaaaacagacguaucuagcucaguuauuaccagucugggagccaucguguccuguuacgguaagacuaaaugcacagcaagcaauaagaacaggggcaucauuaagaccuucucuaaugggugugauuaugucucaaacaaaggaguggacacugucagugugggcaauacgcuuuacuauguuaacaagcaagaggguaaaagccuguacgugaagggggaacccaucauuaacuuuuaugacccuuugguauucccauccgaugaguuugacgcuucuauaucgcaggucaaugagaaaaucaaccagagccucgccuucauucggaaguccgaugaacuguuacacaaugugaacgcgggaaagucaacaaccaauaucaugaucacuaccauuauaaucguuauuaucgugauucugcuaagucucaucgccgucggccugcuuuuguacugcaaagcacgcugaggacuaguguccaccugucccuccugggcugcuggauugucucguuuuccugccaaauaaacaggaucagcgcuuuacagaucuaaaaaaaaaaaaaaaaaaaaaaaaaaaaaaaaaaaaaaaaaaaaaaaaaaaaaaaaaaaaaaaaugcaucccccccccccccccccccccccccccccccaaaggcucuuuucagagccaccagaauu

SEQ ID NO: 4288 - RNA, 1834 nt, Artificial Sequence
  mRNA product Design b-3 comprising derived and/or modified sequence from HRSV(A2)__F-del_DSCav1_mut0 (opt4)
gggagagucccgcagucggcguccagcggcucugcuuguucgugugugugucguugcaggccuuauucaagcuuaccauggagcugcugauccugaaggccaacgccaucaccaccauccugaccgccgugaccuucugcuucgccagcggccagaacaucaccgaggaguucuaccagagcaccugcagcgccgugagcaagggcuaccugagcgcccugagaaccggcugguacaccagcgugaucaccaucgagcugagcaacaucaaggagaacaagugcaacggcaccgacgccaaggugaagcugaucaagcaggagcuggacaaguacaagaacgccgugaccgagcugcagcugcugaugcagagcacccccgccaccggcagcggcagcgccaucgccagcggcguggccgugugcaaggugcugcaccuggagggcgaggugaacaagaucaagagcgcccugcugagcaccaacaaggccguggugagccugagcaacggcgugagcgugcugaccuucaaggugcuggaccugaagaacuacaucgacaagcagcugcugcccauccugaacaagcagagcugcagcaucagcaacaucgagaccgugaucgaguuccagcagaagaacaacagacugcuggagaucaccagagaguucagcgugaacgccggcgugaccacccccgugagcaccuacaugcugaccaacagcgagcugcugagccugaucaacgacaugcccaucaccaacgaccagaagaagcugaugagcaacaacgugcagaucgugagacagcagagcuacagcaucaugugcaucaucaaggaggaggugcuggccuacguggugcagcugccccuguacggcgugaucgacacccccugcuggaagcugcacaccagcccccugugcaccaccaacaccaaggagggcagcaacaucugccugaccagaaccgacagaggcugguacugcgacaacgccggcagcgugagcuucuucccccaggccgagaccugcaaggugcagagcaacagaguguucugcgacaccaugaacagcagaacccugcccagcgaggugaaccugugcaacguggacaucuucaaccccaaguacgacugcaagaucaugaccagcaagaccgacgugagcagcagcgugaucaccagccugggcgccaucgugagcugcuacggcaagaccaagugcaccgccagcaacaagaacagaggcaucaucaagaccuucagcaacggcugcgacuacgugagcaacaagggcguggacaccgugagcgugggcaacacccuguacuacgugaacaagcaggagggcaagagccuguacgugaagggcgagcccaucaucaacuucuacgacccccugguguuccccagcgacgaguucgacgccagcaucagccaggugaacgagaagaucaaccagagccuggccuucaucagaaagagcgacgagcugcugcacaacgugaacgccggcaagagcaccaccaacaucaugaucaccaccaucaucaucgugaucaucgugauccugcugagccugaucgccgugggccugcugcuguacugcaaggccagaugaggacuaguguccaccugucccuccugggcugcuggauugucucguuuuccugccaaauaaacaggaucagcgcuuuacagaucuaaaaaaaaaaaaaaaaaaaaaaaaaaaaaaaaaaaaaaaaaaaaaaaaaaaaaaaaaaaaaaaaugcaucccccccccccccccccccccccccccccccaaaggcucuuuucagagccaccagaauu

SEQ ID NO: 4289 - RNA, 1834 nt, Artificial Sequence
  mRNA product Design b-3 comprising derived and/or modified sequence from HRSV(A2)__F-del_DSCav1_mut0 (opt5)
gggagagucccgcagucggcguccagcggcucugcuuguucgugugugugucguugcaggccuuauucaagcuuaccauggagcugcucauccugaaggccaacgcuauuaccacaauccuuacggccgugaccuucugcuuugcgagcggccagaauauuacagaagaguucuaccaauccaccuguucugcugucagcaaaggguaucuguccgcccucagaacaggaugguacaccucuguuaucacaauugaacugagcaacaucaaggagaauaaaugcaacggcaccgacgccaaggugaaacuuaucaagcaggaacuggauaaguauaaaaaugcugugacggagcuccagcugcugaugcaguccacccccgccacagggucuggaagcgcuauugccuccggcgucgcgguguguaagguucuccaccuggagggggaagugaacaaaaucaagagcgcccuucugucuaccaauaaagcugucgugucccucagcaacggaguuucugugcugacauuuaagguccuugaccugaagaauuacauugauaaacaacuccugccuauccugaacaagcaguccugcagcauuucuaauaucgagaccgugauugaguuccagcagaaaaacaaucggcuccuggaaaucacgcgcgaguuuuccgugaacgccggcgucacaaccccgguuagcacauauaugcuuaccaauuccgaacugcucucucugaucaacgacaugcccauuaccaacgaucaaaagaaacuuaugagcaauaacgugcagaucgugagacagcaguccuacagcauuauguguaucauuaaggaggaaguccuggcuuaugugguucaacucccucuguacggcgugaucgacacacccugcuggaaacugcauacgucuccucucuguaccacaaauaccaaggagggguccaacaucugccugacacggaccgaucgcggaugguacugugacaaugccggcagcgucucuuucuuuccccaggcggaaacgugcaaggugcagagcaacagaguuuucugugauacaaugaacuccagaacccugccuucugaggugaaucucugcaaugucgacauuuuuaacccgaaauaugauugcaagaucaugaccagcaaaacagacguguccagcucugucauuaccucccugggggccaucgugagcuguuacggaaagacaaaaugcacggcuucuaauaagaaccggggcauuaucaagaccuucuccaaugggugugauuauguuagcaacaaaggaguggacacagucuccgugggcaauacccuuuacuauguuaacaagcaagagggcaaaucucuguacgugaagggggaacccaucauuaacuuuuaugacccucucgucuuccccagcgaugaguuugacgccuccaucucucaggugaaugagaaaauuaaccagagccuggcuuucauccgcaaguccgaugaacugcuccacaaugugaacgccggaaagagcacaaccaauauuaugaucacgaccauuaucaucguuauuaucgucauucugcuuucucugaucgccgugggccuccugcuguacugcaaagcuagaugaggacuaguguccaccugucccuccugggcugcuggauugucucguuuuccugccaaauaaacaggaucagcgcuuuacagaucuaaaaaaaaaaaaaaaaaaaaaaaaaaaaaaaaaaaaaaaaaaaaaaaaaaaaaaaaaaaaaaaaugcaucccccccccccccccccccccccccccccccaaaggcucuuuucagagccaccagaauu

SEQ ID NO: 4290 - RNA, 1834 nt, Artificial Sequence
  mRNA product Design b-3 comprising derived and/or modified sequence from HRSV(A2)__F-del_DSCav1_mut0 (opt6)
gggagagucccgcagucggcguccagcggcucugcuuguucgugugugugucguugcaggccuuauucaagcuuaccauggaauuacucauccucaaagcaaacgcaauaacaacaauacuaacagcagucacuuucugcuucgcauccggacaaaauaucacagaagaauuuuaccaauccaccugcucugcugucuccaaaggauaccuaucugcccucagaaccgguugguauacaucugucauaaccauagaacuaucaaacauuaaagaaaacaaauguaacggaacagacgcaaaagucaaacuuauaaaacaagaauuagacaaauacaaaaacgcagucacagaauuacaacuacuaaugcaaucaaccccagcaaccggaucaggauccgcaauagcuucaggaguagcaguauguaaaguucuacacuuagaaggagaagucaacaaaauuaaauccgcacuauuaucaaccaacaaagcagucguaucuuuaucaaacggaguaucuguacuuacauucaaaguacuagaccuaaaaaauuacauugauaaacaauuacuaccaauacuaaacaaacaaucauguuccaucucuaacauagaaacaguaauagaauuucaacaaaaaaauaacagauuacuugaaaucacccgagaauuuucaguaaacgcaggaguaaccacacccguaucuacauacaugcuaacaaacucugaacuucugagccuaauaaaugacaugccaauaaccaacgaccaaaaaaaacuaauguccaacaacguacaaauaguacgacaacaaucuuacucaaucaugugcauaaucaaagaagaaguacuagcuuauguaguccaacuuccacucuacggaguaauagacacccccugcuggaaacuacacacaucaccacuaugcacaacaaacacaaaagaaggcucaaacauaugccuaacaagaacugacagaggaugguauugugacaaugcaggcucugucucauucuuuccacaagccgaaacaugcaaaguucaaucaaaccgaguuuucugugacacaaugaacucuagaacucucccaucagaagucaacuuaugcaacguugacauauucaacccaaaauaugacuguaaaauaaugacuuccaaaacugauguaucauccuccgucauaacaucccuaggagcuauuguaucauguuacgggaaaaccaaaugcacagccucaaacaaaaaccgcgguaucauaaaaacauuuucaaacggaugugauuacguaagcaauaaaggaguagacaccguaucaguaggaaauacacuauacuauguaaauaaacaagaaggaaaaucacuauaugucaaaggagaaccaaucauaaauuucuaugacccacuuguauucccauccgaugaauuugacgcaagcauuucacaggucaacgaaaaaauaaaccaaucacuagccuucaucagaaaaucagacgaacuacuacauaacguaaacgccggaaaaucaacaaccaacauaaugauaacaacaaucauaauaguuaucauaguaauacuacuaucucuaauagcugucggacucuuacuauauugcaaagcccgauaaggacuaguguccaccugucccuccugggcugcuggauugucucguuuuccugccaaauaaacaggaucagcgcuuuacagaucuaaaaaaaaaaaaaaaaaaaaaaaaaaaaaaaaaaaaaaaaaaaaaaaaaaaaaaaaaaaaaaaaugcaucccccccccccccccccccccccccccccccaaaggcucuuuucagagccaccagaauu

SEQ ID NO: 4291 - RNA, 1834 nt, Artificial Sequence
  mRNA product Design b-3 comprising derived and/or modified sequence from HRSV(A2)__F-del_DSCav1_mut0 (opt11)
gggagagucccgcagucggcguccagcggcucugcuuguucgugugugugucguugcaggccuuauucaagcuuaccauggaacuacuaauccugaaagccaacgccauaaccacaauccuuaccgcagucaccuucugcuucgccuccggucaaaacaucacagaagaguucuaccaauccaccuguuccgcagucagcaaaggcuaccucuccgcacuccgaaccggaugguacaccagcgucaucaccaucgaacuauccaacauaaaggaaaauaagugcaaugguacagaugccaaggucaaacucauaaagcaagaacucgacaaauacaaaaacgccgucaccgaacuacaacuacuaaugcaaucuacccccgcaacaggcucagguuccgccauagccuccggcgucgccguuugcaaaguccuccaccucgaaggcgaaguaaacaaaaucaaauccgcccuacucucaaccaacaaagcagucgucucccucucaaacggagucucgguccucaccuucaaaguccucgaccucaaaaacuauauagacaaacaacuccuacccauacucaacaaacaguccugcagcauauccaacaucgaaaccgugaucgaguuccaacagaaaaacaacagacuccucgaaaucacucgagaguucuccguaaacgccggcgucacaaccccagucucaacauacaugcucaccaacagcgaacuccuaucacuaaucaacgacaugccuaucacaaaugaucagaagaaacuaaugagcaacaacguccaaaucguccgccaacaaucauacuccaucaugugcaucauaaaagaagaaguccuagccuacgugguccagcuaccccucuacggcguaauugacaccccuugcuggaaacuacacacuucaccccucugcacaaccaacaccaaagaagguucaaacaucugccucacacgaacagaccgcggcugguacugcgacaacgccggauccguauccuucuucccccaagcagaaaccugcaaaguucaauccaaccggguauucugcgacaccaugaacucaagaacccuucccuccgaaguaaaucuaugcaacgucgacauauucaacccaaaauacgacugcaaaaucaugaccuccaaaaccgaugucuccagcagcgucaucaccagccucggcgccaucgucuccugcuacggcaaaacaaaauguacagcauccaacaaaaaccgaggcauaaucaaaaccuucuccaacgggugcgauuacgucagcaacaaaggcgucgacaccgucuccgugggcaacacccuauacuacgucaacaaacaagaaggcaaaucacuguacguaaagggcgaacccaucaucaacuucuaugacccucugguguucccauccgaugaauuugacgcauccauaucucaggucaacgaaaagaucaaccaaucccucgccuucauacgcaaauccgacgaacuccuacacaacgucaacgcugguaaaagcaccaccaacaucaugaucaccacaaucaucaucgucauaaucguuauccuacucucccuuauagcagucggacuccuccucuacugcaaagcccgcuaaggacuaguguccaccugucccuccugggcugcuggauugucucguuuuccugccaaauaaacaggaucagcgcuuuacagaucuaaaaaaaaaaaaaaaaaaaaaaaaaaaaaaaaaaaaaaaaaaaaaaaaaaaaaaaaaaaaaaaaugcaucccccccccccccccccccccccccccccccaaaggcucuuuucagagccaccagaauu

SEQ ID NO: 4292 - RNA, 1885 nt, Artificial Sequence
  mRNA product Design b-4 comprising derived and/or modified sequence from HRSV(A2)__F-del_DSCav1_mut0 (opt1)
gggagagucccgcagucggcguccagcggcucugcuuguucgugugugugucguugcaggccuuauucaagcuuaccauggagcugcucauccugaaggccaacgccaucaccaccauccugacggcggugaccuucugcuucgccagcggccagaacaucaccgaggaguucuaccaguccacgugcagcgccgucuccaagggguaccucagcgcccugcggaccggcugguacaccuccgugaucaccaucgagcugagcaacaucaaggagaacaagugcaacgggaccgacgccaaggugaagcucaucaagcaggagcuggacaaguacaagaacgcggucacggagcugcagcuccugaugcaguccaccccggcaaccggcuccggcuccgccaucgcgagcggcgucgccgugugcaaggugcugcaccucgagggggaggucaacaagaucaagagcgcccugcuguccaccaacaaggccguggugagccucuccaacggcgucagcgugcugaccuucaaggugcuggaccucaagaacuacaucgacaagcagcugcugcccauccugaacaagcagagcugcuccaucagcaacaucgagacggugaucgaguuccagcagaagaacaaccggcuccuggagaucacccgcgaguucagcgugaacgccggggucaccacccccguguccacguacaugcugaccaacagcgagcuccugucccugaucaacgacaugccgaucaccaacgaccagaagaagcucaugagcaacaacgugcagaucguccggcagcaguccuacagcaucaugugcaucaucaaggaggaggugcuggcguacgugguccagcugccccucuacggcgugaucgacacccccugcuggaagcugcacacgagcccccugugcaccaccaacaccaaggagggguccaacaucugccucacgcgcaccgaccggggcugguacugcgacaacgccggcagcgucuccuucuucccgcaggccgagaccugcaaggugcagagcaaccgcguguucugcgacaccaugaacucccggacgcugcccagcgagguaaaccucugcaacgucgacaucuucaaccccaaguacgacugcaagaucaugaccuccaagaccgacgugagcuccagcgugaucaccucccugggggccaucgucagcugcuacggcaagacgaagugcaccgccagcaacaagaaccgggggaucaucaagaccuucuccaacggcugcgacuacgugagcaacaagggcguggacaccguguccgucgggaacacccuguacuacgugaacaagcaggagggcaagagccucuacgugaagggggagcccaucaucaacuucuacgacccgcuggucuuccccuccgacgaguucgacgcgagcaucucccaggugaacgagaagaucaaccagagccuggccuucauccgcaaguccgacgagcugcuccacaacgugaacgccggcaagagcacgaccaacaucaugaucaccaccaucaucaucgucaucaucgugauccugcugucccucaucgccguggggcugcugcucuacugcaaggcccggugaggacuaguaauaaggaaacuguaugaaugucugugggcaggaagugaagagauccuucuguaaagguuuuuggaauuaugucugcugaauaauaaacuuuuuugaaauaauaaaucugguagaaaaaugagaucuaaaaaaaaaaaaaaaaaaaaaaaaaaaaaaaaaaaaaaaaaaaaaaaaaaaaaaaaaaaaaaaaugcaucccccccccccccccccccccccccccccccaaaggcucuuuucagagccaccagaauu

SEQ ID NO: 4293 - RNA, 1885 nt, Artificial Sequence
  mRNA product Design b-4 comprising derived and/or modified sequence from HRSV(A2)__F-del_DSCav1_mut0 (opt1)
gggagagucccgcagucggcguccagcggcucugcuuguucgugugugugucguugcaggccuuauucaagcuuaccauggagcugcucauccugaaggccaacgccaucaccaccauccugacggcggugaccuucugcuucgccagcggccagaacaucaccgaggaguucuaccaguccacgugcagcgccgucuccaagggguaccucagcgcccugcgcaccggcugguacaccuccgugaucaccaucgagcugagcaacaucaaggagaacaagugcaacgggaccgacgccaaggugaagcucaucaagcaggagcuggacaaguacaagaacgcggucacggagcugcagcuccugaugcaguccacccccgccaccggcagcggguccgccaucgccagcggcguggcggugugcaagguccugcaccucgagggcgaggugaacaagaucaaguccgcccugcugagcaccaacaaggccguggucucccucagcaacgggguguccgugcugacguucaagguccuggaccucaagaacuacaucgacaagcagcugcugccgauccucaacaagcagagcugcuccaucagcaacaucgagaccgugaucgaguuccagcagaagaacaaccggcugcuggagaucacccgcgaguucuccgugaacgccggcgucaccacgcccgugagcaccuacaugcucaccaacagcgagcugcugucccucaucaacgacaugcccaucaccaacgaccagaagaagcugaugagcaacaacgugcagaucguccggcagcaguccuacagcaucaugugcaucaucaaggaggaggugcuggccuacgugguccagcucccccuguacggggugaucgacacgccgugcuggaagcugcacaccagcccccucugcaccaccaacacgaaggagggcuccaacaucugccugacccgcaccgaccgggggugguacugcgacaacgcgggcuccgugagcuucuucccccaggccgagaccugcaagguccaguccaaccgcguguucugcgacacgaugaacagccggacccuccccuccgaggucaaccugugcaacguggacaucuucaacccgaaguacgacugcaagaucaugaccagcaagaccgacguguccagcuccgucaucacgagccugggcgccaucguguccugcuacgggaagaccaagugcaccgccagcaacaagaaccggggcaucaucaagaccuucuccaacgggugcgacuacgugagcaacaagggcgucgacacggugagcgugggcaacacccucuacuacgucaacaagcaggaggggaagucccuguacgugaagggcgagcccaucaucaacuucuacgacccccugguguuccccagcgacgaguucgacgccuccaucagccaggucaacgagaagaucaaccagucccucgcguucauccgcaagagcgacgagcugcugcacaacgugaacgccgggaaguccaccaccaacaucaugaucaccacgaucaucaucgugaucaucgucauccuccugagccugaucgccgugggccuccugcuguacugcaaggcccggugaggacuaguaauaaggaaacuguaugaaugucugugggcaggaagugaagagauccuucuguaaagguuuuuggaauuaugucugcugaauaauaaacuuuuuugaaauaauaaaucugguagaaaaaugagaucuaaaaaaaaaaaaaaaaaaaaaaaaaaaaaaaaaaaaaaaaaaaaaaaaaaaaaaaaaaaaaaaaugcaucccccccccccccccccccccccccccccccaaaggcucuuuucagagccaccagaauu

SEQ ID NO: 4294 - RNA, 1885 nt, Artificial Sequence
  mRNA product Design b-4 comprising derived and/or modified sequence from HRSV(A2)__F-del_DSCav1_mut0 (opt2)
gggagagucccgcagucggcguccagcggcucugcuuguucgugugugugucguugcaggccuuauucaagcuuaccauggagcuccucauccucaaggccaacgccaucaccaccauccucaccgccgucaccuucugcuucgccuccggccagaacaucaccgaggaguucuaccaguccaccugcuccgccgucuccaagggcuaccucuccgcccuccgcaccggcugguacaccuccgucaucaccaucgagcucuccaacaucaaggagaacaagugcaacggcaccgacgccaaggucaagcucaucaagcaggagcucgacaaguacaagaacgccgucaccgagcuccagcuccucaugcaguccacccccgccaccggcuccggcuccgccaucgccuccggcgucgccgucugcaagguccuccaccucgagggcgaggucaacaagaucaaguccgcccuccucuccaccaacaaggccgucgucucccucuccaacggcgucuccguccucaccuucaagguccucgaccucaagaacuacaucgacaagcagcuccuccccauccucaacaagcaguccugcuccaucuccaacaucgagaccgucaucgaguuccagcagaagaacaaccgccuccucgagaucacccgcgaguucuccgucaacgccggcgucaccacccccgucuccaccuacaugcucaccaacuccgagcuccucucccucaucaacgacaugcccaucaccaacgaccagaagaagcucauguccaacaacguccagaucguccgccagcaguccuacuccaucaugugcaucaucaaggaggagguccucgccuacgucguccagcucccccucuacggcgucaucgacacccccugcuggaagcuccacaccuccccccucugcaccaccaacaccaaggagggcuccaacaucugccucacccgcaccgaccgcggcugguacugcgacaacgccggcuccgucuccuucuucccccaggccgagaccugcaagguccaguccaaccgcgucuucugcgacaccaugaacucccgcacccuccccuccgaggucaaccucugcaacgucgacaucuucaaccccaaguacgacugcaagaucaugaccuccaagaccgacgucuccuccuccgucaucaccucccucggcgccaucgucuccugcuacggcaagaccaagugcaccgccuccaacaagaaccgcggcaucaucaagaccuucuccaacggcugcgacuacgucuccaacaagggcgucgacaccgucuccgucggcaacacccucuacuacgucaacaagcaggagggcaagucccucuacgucaagggcgagcccaucaucaacuucuacgacccccucgucuuccccuccgacgaguucgacgccuccaucucccaggucaacgagaagaucaaccagucccucgccuucauccgcaaguccgacgagcuccuccacaacgucaacgccggcaaguccaccaccaacaucaugaucaccaccaucaucaucgucaucaucgucauccuccucucccucaucgccgucggccuccuccucuacugcaaggcccgcugaggacuaguaauaaggaaacuguaugaaugucugugggcaggaagugaagagauccuucuguaaagguuuuuggaauuaugucugcugaauaauaaacuuuuuugaaauaauaaaucugguagaaaaaugagaucuaaaaaaaaaaaaaaaaaaaaaaaaaaaaaaaaaaaaaaaaaaaaaaaaaaaaaaaaaaaaaaaaugcaucccccccccccccccccccccccccccccccaaaggcucuuuucagagccaccagaauu

SEQ ID NO: 4295 - RNA, 1885 nt, Artificial Sequence
  mRNA product Design b-4 comprising derived and/or modified sequence from HRSV(A2)__F-del_DSCav1_mut0 (opt3)
gggagagucccgcagucggcguccagcggcucugcuuguucgugugugugucguugcaggccuuauucaagcuuaccauggagcugcucauccuuaaggccaacgcuauuaccacaauacugacugcagugacguucugcuuugccagcggccagaauaucaccgaagaguucuaccaauccacauguucugcggucucaaaaggguauuugagugcuuuaagaacuggaugguacaccagcguuauuacaaucgaacuguccaacauuaaggagaauaaaugcaacgguaccgacgccaaggugaaacuaaucaagcaggaacucgauaaguauaaaaaugcaguaacugagcugcagcuucugaugcagucuacacccgccaccggcucggggucagcuauagcaagcggaguggccgucuguaagguguugcaccucgagggcgaaguuaacaaaaucaagagugcucugcuguccacgaauaaagccguggucucucucagcaacgguguguccguauuaacuuuuaagguucuggaccuuaagaauuacauugauaaacaauugcugccuauccuaaacaagcagucaugcaguauuagcaauaucgagaccgugauagaguuccagcagaaaaacaauaggcuccuggaaauuacacgggaguuuucugucaacgcgggggugacuaccccaguguccacauauaugcuuaccaauucagaacuguugagccucaucaacgacaugccgauuacgaacgaucaaaagaaacugaugaguaauaacguccagaucguucgccagcagucuuacuccaucauguguauuauaaaggaggaaguguuagcauauguagugcaacugccccucuacggagucaucgacacuccuugcuggaaacuucauacaagcccacuguguaccacuaauacaaaggagggcucgaacauuugcuugacccgaacggaucguggcugguacugugacaaugccgggucuguguccuucuuuccccaggcugaaaccugcaagguucagucaaacagaguguucugugauacaaugaauaguagaacucugccuagcgaggucaaccucugcaauguggacaucuuuaacccaaaauaugauugcaagauaaugaccuccaaaacagacguaucuagcucaguuauuaccagucugggagccaucguguccuguuacgguaagacuaaaugcacagcaagcaauaagaacaggggcaucauuaagaccuucucuaaugggugugauuaugucucaaacaaaggaguggacacugucagugugggcaauacgcuuuacuauguuaacaagcaagaggguaaaagccuguacgugaagggggaacccaucauuaacuuuuaugacccuuugguauucccauccgaugaguuugacgcuucuauaucgcaggucaaugagaaaaucaaccagagccucgccuucauucggaaguccgaugaacuguuacacaaugugaacgcgggaaagucaacaaccaauaucaugaucacuaccauuauaaucguuauuaucgugauucugcuaagucucaucgccgucggccugcuuuuguacugcaaagcacgcugaggacuaguaauaaggaaacuguaugaaugucugugggcaggaagugaagagauccuucuguaaagguuuuuggaauuaugucugcugaauaauaaacuuuuuugaaauaauaaaucugguagaaaaaugagaucuaaaaaaaaaaaaaaaaaaaaaaaaaaaaaaaaaaaaaaaaaaaaaaaaaaaaaaaaaaaaaaaaugcaucccccccccccccccccccccccccccccccaaaggcucuuuucagagccaccagaauu

SEQ ID NO: 4296 - RNA, 1885 nt, Artificial Sequence
  mRNA product Design b-4 comprising derived and/or modified sequence from HRSV(A2)__F-del_DSCav1_mut0 (opt4)
gggagagucccgcagucggcguccagcggcucugcuuguucgugugugugucguugcaggccuuauucaagcuuaccauggagcugcugauccugaaggccaacgccaucaccaccauccugaccgccgugaccuucugcuucgccagcggccagaacaucaccgaggaguucuaccagagcaccugcagcgccgugagcaagggcuaccugagcgcccugagaaccggcugguacaccagcgugaucaccaucgagcugagcaacaucaaggagaacaagugcaacggcaccgacgccaaggugaagcugaucaagcaggagcuggacaaguacaagaacgccgugaccgagcugcagcugcugaugcagagcacccccgccaccggcagcggcagcgccaucgccagcggcguggccgugugcaaggugcugcaccuggagggcgaggugaacaagaucaagagcgcccugcugagcaccaacaaggccguggugagccugagcaacggcgugagcgugcugaccuucaaggugcuggaccugaagaacuacaucgacaagcagcugcugcccauccugaacaagcagagcugcagcaucagcaacaucgagaccgugaucgaguuccagcagaagaacaacagacugcuggagaucaccagagaguucagcgugaacgccggcgugaccacccccgugagcaccuacaugcugaccaacagcgagcugcugagccugaucaacgacaugcccaucaccaacgaccagaagaagcugaugagcaacaacgugcagaucgugagacagcagagcuacagcaucaugugcaucaucaaggaggaggugcuggccuacguggugcagcugccccuguacggcgugaucgacacccccugcuggaagcugcacaccagcccccugugcaccaccaacaccaaggagggcagcaacaucugccugaccagaaccgacagaggcugguacugcgacaacgccggcagcgugagcuucuucccccaggccgagaccugcaaggugcagagcaacagaguguucugcgacaccaugaacagcagaacccugcccagcgaggugaaccugugcaacguggacaucuucaaccccaaguacgacugcaagaucaugaccagcaagaccgacgugagcagcagcgugaucaccagccugggcgccaucgugagcugcuacggcaagaccaagugcaccgccagcaacaagaacagaggcaucaucaagaccuucagcaacggcugcgacuacgugagcaacaagggcguggacaccgugagcgugggcaacacccuguacuacgugaacaagcaggagggcaagagccuguacgugaagggcgagcccaucaucaacuucuacgacccccugguguuccccagcgacgaguucgacgccagcaucagccaggugaacgagaagaucaaccagagccuggccuucaucagaaagagcgacgagcugcugcacaacgugaacgccggcaagagcaccaccaacaucaugaucaccaccaucaucaucgugaucaucgugauccugcugagccugaucgccgugggccugcugcuguacugcaaggccagaugaggacuaguaauaaggaaacuguaugaaugucugugggcaggaagugaagagauccuucuguaaagguuuuuggaauuaugucugcugaauaauaaacuuuuuugaaauaauaaaucugguagaaaaaugagaucuaaaaaaaaaaaaaaaaaaaaaaaaaaaaaaaaaaaaaaaaaaaaaaaaaaaaaaaaaaaaaaaaugcaucccccccccccccccccccccccccccccccaaaggcucuuuucagagccaccagaauu

SEQ ID NO: 4297 - RNA, 1885 nt, Artificial Sequence
  mRNA product Design b-4 comprising derived and/or modified sequence from HRSV(A2)__F-del_DSCav1_mut0 (opt5)
gggagagucccgcagucggcguccagcggcucugcuuguucgugugugugucguugcaggccuuauucaagcuuaccauggagcugcucauccugaaggccaacgcuauuaccacaauccuuacggccgugaccuucugcuuugcgagcggccagaauauuacagaagaguucuaccaauccaccuguucugcugucagcaaaggguaucuguccgcccucagaacaggaugguacaccucuguuaucacaauugaacugagcaacaucaaggagaauaaaugcaacggcaccgacgccaaggugaaacuuaucaagcaggaacuggauaaguauaaaaaugcugugacggagcuccagcugcugaugcaguccacccccgccacagggucuggaagcgcuauugccuccggcgucgcgguguguaagguucuccaccuggagggggaagugaacaaaaucaagagcgcccuucugucuaccaauaaagcugucgugucccucagcaacggaguuucugugcugacauuuaagguccuugaccugaagaauuacauugauaaacaacuccugccuauccugaacaagcaguccugcagcauuucuaauaucgagaccgugauugaguuccagcagaaaaacaaucggcuccuggaaaucacgcgcgaguuuuccgugaacgccggcgucacaaccccgguuagcacauauaugcuuaccaauuccgaacugcucucucugaucaacgacaugcccauuaccaacgaucaaaagaaacuuaugagcaauaacgugcagaucgugagacagcaguccuacagcauuauguguaucauuaaggaggaaguccuggcuuaugugguucaacucccucuguacggcgugaucgacacacccugcuggaaacugcauacgucuccucucuguaccacaaauaccaaggagggguccaacaucugccugacacggaccgaucgcggaugguacugugacaaugccggcagcgucucuuucuuuccccaggcggaaacgugcaaggugcagagcaacagaguuuucugugauacaaugaacuccagaacccugccuucugaggugaaucucugcaaugucgacauuuuuaacccgaaauaugauugcaagaucaugaccagcaaaacagacguguccagcucugucauuaccucccugggggccaucgugagcuguuacggaaagacaaaaugcacggcuucuaauaagaaccggggcauuaucaagaccuucuccaaugggugugauuauguuagcaacaaaggaguggacacagucuccgugggcaauacccuuuacuauguuaacaagcaagagggcaaaucucuguacgugaagggggaacccaucauuaacuuuuaugacccucucgucuuccccagcgaugaguuugacgccuccaucucucaggugaaugagaaaauuaaccagagccuggcuuucauccgcaaguccgaugaacugcuccacaaugugaacgccggaaagagcacaaccaauauuaugaucacgaccauuaucaucguuauuaucgucauucugcuuucucugaucgccgugggccuccugcuguacugcaaagcuagaugaggacuaguaauaaggaaacuguaugaaugucugugggcaggaagugaagagauccuucuguaaagguuuuuggaauuaugucugcugaauaauaaacuuuuuugaaauaauaaaucugguagaaaaaugagaucuaaaaaaaaaaaaaaaaaaaaaaaaaaaaaaaaaaaaaaaaaaaaaaaaaaaaaaaaaaaaaaaaugcaucccccccccccccccccccccccccccccccaaaggcucuuuucagagccaccagaauu

SEQ ID NO: 4298 - RNA, 1885 nt, Artificial Sequence
  mRNA product Design b-4 comprising derived and/or modified sequence from HRSV(A2)__F-del_DSCav1_mut0 (opt6)
gggagagucccgcagucggcguccagcggcucugcuuguucgugugugugucguugcaggccuuauucaagcuuaccauggaauuacucauccucaaagcaaacgcaauaacaacaauacuaacagcagucacuuucugcuucgcauccggacaaaauaucacagaagaauuuuaccaauccaccugcucugcugucuccaaaggauaccuaucugcccucagaaccgguugguauacaucugucauaaccauagaacuaucaaacauuaaagaaaacaaauguaacggaacagacgcaaaagucaaacuuauaaaacaagaauuagacaaauacaaaaacgcagucacagaauuacaacuacuaaugcaaucaaccccagcaaccggaucaggauccgcaauagcuucaggaguagcaguauguaaaguucuacacuuagaaggagaagucaacaaaauuaaauccgcacuauuaucaaccaacaaagcagucguaucuuuaucaaacggaguaucuguacuuacauucaaaguacuagaccuaaaaaauuacauugauaaacaauuacuaccaauacuaaacaaacaaucauguuccaucucuaacauagaaacaguaauagaauuucaacaaaaaaauaacagauuacuugaaaucacccgagaauuuucaguaaacgcaggaguaaccacacccguaucuacauacaugcuaacaaacucugaacuucugagccuaauaaaugacaugccaauaaccaacgaccaaaaaaaacuaauguccaacaacguacaaauaguacgacaacaaucuuacucaaucaugugcauaaucaaagaagaaguacuagcuuauguaguccaacuuccacucuacggaguaauagacacccccugcuggaaacuacacacaucaccacuaugcacaacaaacacaaaagaaggcucaaacauaugccuaacaagaacugacagaggaugguauugugacaaugcaggcucugucucauucuuuccacaagccgaaacaugcaaaguucaaucaaaccgaguuuucugugacacaaugaacucuagaacucucccaucagaagucaacuuaugcaacguugacauauucaacccaaaauaugacuguaaaauaaugacuuccaaaacugauguaucauccuccgucauaacaucccuaggagcuauuguaucauguuacgggaaaaccaaaugcacagccucaaacaaaaaccgcgguaucauaaaaacauuuucaaacggaugugauuacguaagcaauaaaggaguagacaccguaucaguaggaaauacacuauacuauguaaauaaacaagaaggaaaaucacuauaugucaaaggagaaccaaucauaaauuucuaugacccacuuguauucccauccgaugaauuugacgcaagcauuucacaggucaacgaaaaaauaaaccaaucacuagccuucaucagaaaaucagacgaacuacuacauaacguaaacgccggaaaaucaacaaccaacauaaugauaacaacaaucauaauaguuaucauaguaauacuacuaucucuaauagcugucggacucuuacuauauugcaaagcccgauaaggacuaguaauaaggaaacuguaugaaugucugugggcaggaagugaagagauccuucuguaaagguuuuuggaauuaugucugcugaauaauaaacuuuuuugaaauaauaaaucugguagaaaaaugagaucuaaaaaaaaaaaaaaaaaaaaaaaaaaaaaaaaaaaaaaaaaaaaaaaaaaaaaaaaaaaaaaaaugcaucccccccccccccccccccccccccccccccaaaggcucuuuucagagccaccagaauu

SEQ ID NO: 4299 - RNA, 1885 nt, Artificial Sequence
  mRNA product Design b-4 comprising derived and/or modified sequence from HRSV(A2)__F-del_DSCav1_mut0 (opt11)
gggagagucccgcagucggcguccagcggcucugcuuguucgugugugugucguugcaggccuuauucaagcuuaccauggaacuacuaauccugaaagccaacgccauaaccacaauccuuaccgcagucaccuucugcuucgccuccggucaaaacaucacagaagaguucuaccaauccaccuguuccgcagucagcaaaggcuaccucuccgcacuccgaaccggaugguacaccagcgucaucaccaucgaacuauccaacauaaaggaaaauaagugcaaugguacagaugccaaggucaaacucauaaagcaagaacucgacaaauacaaaaacgccgucaccgaacuacaacuacuaaugcaaucuacccccgcaacaggcucagguuccgccauagccuccggcgucgccguuugcaaaguccuccaccucgaaggcgaaguaaacaaaaucaaauccgcccuacucucaaccaacaaagcagucgucucccucucaaacggagucucgguccucaccuucaaaguccucgaccucaaaaacuauauagacaaacaacuccuacccauacucaacaaacaguccugcagcauauccaacaucgaaaccgugaucgaguuccaacagaaaaacaacagacuccucgaaaucacucgagaguucuccguaaacgccggcgucacaaccccagucucaacauacaugcucaccaacagcgaacuccuaucacuaaucaacgacaugccuaucacaaaugaucagaagaaacuaaugagcaacaacguccaaaucguccgccaacaaucauacuccaucaugugcaucauaaaagaagaaguccuagccuacgugguccagcuaccccucuacggcguaauugacaccccuugcuggaaacuacacacuucaccccucugcacaaccaacaccaaagaagguucaaacaucugccucacacgaacagaccgcggcugguacugcgacaacgccggauccguauccuucuucccccaagcagaaaccugcaaaguucaauccaaccggguauucugcgacaccaugaacucaagaacccuucccuccgaaguaaaucuaugcaacgucgacauauucaacccaaaauacgacugcaaaaucaugaccuccaaaaccgaugucuccagcagcgucaucaccagccucggcgccaucgucuccugcuacggcaaaacaaaauguacagcauccaacaaaaaccgaggcauaaucaaaaccuucuccaacgggugcgauuacgucagcaacaaaggcgucgacaccgucuccgugggcaacacccuauacuacgucaacaaacaagaaggcaaaucacuguacguaaagggcgaacccaucaucaacuucuaugacccucugguguucccauccgaugaauuugacgcauccauaucucaggucaacgaaaagaucaaccaaucccucgccuucauacgcaaauccgacgaacuccuacacaacgucaacgcugguaaaagcaccaccaacaucaugaucaccacaaucaucaucgucauaaucguuauccuacucucccuuauagcagucggacuccuccucuacugcaaagcccgcuaaggacuaguaauaaggaaacuguaugaaugucugugggcaggaagugaagagauccuucuguaaagguuuuuggaauuaugucugcugaauaauaaacuuuuuugaaauaauaaaucugguagaaaaaugagaucuaaaaaaaaaaaaaaaaaaaaaaaaaaaaaaaaaaaaaaaaaaaaaaaaaaaaaaaaaaaaaaaaugcaucccccccccccccccccccccccccccccccaaaggcucuuuucagagccaccagaauu

SEQ ID NO: 4300 - RNA, 1947 nt, Artificial Sequence
  mRNA product Design b-5 comprising derived and/or modified sequence from HRSV(A2)__F-del_DSCav1_mut0 (opt1)
gggagacuccugucgggcggaaguaggaggaguagaguuuaaaaacaguacucuuuuuccgguucgggacguaguugaagcaacgacaagccggauaaccgcucuugagacaggaagcuuaccauggagcugcucauccugaaggccaacgccaucaccaccauccugacggcggugaccuucugcuucgccagcggccagaacaucaccgaggaguucuaccaguccacgugcagcgccgucuccaagggguaccucagcgcccugcggaccggcugguacaccuccgugaucaccaucgagcugagcaacaucaaggagaacaagugcaacgggaccgacgccaaggugaagcucaucaagcaggagcuggacaaguacaagaacgcggucacggagcugcagcuccugaugcaguccaccccggcaaccggcuccggcuccgccaucgcgagcggcgucgccgugugcaaggugcugcaccucgagggggaggucaacaagaucaagagcgcccugcuguccaccaacaaggccguggugagccucuccaacggcgucagcgugcugaccuucaaggugcuggaccucaagaacuacaucgacaagcagcugcugcccauccugaacaagcagagcugcuccaucagcaacaucgagacggugaucgaguuccagcagaagaacaaccggcuccuggagaucacccgcgaguucagcgugaacgccggggucaccacccccguguccacguacaugcugaccaacagcgagcuccugucccugaucaacgacaugccgaucaccaacgaccagaagaagcucaugagcaacaacgugcagaucguccggcagcaguccuacagcaucaugugcaucaucaaggaggaggugcuggcguacgugguccagcugccccucuacggcgugaucgacacccccugcuggaagcugcacacgagcccccugugcaccaccaacaccaaggagggguccaacaucugccucacgcgcaccgaccggggcugguacugcgacaacgccggcagcgucuccuucuucccgcaggccgagaccugcaaggugcagagcaaccgcguguucugcgacaccaugaacucccggacgcugcccagcgagguaaaccucugcaacgucgacaucuucaaccccaaguacgacugcaagaucaugaccuccaagaccgacgugagcuccagcgugaucaccucccugggggccaucgucagcugcuacggcaagacgaagugcaccgccagcaacaagaaccgggggaucaucaagaccuucuccaacggcugcgacuacgugagcaacaagggcguggacaccguguccgucgggaacacccuguacuacgugaacaagcaggagggcaagagccucuacgugaagggggagcccaucaucaacuucuacgacccgcuggucuuccccuccgacgaguucgacgcgagcaucucccaggugaacgagaagaucaaccagagccuggccuucauccgcaaguccgacgagcugcuccacaacgugaacgccggcaagagcacgaccaacaucaugaucaccaccaucaucaucgucaucaucgugauccugcugucccucaucgccguggggcugcugcucuacugcaaggcccggugaggacuaguacuggcugcaucucccuuuccucuguccuccauccuucucccaggauggugaagggggaccugguacccagugauccccaccccaggauccuaaaucaugacuuaccugcuaauaaaaacucauuggaaaagugagaagaucuaaaaaaaaaaaaaaaaaaaaaaaaaaaaaaaaaaaaaaaaaaaaaaaaaaaaaaaaaaaaaaaaugcaucccccccccccccccccccccccccccccccaaaggcucuuuucagagccaccagaauu

SEQ ID NO: 4301 - RNA, 1947 nt, Artificial Sequence
  mRNA product Design b-5 comprising derived and/or modified sequence from HRSV(A2)__F-del_DSCav1_mut0 (opt1)
gggagacuccugucgggcggaaguaggaggaguagaguuuaaaaacaguacucuuuuuccgguucgggacguaguugaagcaacgacaagccggauaaccgcucuugagacaggaagcuuaccauggagcugcucauccugaaggccaacgccaucaccaccauccugacggcggugaccuucugcuucgccagcggccagaacaucaccgaggaguucuaccaguccacgugcagcgccgucuccaagggguaccucagcgcccugcgcaccggcugguacaccuccgugaucaccaucgagcugagcaacaucaaggagaacaagugcaacgggaccgacgccaaggugaagcucaucaagcaggagcuggacaaguacaagaacgcggucacggagcugcagcuccugaugcaguccacccccgccaccggcagcggguccgccaucgccagcggcguggcggugugcaagguccugcaccucgagggcgaggugaacaagaucaaguccgcccugcugagcaccaacaaggccguggucucccucagcaacgggguguccgugcugacguucaagguccuggaccucaagaacuacaucgacaagcagcugcugccgauccucaacaagcagagcugcuccaucagcaacaucgagaccgugaucgaguuccagcagaagaacaaccggcugcuggagaucacccgcgaguucuccgugaacgccggcgucaccacgcccgugagcaccuacaugcucaccaacagcgagcugcugucccucaucaacgacaugcccaucaccaacgaccagaagaagcugaugagcaacaacgugcagaucguccggcagcaguccuacagcaucaugugcaucaucaaggaggaggugcuggccuacgugguccagcucccccuguacggggugaucgacacgccgugcuggaagcugcacaccagcccccucugcaccaccaacacgaaggagggcuccaacaucugccugacccgcaccgaccgggggugguacugcgacaacgcgggcuccgugagcuucuucccccaggccgagaccugcaagguccaguccaaccgcguguucugcgacacgaugaacagccggacccuccccuccgaggucaaccugugcaacguggacaucuucaacccgaaguacgacugcaagaucaugaccagcaagaccgacguguccagcuccgucaucacgagccugggcgccaucguguccugcuacgggaagaccaagugcaccgccagcaacaagaaccggggcaucaucaagaccuucuccaacgggugcgacuacgugagcaacaagggcgucgacacggugagcgugggcaacacccucuacuacgucaacaagcaggaggggaagucccuguacgugaagggcgagcccaucaucaacuucuacgacccccugguguuccccagcgacgaguucgacgccuccaucagccaggucaacgagaagaucaaccagucccucgcguucauccgcaagagcgacgagcugcugcacaacgugaacgccgggaaguccaccaccaacaucaugaucaccacgaucaucaucgugaucaucgucauccuccugagccugaucgccgugggccuccugcuguacugcaaggcccggugaggacuaguacuggcugcaucucccuuuccucuguccuccauccuucucccaggauggugaagggggaccugguacccagugauccccaccccaggauccuaaaucaugacuuaccugcuaauaaaaacucauuggaaaagugagaagaucuaaaaaaaaaaaaaaaaaaaaaaaaaaaaaaaaaaaaaaaaaaaaaaaaaaaaaaaaaaaaaaaaugcaucccccccccccccccccccccccccccccccaaaggcucuuuucagagccaccagaauu

SEQ ID NO: 4302 - RNA, 1947 nt, Artificial Sequence
  mRNA product Design b-5 comprising derived and/or modified sequence from HRSV(A2)__F-del_DSCav1_mut0 (opt2)
gggagacuccugucgggcggaaguaggaggaguagaguuuaaaaacaguacucuuuuuccgguucgggacguaguugaagcaacgacaagccggauaaccgcucuugagacaggaagcuuaccauggagcuccucauccucaaggccaacgccaucaccaccauccucaccgccgucaccuucugcuucgccuccggccagaacaucaccgaggaguucuaccaguccaccugcuccgccgucuccaagggcuaccucuccgcccuccgcaccggcugguacaccuccgucaucaccaucgagcucuccaacaucaaggagaacaagugcaacggcaccgacgccaaggucaagcucaucaagcaggagcucgacaaguacaagaacgccgucaccgagcuccagcuccucaugcaguccacccccgccaccggcuccggcuccgccaucgccuccggcgucgccgucugcaagguccuccaccucgagggcgaggucaacaagaucaaguccgcccuccucuccaccaacaaggccgucgucucccucuccaacggcgucuccguccucaccuucaagguccucgaccucaagaacuacaucgacaagcagcuccuccccauccucaacaagcaguccugcuccaucuccaacaucgagaccgucaucgaguuccagcagaagaacaaccgccuccucgagaucacccgcgaguucuccgucaacgccggcgucaccacccccgucuccaccuacaugcucaccaacuccgagcuccucucccucaucaacgacaugcccaucaccaacgaccagaagaagcucauguccaacaacguccagaucguccgccagcaguccuacuccaucaugugcaucaucaaggaggagguccucgccuacgucguccagcucccccucuacggcgucaucgacacccccugcuggaagcuccacaccuccccccucugcaccaccaacaccaaggagggcuccaacaucugccucacccgcaccgaccgcggcugguacugcgacaacgccggcuccgucuccuucuucccccaggccgagaccugcaagguccaguccaaccgcgucuucugcgacaccaugaacucccgcacccuccccuccgaggucaaccucugcaacgucgacaucuucaaccccaaguacgacugcaagaucaugaccuccaagaccgacgucuccuccuccgucaucaccucccucggcgccaucgucuccugcuacggcaagaccaagugcaccgccuccaacaagaaccgcggcaucaucaagaccuucuccaacggcugcgacuacgucuccaacaagggcgucgacaccgucuccgucggcaacacccucuacuacgucaacaagcaggagggcaagucccucuacgucaagggcgagcccaucaucaacuucuacgacccccucgucuuccccuccgacgaguucgacgccuccaucucccaggucaacgagaagaucaaccagucccucgccuucauccgcaaguccgacgagcuccuccacaacgucaacgccggcaaguccaccaccaacaucaugaucaccaccaucaucaucgucaucaucgucauccuccucucccucaucgccgucggccuccuccucuacugcaaggcccgcugaggacuaguacuggcugcaucucccuuuccucuguccuccauccuucucccaggauggugaagggggaccugguacccagugauccccaccccaggauccuaaaucaugacuuaccugcuaauaaaaacucauuggaaaagugagaagaucuaaaaaaaaaaaaaaaaaaaaaaaaaaaaaaaaaaaaaaaaaaaaaaaaaaaaaaaaaaaaaaaaugcaucccccccccccccccccccccccccccccccaaaggcucuuuucagagccaccagaauu

SEQ ID NO: 4303 - RNA, 1947 nt, Artificial Sequence
  mRNA product Design b-5 comprising derived and/or modified sequence from HRSV(A2)__F-del_DSCav1_mut0 (opt3)
gggagacuccugucgggcggaaguaggaggaguagaguuuaaaaacaguacucuuuuuccgguucgggacguaguugaagcaacgacaagccggauaaccgcucuugagacaggaagcuuaccauggagcugcucauccuuaaggccaacgcuauuaccacaauacugacugcagugacguucugcuuugccagcggccagaauaucaccgaagaguucuaccaauccacauguucugcggucucaaaaggguauuugagugcuuuaagaacuggaugguacaccagcguuauuacaaucgaacuguccaacauuaaggagaauaaaugcaacgguaccgacgccaaggugaaacuaaucaagcaggaacucgauaaguauaaaaaugcaguaacugagcugcagcuucugaugcagucuacacccgccaccggcucggggucagcuauagcaagcggaguggccgucuguaagguguugcaccucgagggcgaaguuaacaaaaucaagagugcucugcuguccacgaauaaagccguggucucucucagcaacgguguguccguauuaacuuuuaagguucuggaccuuaagaauuacauugauaaacaauugcugccuauccuaaacaagcagucaugcaguauuagcaauaucgagaccgugauagaguuccagcagaaaaacaauaggcuccuggaaauuacacgggaguuuucugucaacgcgggggugacuaccccaguguccacauauaugcuuaccaauucagaacuguugagccucaucaacgacaugccgauuacgaacgaucaaaagaaacugaugaguaauaacguccagaucguucgccagcagucuuacuccaucauguguauuauaaaggaggaaguguuagcauauguagugcaacugccccucuacggagucaucgacacuccuugcuggaaacuucauacaagcccacuguguaccacuaauacaaaggagggcucgaacauuugcuugacccgaacggaucguggcugguacugugacaaugccgggucuguguccuucuuuccccaggcugaaaccugcaagguucagucaaacagaguguucugugauacaaugaauaguagaacucugccuagcgaggucaaccucugcaauguggacaucuuuaacccaaaauaugauugcaagauaaugaccuccaaaacagacguaucuagcucaguuauuaccagucugggagccaucguguccuguuacgguaagacuaaaugcacagcaagcaauaagaacaggggcaucauuaagaccuucucuaaugggugugauuaugucucaaacaaaggaguggacacugucagugugggcaauacgcuuuacuauguuaacaagcaagaggguaaaagccuguacgugaagggggaacccaucauuaacuuuuaugacccuuugguauucccauccgaugaguuugacgcuucuauaucgcaggucaaugagaaaaucaaccagagccucgccuucauucggaaguccgaugaacuguuacacaaugugaacgcgggaaagucaacaaccaauaucaugaucacuaccauuauaaucguuauuaucgugauucugcuaagucucaucgccgucggccugcuuuuguacugcaaagcacgcugaggacuaguacuggcugcaucucccuuuccucuguccuccauccuucucccaggauggugaagggggaccugguacccagugauccccaccccaggauccuaaaucaugacuuaccugcuaauaaaaacucauuggaaaagugagaagaucuaaaaaaaaaaaaaaaaaaaaaaaaaaaaaaaaaaaaaaaaaaaaaaaaaaaaaaaaaaaaaaaaugcaucccccccccccccccccccccccccccccccaaaggcucuuuucagagccaccagaauu

SEQ ID NO: 4304 - RNA, 1947 nt, Artificial Sequence
  mRNA product Design b-5 comprising derived and/or modified sequence from HRSV(A2)__F-del_DSCav1_mut0 (opt4)
gggagacuccugucgggcggaaguaggaggaguagaguuuaaaaacaguacucuuuuuccgguucgggacguaguugaagcaacgacaagccggauaaccgcucuugagacaggaagcuuaccauggagcugcugauccugaaggccaacgccaucaccaccauccugaccgccgugaccuucugcuucgccagcggccagaacaucaccgaggaguucuaccagagcaccugcagcgccgugagcaagggcuaccugagcgcccugagaaccggcugguacaccagcgugaucaccaucgagcugagcaacaucaaggagaacaagugcaacggcaccgacgccaaggugaagcugaucaagcaggagcuggacaaguacaagaacgccgugaccgagcugcagcugcugaugcagagcacccccgccaccggcagcggcagcgccaucgccagcggcguggccgugugcaaggugcugcaccuggagggcgaggugaacaagaucaagagcgcccugcugagcaccaacaaggccguggugagccugagcaacggcgugagcgugcugaccuucaaggugcuggaccugaagaacuacaucgacaagcagcugcugcccauccugaacaagcagagcugcagcaucagcaacaucgagaccgugaucgaguuccagcagaagaacaacagacugcuggagaucaccagagaguucagcgugaacgccggcgugaccacccccgugagcaccuacaugcugaccaacagcgagcugcugagccugaucaacgacaugcccaucaccaacgaccagaagaagcugaugagcaacaacgugcagaucgugagacagcagagcuacagcaucaugugcaucaucaaggaggaggugcuggccuacguggugcagcugccccuguacggcgugaucgacacccccugcuggaagcugcacaccagcccccugugcaccaccaacaccaaggagggcagcaacaucugccugaccagaaccgacagaggcugguacugcgacaacgccggcagcgugagcuucuucccccaggccgagaccugcaaggugcagagcaacagaguguucugcgacaccaugaacagcagaacccugcccagcgaggugaaccugugcaacguggacaucuucaaccccaaguacgacugcaagaucaugaccagcaagaccgacgugagcagcagcgugaucaccagccugggcgccaucgugagcugcuacggcaagaccaagugcaccgccagcaacaagaacagaggcaucaucaagaccuucagcaacggcugcgacuacgugagcaacaagggcguggacaccgugagcgugggcaacacccuguacuacgugaacaagcaggagggcaagagccuguacgugaagggcgagcccaucaucaacuucuacgacccccugguguuccccagcgacgaguucgacgccagcaucagccaggugaacgagaagaucaaccagagccuggccuucaucagaaagagcgacgagcugcugcacaacgugaacgccggcaagagcaccaccaacaucaugaucaccaccaucaucaucgugaucaucgugauccugcugagccugaucgccgugggccugcugcuguacugcaaggccagaugaggacuaguacuggcugcaucucccuuuccucuguccuccauccuucucccaggauggugaagggggaccugguacccagugauccccaccccaggauccuaaaucaugacuuaccugcuaauaaaaacucauuggaaaagugagaagaucuaaaaaaaaaaaaaaaaaaaaaaaaaaaaaaaaaaaaaaaaaaaaaaaaaaaaaaaaaaaaaaaaugcaucccccccccccccccccccccccccccccccaaaggcucuuuucagagccaccagaauu

SEQ ID NO: 4305 - RNA, 1947 nt, Artificial Sequence
  mRNA product Design b-5 comprising derived and/or modified sequence from HRSV(A2)__F-del_DSCav1_mut0 (opt5)
gggagacuccugucgggcggaaguaggaggaguagaguuuaaaaacaguacucuuuuuccgguucgggacguaguugaagcaacgacaagccggauaaccgcucuugagacaggaagcuuaccauggagcugcucauccugaaggccaacgcuauuaccacaauccuuacggccgugaccuucugcuuugcgagcggccagaauauuacagaagaguucuaccaauccaccuguucugcugucagcaaaggguaucuguccgcccucagaacaggaugguacaccucuguuaucacaauugaacugagcaacaucaaggagaauaaaugcaacggcaccgacgccaaggugaaacuuaucaagcaggaacuggauaaguauaaaaaugcugugacggagcuccagcugcugaugcaguccacccccgccacagggucuggaagcgcuauugccuccggcgucgcgguguguaagguucuccaccuggagggggaagugaacaaaaucaagagcgcccuucugucuaccaauaaagcugucgugucccucagcaacggaguuucugugcugacauuuaagguccuugaccugaagaauuacauugauaaacaacuccugccuauccugaacaagcaguccugcagcauuucuaauaucgagaccgugauugaguuccagcagaaaaacaaucggcuccuggaaaucacgcgcgaguuuuccgugaacgccggcgucacaaccccgguuagcacauauaugcuuaccaauuccgaacugcucucucugaucaacgacaugcccauuaccaacgaucaaaagaaacuuaugagcaauaacgugcagaucgugagacagcaguccuacagcauuauguguaucauuaaggaggaaguccuggcuuaugugguucaacucccucuguacggcgugaucgacacacccugcuggaaacugcauacgucuccucucuguaccacaaauaccaaggagggguccaacaucugccugacacggaccgaucgcggaugguacugugacaaugccggcagcgucucuuucuuuccccaggcggaaacgugcaaggugcagagcaacagaguuuucugugauacaaugaacuccagaacccugccuucugaggugaaucucugcaaugucgacauuuuuaacccgaaauaugauugcaagaucaugaccagcaaaacagacguguccagcucugucauuaccucccugggggccaucgugagcuguuacggaaagacaaaaugcacggcuucuaauaagaaccggggcauuaucaagaccuucuccaaugggugugauuauguuagcaacaaaggaguggacacagucuccgugggcaauacccuuuacuauguuaacaagcaagagggcaaaucucuguacgugaagggggaacccaucauuaacuuuuaugacccucucgucuuccccagcgaugaguuugacgccuccaucucucaggugaaugagaaaauuaaccagagccuggcuuucauccgcaaguccgaugaacugcuccacaaugugaacgccggaaagagcacaaccaauauuaugaucacgaccauuaucaucguuauuaucgucauucugcuuucucugaucgccgugggccuccugcuguacugcaaagcuagaugaggacuaguacuggcugcaucucccuuuccucuguccuccauccuucucccaggauggugaagggggaccugguacccagugauccccaccccaggauccuaaaucaugacuuaccugcuaauaaaaacucauuggaaaagugagaagaucuaaaaaaaaaaaaaaaaaaaaaaaaaaaaaaaaaaaaaaaaaaaaaaaaaaaaaaaaaaaaaaaaugcaucccccccccccccccccccccccccccccccaaaggcucuuuucagagccaccagaauu

SEQ ID NO: 4306 - RNA, 1947 nt, Artificial Sequence
  mRNA product Design b-5 comprising derived and/or modified sequence from HRSV(A2)__F-del_DSCav1_mut0 (opt6)
gggagacuccugucgggcggaaguaggaggaguagaguuuaaaaacaguacucuuuuuccgguucgggacguaguugaagcaacgacaagccggauaaccgcucuugagacaggaagcuuaccauggaauuacucauccucaaagcaaacgcaauaacaacaauacuaacagcagucacuuucugcuucgcauccggacaaaauaucacagaagaauuuuaccaauccaccugcucugcugucuccaaaggauaccuaucugcccucagaaccgguugguauacaucugucauaaccauagaacuaucaaacauuaaagaaaacaaauguaacggaacagacgcaaaagucaaacuuauaaaacaagaauuagacaaauacaaaaacgcagucacagaauuacaacuacuaaugcaaucaaccccagcaaccggaucaggauccgcaauagcuucaggaguagcaguauguaaaguucuacacuuagaaggagaagucaacaaaauuaaauccgcacuauuaucaaccaacaaagcagucguaucuuuaucaaacggaguaucuguacuuacauucaaaguacuagaccuaaaaaauuacauugauaaacaauuacuaccaauacuaaacaaacaaucauguuccaucucuaacauagaaacaguaauagaauuucaacaaaaaaauaacagauuacuugaaaucacccgagaauuuucaguaaacgcaggaguaaccacacccguaucuacauacaugcuaacaaacucugaacuucugagccuaauaaaugacaugccaauaaccaacgaccaaaaaaaacuaauguccaacaacguacaaauaguacgacaacaaucuuacucaaucaugugcauaaucaaagaagaaguacuagcuuauguaguccaacuuccacucuacggaguaauagacacccccugcuggaaacuacacacaucaccacuaugcacaacaaacacaaaagaaggcucaaacauaugccuaacaagaacugacagaggaugguauugugacaaugcaggcucugucucauucuuuccacaagccgaaacaugcaaaguucaaucaaaccgaguuuucugugacacaaugaacucuagaacucucccaucagaagucaacuuaugcaacguugacauauucaacccaaaauaugacuguaaaauaaugacuuccaaaacugauguaucauccuccgucauaacaucccuaggagcuauuguaucauguuacgggaaaaccaaaugcacagccucaaacaaaaaccgcgguaucauaaaaacauuuucaaacggaugugauuacguaagcaauaaaggaguagacaccguaucaguaggaaauacacuauacuauguaaauaaacaagaaggaaaaucacuauaugucaaaggagaaccaaucauaaauuucuaugacccacuuguauucccauccgaugaauuugacgcaagcauuucacaggucaacgaaaaaauaaaccaaucacuagccuucaucagaaaaucagacgaacuacuacauaacguaaacgccggaaaaucaacaaccaacauaaugauaacaacaaucauaauaguuaucauaguaauacuacuaucucuaauagcugucggacucuuacuauauugcaaagcccgauaaggacuaguacuggcugcaucucccuuuccucuguccuccauccuucucccaggauggugaagggggaccugguacccagugauccccaccccaggauccuaaaucaugacuuaccugcuaauaaaaacucauuggaaaagugagaagaucuaaaaaaaaaaaaaaaaaaaaaaaaaaaaaaaaaaaaaaaaaaaaaaaaaaaaaaaaaaaaaaaaugcaucccccccccccccccccccccccccccccccaaaggcucuuuucagagccaccagaauu

SEQ ID NO: 4307 - RNA, 1947 nt, Artificial Sequence
  mRNA product Design b-5 comprising derived and/or modified sequence from HRSV(A2)__F-del_DSCav1_mut0 (opt11)
gggagacuccugucgggcggaaguaggaggaguagaguuuaaaaacaguacucuuuuuccgguucgggacguaguugaagcaacgacaagccggauaaccgcucuugagacaggaagcuuaccauggaacuacuaauccugaaagccaacgccauaaccacaauccuuaccgcagucaccuucugcuucgccuccggucaaaacaucacagaagaguucuaccaauccaccuguuccgcagucagcaaaggcuaccucuccgcacuccgaaccggaugguacaccagcgucaucaccaucgaacuauccaacauaaaggaaaauaagugcaaugguacagaugccaaggucaaacucauaaagcaagaacucgacaaauacaaaaacgccgucaccgaacuacaacuacuaaugcaaucuacccccgcaacaggcucagguuccgccauagccuccggcgucgccguuugcaaaguccuccaccucgaaggcgaaguaaacaaaaucaaauccgcccuacucucaaccaacaaagcagucgucucccucucaaacggagucucgguccucaccuucaaaguccucgaccucaaaaacuauauagacaaacaacuccuacccauacucaacaaacaguccugcagcauauccaacaucgaaaccgugaucgaguuccaacagaaaaacaacagacuccucgaaaucacucgagaguucuccguaaacgccggcgucacaaccccagucucaacauacaugcucaccaacagcgaacuccuaucacuaaucaacgacaugccuaucacaaaugaucagaagaaacuaaugagcaacaacguccaaaucguccgccaacaaucauacuccaucaugugcaucauaaaagaagaaguccuagccuacgugguccagcuaccccucuacggcguaauugacaccccuugcuggaaacuacacacuucaccccucugcacaaccaacaccaaagaagguucaaacaucugccucacacgaacagaccgcggcugguacugcgacaacgccggauccguauccuucuucccccaagcagaaaccugcaaaguucaauccaaccggguauucugcgacaccaugaacucaagaacccuucccuccgaaguaaaucuaugcaacgucgacauauucaacccaaaauacgacugcaaaaucaugaccuccaaaaccgaugucuccagcagcgucaucaccagccucggcgccaucgucuccugcuacggcaaaacaaaauguacagcauccaacaaaaaccgaggcauaaucaaaaccuucuccaacgggugcgauuacgucagcaacaaaggcgucgacaccgucuccgugggcaacacccuauacuacgucaacaaacaagaaggcaaaucacuguacguaaagggcgaacccaucaucaacuucuaugacccucugguguucccauccgaugaauuugacgcauccauaucucaggucaacgaaaagaucaaccaaucccucgccuucauacgcaaauccgacgaacuccuacacaacgucaacgcugguaaaagcaccaccaacaucaugaucaccacaaucaucaucgucauaaucguuauccuacucucccuuauagcagucggacuccuccucuacugcaaagcccgcuaaggacuaguacuggcugcaucucccuuuccucuguccuccauccuucucccaggauggugaagggggaccugguacccagugauccccaccccaggauccuaaaucaugacuuaccugcuaauaaaaacucauuggaaaagugagaagaucuaaaaaaaaaaaaaaaaaaaaaaaaaaaaaaaaaaaaaaaaaaaaaaaaaaaaaaaaaaaaaaaaugcaucccccccccccccccccccccccccccccccaaaggcucuuuucagagccaccagaauu

SEQ ID NO: 4308 - RNA, 1853 nt, Artificial Sequence
  mRNA product Design c-1 comprising derived and/or modified sequence from HRSV(A2)__F-del_DSCav1_mut0 (opt1)
gggagaguccgcucagccagguugcagaagcggcuuagcguguguccuaaucuucucucugcguguagguaggccugugccgcaaacaagcuuaccauggagcugcucauccugaaggccaacgccaucaccaccauccugacggcggugaccuucugcuucgccagcggccagaacaucaccgaggaguucuaccaguccacgugcagcgccgucuccaagggguaccucagcgcccugcggaccggcugguacaccuccgugaucaccaucgagcugagcaacaucaaggagaacaagugcaacgggaccgacgccaaggugaagcucaucaagcaggagcuggacaaguacaagaacgcggucacggagcugcagcuccugaugcaguccaccccggcaaccggcuccggcuccgccaucgcgagcggcgucgccgugugcaaggugcugcaccucgagggggaggucaacaagaucaagagcgcccugcuguccaccaacaaggccguggugagccucuccaacggcgucagcgugcugaccuucaaggugcuggaccucaagaacuacaucgacaagcagcugcugcccauccugaacaagcagagcugcuccaucagcaacaucgagacggugaucgaguuccagcagaagaacaaccggcuccuggagaucacccgcgaguucagcgugaacgccggggucaccacccccguguccacguacaugcugaccaacagcgagcuccugucccugaucaacgacaugccgaucaccaacgaccagaagaagcucaugagcaacaacgugcagaucguccggcagcaguccuacagcaucaugugcaucaucaaggaggaggugcuggcguacgugguccagcugccccucuacggcgugaucgacacccccugcuggaagcugcacacgagcccccugugcaccaccaacaccaaggagggguccaacaucugccucacgcgcaccgaccggggcugguacugcgacaacgccggcagcgucuccuucuucccgcaggccgagaccugcaaggugcagagcaaccgcguguucugcgacaccaugaacucccggacgcugcccagcgagguaaaccucugcaacgucgacaucuucaaccccaaguacgacugcaagaucaugaccuccaagaccgacgugagcuccagcgugaucaccucccugggggccaucgucagcugcuacggcaagacgaagugcaccgccagcaacaagaaccgggggaucaucaagaccuucuccaacggcugcgacuacgugagcaacaagggcguggacaccguguccgucgggaacacccuguacuacgugaacaagcaggagggcaagagccucuacgugaagggggagcccaucaucaacuucuacgacccgcuggucuuccccuccgacgaguucgacgcgagcaucucccaggugaacgagaagaucaaccagagccuggccuucauccgcaaguccgacgagcugcuccacaacgugaacgccggcaagagcacgaccaacaucaugaucaccaccaucaucaucgucaucaucgugauccugcugucccucaucgccguggggcugcugcucuacugcaaggcccggugaggacuaguguccaccugucccuccugggcugcuggauugucucguuuuccugccaaauaaacaggaucagcgcuuuacagaucuaaaaaaaaaaaaaaaaaaaaaaaaaaaaaaaaaaaaaaaaaaaaaaaaaaaaaaaaaaaaaaaaugcaucccccccccccccccccccccccccccccccaaaggcucuuuucagagccaccagaauu

SEQ ID NO: 4309 - RNA, 1853 nt, Artificial Sequence
  mRNA product Design c-1 comprising derived and/or modified sequence from HRSV(A2)__F-del_DSCav1_mut0 (opt1)
gggagaguccgcucagccagguugcagaagcggcuuagcguguguccuaaucuucucucugcguguagguaggccugugccgcaaacaagcuuaccauggagcugcucauccugaaggccaacgccaucaccaccauccugacggcggugaccuucugcuucgccagcggccagaacaucaccgaggaguucuaccaguccacgugcagcgccgucuccaagggguaccucagcgcccugcgcaccggcugguacaccuccgugaucaccaucgagcugagcaacaucaaggagaacaagugcaacgggaccgacgccaaggugaagcucaucaagcaggagcuggacaaguacaagaacgcggucacggagcugcagcuccugaugcaguccacccccgccaccggcagcggguccgccaucgccagcggcguggcggugugcaagguccugcaccucgagggcgaggugaacaagaucaaguccgcccugcugagcaccaacaaggccguggucucccucagcaacgggguguccgugcugacguucaagguccuggaccucaagaacuacaucgacaagcagcugcugccgauccucaacaagcagagcugcuccaucagcaacaucgagaccgugaucgaguuccagcagaagaacaaccggcugcuggagaucacccgcgaguucuccgugaacgccggcgucaccacgcccgugagcaccuacaugcucaccaacagcgagcugcugucccucaucaacgacaugcccaucaccaacgaccagaagaagcugaugagcaacaacgugcagaucguccggcagcaguccuacagcaucaugugcaucaucaaggaggaggugcuggccuacgugguccagcucccccuguacggggugaucgacacgccgugcuggaagcugcacaccagcccccucugcaccaccaacacgaaggagggcuccaacaucugccugacccgcaccgaccgggggugguacugcgacaacgcgggcuccgugagcuucuucccccaggccgagaccugcaagguccaguccaaccgcguguucugcgacacgaugaacagccggacccuccccuccgaggucaaccugugcaacguggacaucuucaacccgaaguacgacugcaagaucaugaccagcaagaccgacguguccagcuccgucaucacgagccugggcgccaucguguccugcuacgggaagaccaagugcaccgccagcaacaagaaccggggcaucaucaagaccuucuccaacgggugcgacuacgugagcaacaagggcgucgacacggugagcgugggcaacacccucuacuacgucaacaagcaggaggggaagucccuguacgugaagggcgagcccaucaucaacuucuacgacccccugguguuccccagcgacgaguucgacgccuccaucagccaggucaacgagaagaucaaccagucccucgcguucauccgcaagagcgacgagcugcugcacaacgugaacgccgggaaguccaccaccaacaucaugaucaccacgaucaucaucgugaucaucgucauccuccugagccugaucgccgugggccuccugcuguacugcaaggcccggugaggacuaguguccaccugucccuccugggcugcuggauugucucguuuuccugccaaauaaacaggaucagcgcuuuacagaucuaaaaaaaaaaaaaaaaaaaaaaaaaaaaaaaaaaaaaaaaaaaaaaaaaaaaaaaaaaaaaaaaugcaucccccccccccccccccccccccccccccccaaaggcucuuuucagagccaccagaauu

SEQ ID NO: 4310 - RNA, 1853 nt, Artificial Sequence
  mRNA product Design c-1 comprising derived and/or modified sequence from HRSV(A2)__F-del_DSCav1_mut0 (opt2)
gggagaguccgcucagccagguugcagaagcggcuuagcguguguccuaaucuucucucugcguguagguaggccugugccgcaaacaagcuuaccauggagcuccucauccucaaggccaacgccaucaccaccauccucaccgccgucaccuucugcuucgccuccggccagaacaucaccgaggaguucuaccaguccaccugcuccgccgucuccaagggcuaccucuccgcccuccgcaccggcugguacaccuccgucaucaccaucgagcucuccaacaucaaggagaacaagugcaacggcaccgacgccaaggucaagcucaucaagcaggagcucgacaaguacaagaacgccgucaccgagcuccagcuccucaugcaguccacccccgccaccggcuccggcuccgccaucgccuccggcgucgccgucugcaagguccuccaccucgagggcgaggucaacaagaucaaguccgcccuccucuccaccaacaaggccgucgucucccucuccaacggcgucuccguccucaccuucaagguccucgaccucaagaacuacaucgacaagcagcuccuccccauccucaacaagcaguccugcuccaucuccaacaucgagaccgucaucgaguuccagcagaagaacaaccgccuccucgagaucacccgcgaguucuccgucaacgccggcgucaccacccccgucuccaccuacaugcucaccaacuccgagcuccucucccucaucaacgacaugcccaucaccaacgaccagaagaagcucauguccaacaacguccagaucguccgccagcaguccuacuccaucaugugcaucaucaaggaggagguccucgccuacgucguccagcucccccucuacggcgucaucgacacccccugcuggaagcuccacaccuccccccucugcaccaccaacaccaaggagggcuccaacaucugccucacccgcaccgaccgcggcugguacugcgacaacgccggcuccgucuccuucuucccccaggccgagaccugcaagguccaguccaaccgcgucuucugcgacaccaugaacucccgcacccuccccuccgaggucaaccucugcaacgucgacaucuucaaccccaaguacgacugcaagaucaugaccuccaagaccgacgucuccuccuccgucaucaccucccucggcgccaucgucuccugcuacggcaagaccaagugcaccgccuccaacaagaaccgcggcaucaucaagaccuucuccaacggcugcgacuacgucuccaacaagggcgucgacaccgucuccgucggcaacacccucuacuacgucaacaagcaggagggcaagucccucuacgucaagggcgagcccaucaucaacuucuacgacccccucgucuuccccuccgacgaguucgacgccuccaucucccaggucaacgagaagaucaaccagucccucgccuucauccgcaaguccgacgagcuccuccacaacgucaacgccggcaaguccaccaccaacaucaugaucaccaccaucaucaucgucaucaucgucauccuccucucccucaucgccgucggccuccuccucuacugcaaggcccgcugaggacuaguguccaccugucccuccugggcugcuggauugucucguuuuccugccaaauaaacaggaucagcgcuuuacagaucuaaaaaaaaaaaaaaaaaaaaaaaaaaaaaaaaaaaaaaaaaaaaaaaaaaaaaaaaaaaaaaaaugcaucccccccccccccccccccccccccccccccaaaggcucuuuucagagccaccagaauu

SEQ ID NO: 4311 - RNA, 1853 nt, Artificial Sequence
  mRNA product Design c-1 comprising derived and/or modified sequence from HRSV(A2)__F-del_DSCav1_mut0 (opt3)
gggagaguccgcucagccagguugcagaagcggcuuagcguguguccuaaucuucucucugcguguagguaggccugugccgcaaacaagcuuaccauggagcugcucauccuuaaggccaacgcuauuaccacaauacugacugcagugacguucugcuuugccagcggccagaauaucaccgaagaguucuaccaauccacauguucugcggucucaaaaggguauuugagugcuuuaagaacuggaugguacaccagcguuauuacaaucgaacuguccaacauuaaggagaauaaaugcaacgguaccgacgccaaggugaaacuaaucaagcaggaacucgauaaguauaaaaaugcaguaacugagcugcagcuucugaugcagucuacacccgccaccggcucggggucagcuauagcaagcggaguggccgucuguaagguguugcaccucgagggcgaaguuaacaaaaucaagagugcucugcuguccacgaauaaagccguggucucucucagcaacgguguguccguauuaacuuuuaagguucuggaccuuaagaauuacauugauaaacaauugcugccuauccuaaacaagcagucaugcaguauuagcaauaucgagaccgugauagaguuccagcagaaaaacaauaggcuccuggaaauuacacgggaguuuucugucaacgcgggggugacuaccccaguguccacauauaugcuuaccaauucagaacuguugagccucaucaacgacaugccgauuacgaacgaucaaaagaaacugaugaguaauaacguccagaucguucgccagcagucuuacuccaucauguguauuauaaaggaggaaguguuagcauauguagugcaacugccccucuacggagucaucgacacuccuugcuggaaacuucauacaagcccacuguguaccacuaauacaaaggagggcucgaacauuugcuugacccgaacggaucguggcugguacugugacaaugccgggucuguguccuucuuuccccaggcugaaaccugcaagguucagucaaacagaguguucugugauacaaugaauaguagaacucugccuagcgaggucaaccucugcaauguggacaucuuuaacccaaaauaugauugcaagauaaugaccuccaaaacagacguaucuagcucaguuauuaccagucugggagccaucguguccuguuacgguaagacuaaaugcacagcaagcaauaagaacaggggcaucauuaagaccuucucuaaugggugugauuaugucucaaacaaaggaguggacacugucagugugggcaauacgcuuuacuauguuaacaagcaagaggguaaaagccuguacgugaagggggaacccaucauuaacuuuuaugacccuuugguauucccauccgaugaguuugacgcuucuauaucgcaggucaaugagaaaaucaaccagagccucgccuucauucggaaguccgaugaacuguuacacaaugugaacgcgggaaagucaacaaccaauaucaugaucacuaccauuauaaucguuauuaucgugauucugcuaagucucaucgccgucggccugcuuuuguacugcaaagcacgcugaggacuaguguccaccugucccuccugggcugcuggauugucucguuuuccugccaaauaaacaggaucagcgcuuuacagaucuaaaaaaaaaaaaaaaaaaaaaaaaaaaaaaaaaaaaaaaaaaaaaaaaaaaaaaaaaaaaaaaaugcaucccccccccccccccccccccccccccccccaaaggcucuuuucagagccaccagaauu

SEQ ID NO: 4312 - RNA, 1853 nt, Artificial Sequence
  mRNA product Design c-1 comprising derived and/or modified sequence from HRSV(A2)__F-del_DSCav1_mut0 (opt4)
gggagaguccgcucagccagguugcagaagcggcuuagcguguguccuaaucuucucucugcguguagguaggccugugccgcaaacaagcuuaccauggagcugcugauccugaaggccaacgccaucaccaccauccugaccgccgugaccuucugcuucgccagcggccagaacaucaccgaggaguucuaccagagcaccugcagcgccgugagcaagggcuaccugagcgcccugagaaccggcugguacaccagcgugaucaccaucgagcugagcaacaucaaggagaacaagugcaacggcaccgacgccaaggugaagcugaucaagcaggagcuggacaaguacaagaacgccgugaccgagcugcagcugcugaugcagagcacccccgccaccggcagcggcagcgccaucgccagcggcguggccgugugcaaggugcugcaccuggagggcgaggugaacaagaucaagagcgcccugcugagcaccaacaaggccguggugagccugagcaacggcgugagcgugcugaccuucaaggugcuggaccugaagaacuacaucgacaagcagcugcugcccauccugaacaagcagagcugcagcaucagcaacaucgagaccgugaucgaguuccagcagaagaacaacagacugcuggagaucaccagagaguucagcgugaacgccggcgugaccacccccgugagcaccuacaugcugaccaacagcgagcugcugagccugaucaacgacaugcccaucaccaacgaccagaagaagcugaugagcaacaacgugcagaucgugagacagcagagcuacagcaucaugugcaucaucaaggaggaggugcuggccuacguggugcagcugccccuguacggcgugaucgacacccccugcuggaagcugcacaccagcccccugugcaccaccaacaccaaggagggcagcaacaucugccugaccagaaccgacagaggcugguacugcgacaacgccggcagcgugagcuucuucccccaggccgagaccugcaaggugcagagcaacagaguguucugcgacaccaugaacagcagaacccugcccagcgaggugaaccugugcaacguggacaucuucaaccccaaguacgacugcaagaucaugaccagcaagaccgacgugagcagcagcgugaucaccagccugggcgccaucgugagcugcuacggcaagaccaagugcaccgccagcaacaagaacagaggcaucaucaagaccuucagcaacggcugcgacuacgugagcaacaagggcguggacaccgugagcgugggcaacacccuguacuacgugaacaagcaggagggcaagagccuguacgugaagggcgagcccaucaucaacuucuacgacccccugguguuccccagcgacgaguucgacgccagcaucagccaggugaacgagaagaucaaccagagccuggccuucaucagaaagagcgacgagcugcugcacaacgugaacgccggcaagagcaccaccaacaucaugaucaccaccaucaucaucgugaucaucgugauccugcugagccugaucgccgugggccugcugcuguacugcaaggccagaugaggacuaguguccaccugucccuccugggcugcuggauugucucguuuuccugccaaauaaacaggaucagcgcuuuacagaucuaaaaaaaaaaaaaaaaaaaaaaaaaaaaaaaaaaaaaaaaaaaaaaaaaaaaaaaaaaaaaaaaugcaucccccccccccccccccccccccccccccccaaaggcucuuuucagagccaccagaauu

SEQ ID NO: 4313 - RNA, 1853 nt, Artificial Sequence
  mRNA product Design c-1 comprising derived and/or modified sequence from HRSV(A2)__F-del_DSCav1_mut0 (opt5)
gggagaguccgcucagccagguugcagaagcggcuuagcguguguccuaaucuucucucugcguguagguaggccugugccgcaaacaagcuuaccauggagcugcucauccugaaggccaacgcuauuaccacaauccuuacggccgugaccuucugcuuugcgagcggccagaauauuacagaagaguucuaccaauccaccuguucugcugucagcaaaggguaucuguccgcccucagaacaggaugguacaccucuguuaucacaauugaacugagcaacaucaaggagaauaaaugcaacggcaccgacgccaaggugaaacuuaucaagcaggaacuggauaaguauaaaaaugcugugacggagcuccagcugcugaugcaguccacccccgccacagggucuggaagcgcuauugccuccggcgucgcgguguguaagguucuccaccuggagggggaagugaacaaaaucaagagcgcccuucugucuaccaauaaagcugucgugucccucagcaacggaguuucugugcugacauuuaagguccuugaccugaagaauuacauugauaaacaacuccugccuauccugaacaagcaguccugcagcauuucuaauaucgagaccgugauugaguuccagcagaaaaacaaucggcuccuggaaaucacgcgcgaguuuuccgugaacgccggcgucacaaccccgguuagcacauauaugcuuaccaauuccgaacugcucucucugaucaacgacaugcccauuaccaacgaucaaaagaaacuuaugagcaauaacgugcagaucgugagacagcaguccuacagcauuauguguaucauuaaggaggaaguccuggcuuaugugguucaacucccucuguacggcgugaucgacacacccugcuggaaacugcauacgucuccucucuguaccacaaauaccaaggagggguccaacaucugccugacacggaccgaucgcggaugguacugugacaaugccggcagcgucucuuucuuuccccaggcggaaacgugcaaggugcagagcaacagaguuuucugugauacaaugaacuccagaacccugccuucugaggugaaucucugcaaugucgacauuuuuaacccgaaauaugauugcaagaucaugaccagcaaaacagacguguccagcucugucauuaccucccugggggccaucgugagcuguuacggaaagacaaaaugcacggcuucuaauaagaaccggggcauuaucaagaccuucuccaaugggugugauuauguuagcaacaaaggaguggacacagucuccgugggcaauacccuuuacuauguuaacaagcaagagggcaaaucucuguacgugaagggggaacccaucauuaacuuuuaugacccucucgucuuccccagcgaugaguuugacgccuccaucucucaggugaaugagaaaauuaaccagagccuggcuuucauccgcaaguccgaugaacugcuccacaaugugaacgccggaaagagcacaaccaauauuaugaucacgaccauuaucaucguuauuaucgucauucugcuuucucugaucgccgugggccuccugcuguacugcaaagcuagaugaggacuaguguccaccugucccuccugggcugcuggauugucucguuuuccugccaaauaaacaggaucagcgcuuuacagaucuaaaaaaaaaaaaaaaaaaaaaaaaaaaaaaaaaaaaaaaaaaaaaaaaaaaaaaaaaaaaaaaaugcaucccccccccccccccccccccccccccccccaaaggcucuuuucagagccaccagaauu

SEQ ID NO: 4314 - RNA, 1853 nt, Artificial Sequence
  mRNA product Design c-1 comprising derived and/or modified sequence from HRSV(A2)__F-del_DSCav1_mut0 (opt6)
gggagaguccgcucagccagguugcagaagcggcuuagcguguguccuaaucuucucucugcguguagguaggccugugccgcaaacaagcuuaccauggaauuacucauccucaaagcaaacgcaauaacaacaauacuaacagcagucacuuucugcuucgcauccggacaaaauaucacagaagaauuuuaccaauccaccugcucugcugucuccaaaggauaccuaucugcccucagaaccgguugguauacaucugucauaaccauagaacuaucaaacauuaaagaaaacaaauguaacggaacagacgcaaaagucaaacuuauaaaacaagaauuagacaaauacaaaaacgcagucacagaauuacaacuacuaaugcaaucaaccccagcaaccggaucaggauccgcaauagcuucaggaguagcaguauguaaaguucuacacuuagaaggagaagucaacaaaauuaaauccgcacuauuaucaaccaacaaagcagucguaucuuuaucaaacggaguaucuguacuuacauucaaaguacuagaccuaaaaaauuacauugauaaacaauuacuaccaauacuaaacaaacaaucauguuccaucucuaacauagaaacaguaauagaauuucaacaaaaaaauaacagauuacuugaaaucacccgagaauuuucaguaaacgcaggaguaaccacacccguaucuacauacaugcuaacaaacucugaacuucugagccuaauaaaugacaugccaauaaccaacgaccaaaaaaaacuaauguccaacaacguacaaauaguacgacaacaaucuuacucaaucaugugcauaaucaaagaagaaguacuagcuuauguaguccaacuuccacucuacggaguaauagacacccccugcuggaaacuacacacaucaccacuaugcacaacaaacacaaaagaaggcucaaacauaugccuaacaagaacugacagaggaugguauugugacaaugcaggcucugucucauucuuuccacaagccgaaacaugcaaaguucaaucaaaccgaguuuucugugacacaaugaacucuagaacucucccaucagaagucaacuuaugcaacguugacauauucaacccaaaauaugacuguaaaauaaugacuuccaaaacugauguaucauccuccgucauaacaucccuaggagcuauuguaucauguuacgggaaaaccaaaugcacagccucaaacaaaaaccgcgguaucauaaaaacauuuucaaacggaugugauuacguaagcaauaaaggaguagacaccguaucaguaggaaauacacuauacuauguaaauaaacaagaaggaaaaucacuauaugucaaaggagaaccaaucauaaauuucuaugacccacuuguauucccauccgaugaauuugacgcaagcauuucacaggucaacgaaaaaauaaaccaaucacuagccuucaucagaaaaucagacgaacuacuacauaacguaaacgccggaaaaucaacaaccaacauaaugauaacaacaaucauaauaguuaucauaguaauacuacuaucucuaauagcugucggacucuuacuauauugcaaagcccgauaaggacuaguguccaccugucccuccugggcugcuggauugucucguuuuccugccaaauaaacaggaucagcgcuuuacagaucuaaaaaaaaaaaaaaaaaaaaaaaaaaaaaaaaaaaaaaaaaaaaaaaaaaaaaaaaaaaaaaaaugcaucccccccccccccccccccccccccccccccaaaggcucuuuucagagccaccagaauu

SEQ ID NO: 4315 - RNA, 1853 nt, Artificial Sequence
  mRNA product Design c-1 comprising derived and/or modified sequence from HRSV(A2)__F-del_DSCav1_mut0 (opt11)
gggagaguccgcucagccagguugcagaagcggcuuagcguguguccuaaucuucucucugcguguagguaggccugugccgcaaacaagcuuaccauggaacuacuaauccugaaagccaacgccauaaccacaauccuuaccgcagucaccuucugcuucgccuccggucaaaacaucacagaagaguucuaccaauccaccuguuccgcagucagcaaaggcuaccucuccgcacuccgaaccggaugguacaccagcgucaucaccaucgaacuauccaacauaaaggaaaauaagugcaaugguacagaugccaaggucaaacucauaaagcaagaacucgacaaauacaaaaacgccgucaccgaacuacaacuacuaaugcaaucuacccccgcaacaggcucagguuccgccauagccuccggcgucgccguuugcaaaguccuccaccucgaaggcgaaguaaacaaaaucaaauccgcccuacucucaaccaacaaagcagucgucucccucucaaacggagucucgguccucaccuucaaaguccucgaccucaaaaacuauauagacaaacaacuccuacccauacucaacaaacaguccugcagcauauccaacaucgaaaccgugaucgaguuccaacagaaaaacaacagacuccucgaaaucacucgagaguucuccguaaacgccggcgucacaaccccagucucaacauacaugcucaccaacagcgaacuccuaucacuaaucaacgacaugccuaucacaaaugaucagaagaaacuaaugagcaacaacguccaaaucguccgccaacaaucauacuccaucaugugcaucauaaaagaagaaguccuagccuacgugguccagcuaccccucuacggcguaauugacaccccuugcuggaaacuacacacuucaccccucugcacaaccaacaccaaagaagguucaaacaucugccucacacgaacagaccgcggcugguacugcgacaacgccggauccguauccuucuucccccaagcagaaaccugcaaaguucaauccaaccggguauucugcgacaccaugaacucaagaacccuucccuccgaaguaaaucuaugcaacgucgacauauucaacccaaaauacgacugcaaaaucaugaccuccaaaaccgaugucuccagcagcgucaucaccagccucggcgccaucgucuccugcuacggcaaaacaaaauguacagcauccaacaaaaaccgaggcauaaucaaaaccuucuccaacgggugcgauuacgucagcaacaaaggcgucgacaccgucuccgugggcaacacccuauacuacgucaacaaacaagaaggcaaaucacuguacguaaagggcgaacccaucaucaacuucuaugacccucugguguucccauccgaugaauuugacgcauccauaucucaggucaacgaaaagaucaaccaaucccucgccuucauacgcaaauccgacgaacuccuacacaacgucaacgcugguaaaagcaccaccaacaucaugaucaccacaaucaucaucgucauaaucguuauccuacucucccuuauagcagucggacuccuccucuacugcaaagcccgcuaaggacuaguguccaccugucccuccugggcugcuggauugucucguuuuccugccaaauaaacaggaucagcgcuuuacagaucuaaaaaaaaaaaaaaaaaaaaaaaaaaaaaaaaaaaaaaaaaaaaaaaaaaaaaaaaaaaaaaaaugcaucccccccccccccccccccccccccccccccaaaggcucuuuucagagccaccagaauu

SEQ ID NO: 4316 - RNA, 1943 nt, Artificial Sequence
  mRNA product Design c-2 comprising derived and/or modified sequence from HRSV(A2)__F-del_DSCav1_mut0 (opt1)
gggagacuccugucgggcggaaguaggaggaguagaguuuaaaaacaguacucuuuuuccgguucgggacguaguugaagcaacgacaagccggauaaccgcucuugagacaggaagcuuaccauggagcugcucauccugaaggccaacgccaucaccaccauccugacggcggugaccuucugcuucgccagcggccagaacaucaccgaggaguucuaccaguccacgugcagcgccgucuccaagggguaccucagcgcccugcggaccggcugguacaccuccgugaucaccaucgagcugagcaacaucaaggagaacaagugcaacgggaccgacgccaaggugaagcucaucaagcaggagcuggacaaguacaagaacgcggucacggagcugcagcuccugaugcaguccaccccggcaaccggcuccggcuccgccaucgcgagcggcgucgccgugugcaaggugcugcaccucgagggggaggucaacaagaucaagagcgcccugcuguccaccaacaaggccguggugagccucuccaacggcgucagcgugcugaccuucaaggugcuggaccucaagaacuacaucgacaagcagcugcugcccauccugaacaagcagagcugcuccaucagcaacaucgagacggugaucgaguuccagcagaagaacaaccggcuccuggagaucacccgcgaguucagcgugaacgccggggucaccacccccguguccacguacaugcugaccaacagcgagcuccugucccugaucaacgacaugccgaucaccaacgaccagaagaagcucaugagcaacaacgugcagaucguccggcagcaguccuacagcaucaugugcaucaucaaggaggaggugcuggcguacgugguccagcugccccucuacggcgugaucgacacccccugcuggaagcugcacacgagcccccugugcaccaccaacaccaaggagggguccaacaucugccucacgcgcaccgaccggggcugguacugcgacaacgccggcagcgucuccuucuucccgcaggccgagaccugcaaggugcagagcaaccgcguguucugcgacaccaugaacucccggacgcugcccagcgagguaaaccucugcaacgucgacaucuucaaccccaaguacgacugcaagaucaugaccuccaagaccgacgugagcuccagcgugaucaccucccugggggccaucgucagcugcuacggcaagacgaagugcaccgccagcaacaagaaccgggggaucaucaagaccuucuccaacggcugcgacuacgugagcaacaagggcguggacaccguguccgucgggaacacccuguacuacgugaacaagcaggagggcaagagccucuacgugaagggggagcccaucaucaacuucuacgacccgcuggucuuccccuccgacgaguucgacgcgagcaucucccaggugaacgagaagaucaaccagagccuggccuucauccgcaaguccgacgagcugcuccacaacgugaacgccggcaagagcacgaccaacaucaugaucaccaccaucaucaucgucaucaucgugauccugcugucccucaucgccguggggcugcugcucuacugcaaggcccggugaggacuaguggaagcauuuuccuggcugauuaaaagaaauuacucagcuauggucaucuguuccuguuagaaggcuaugcagcauauuauauacuaugcgcauguuaugaaaugcauaauaaaaaauuuuaaaaaaucuaaaagaucuaaaaaaaaaaaaaaaaaaaaaaaaaaaaaaaaaaaaaaaaaaaaaaaaaaaaaaaaaaaaaaaaugcaucccccccccccccccccccccccccccccccaaaggcucuuuucagagccaccagaauu

SEQ ID NO: 4317 - RNA, 1943 nt, Artificial Sequence
  mRNA product Design c-2 comprising derived and/or modified sequence from HRSV(A2)__F-del_DSCav1_mut0 (opt1)
gggagacuccugucgggcggaaguaggaggaguagaguuuaaaaacaguacucuuuuuccgguucgggacguaguugaagcaacgacaagccggauaaccgcucuugagacaggaagcuuaccauggagcugcucauccugaaggccaacgccaucaccaccauccugacggcggugaccuucugcuucgccagcggccagaacaucaccgaggaguucuaccaguccacgugcagcgccgucuccaagggguaccucagcgcccugcgcaccggcugguacaccuccgugaucaccaucgagcugagcaacaucaaggagaacaagugcaacgggaccgacgccaaggugaagcucaucaagcaggagcuggacaaguacaagaacgcggucacggagcugcagcuccugaugcaguccacccccgccaccggcagcggguccgccaucgccagcggcguggcggugugcaagguccugcaccucgagggcgaggugaacaagaucaaguccgcccugcugagcaccaacaaggccguggucucccucagcaacgggguguccgugcugacguucaagguccuggaccucaagaacuacaucgacaagcagcugcugccgauccucaacaagcagagcugcuccaucagcaacaucgagaccgugaucgaguuccagcagaagaacaaccggcugcuggagaucacccgcgaguucuccgugaacgccggcgucaccacgcccgugagcaccuacaugcucaccaacagcgagcugcugucccucaucaacgacaugcccaucaccaacgaccagaagaagcugaugagcaacaacgugcagaucguccggcagcaguccuacagcaucaugugcaucaucaaggaggaggugcuggccuacgugguccagcucccccuguacggggugaucgacacgccgugcuggaagcugcacaccagcccccucugcaccaccaacacgaaggagggcuccaacaucugccugacccgcaccgaccgggggugguacugcgacaacgcgggcuccgugagcuucuucccccaggccgagaccugcaagguccaguccaaccgcguguucugcgacacgaugaacagccggacccuccccuccgaggucaaccugugcaacguggacaucuucaacccgaaguacgacugcaagaucaugaccagcaagaccgacguguccagcuccgucaucacgagccugggcgccaucguguccugcuacgggaagaccaagugcaccgccagcaacaagaaccggggcaucaucaagaccuucuccaacgggugcgacuacgugagcaacaagggcgucgacacggugagcgugggcaacacccucuacuacgucaacaagcaggaggggaagucccuguacgugaagggcgagcccaucaucaacuucuacgacccccugguguuccccagcgacgaguucgacgccuccaucagccaggucaacgagaagaucaaccagucccucgcguucauccgcaagagcgacgagcugcugcacaacgugaacgccgggaaguccaccaccaacaucaugaucaccacgaucaucaucgugaucaucgucauccuccugagccugaucgccgugggccuccugcuguacugcaaggcccggugaggacuaguggaagcauuuuccuggcugauuaaaagaaauuacucagcuauggucaucuguuccuguuagaaggcuaugcagcauauuauauacuaugcgcauguuaugaaaugcauaauaaaaaauuuuaaaaaaucuaaaagaucuaaaaaaaaaaaaaaaaaaaaaaaaaaaaaaaaaaaaaaaaaaaaaaaaaaaaaaaaaaaaaaaaugcaucccccccccccccccccccccccccccccccaaaggcucuuuucagagccaccagaauu

SEQ ID NO: 4318 - RNA, 1943 nt, Artificial Sequence
  mRNA product Design c-2 comprising derived and/or modified sequence from HRSV(A2)__F-del_DSCav1_mut0 (opt2)
gggagacuccugucgggcggaaguaggaggaguagaguuuaaaaacaguacucuuuuuccgguucgggacguaguugaagcaacgacaagccggauaaccgcucuugagacaggaagcuuaccauggagcuccucauccucaaggccaacgccaucaccaccauccucaccgccgucaccuucugcuucgccuccggccagaacaucaccgaggaguucuaccaguccaccugcuccgccgucuccaagggcuaccucuccgcccuccgcaccggcugguacaccuccgucaucaccaucgagcucuccaacaucaaggagaacaagugcaacggcaccgacgccaaggucaagcucaucaagcaggagcucgacaaguacaagaacgccgucaccgagcuccagcuccucaugcaguccacccccgccaccggcuccggcuccgccaucgccuccggcgucgccgucugcaagguccuccaccucgagggcgaggucaacaagaucaaguccgcccuccucuccaccaacaaggccgucgucucccucuccaacggcgucuccguccucaccuucaagguccucgaccucaagaacuacaucgacaagcagcuccuccccauccucaacaagcaguccugcuccaucuccaacaucgagaccgucaucgaguuccagcagaagaacaaccgccuccucgagaucacccgcgaguucuccgucaacgccggcgucaccacccccgucuccaccuacaugcucaccaacuccgagcuccucucccucaucaacgacaugcccaucaccaacgaccagaagaagcucauguccaacaacguccagaucguccgccagcaguccuacuccaucaugugcaucaucaaggaggagguccucgccuacgucguccagcucccccucuacggcgucaucgacacccccugcuggaagcuccacaccuccccccucugcaccaccaacaccaaggagggcuccaacaucugccucacccgcaccgaccgcggcugguacugcgacaacgccggcuccgucuccuucuucccccaggccgagaccugcaagguccaguccaaccgcgucuucugcgacaccaugaacucccgcacccuccccuccgaggucaaccucugcaacgucgacaucuucaaccccaaguacgacugcaagaucaugaccuccaagaccgacgucuccuccuccgucaucaccucccucggcgccaucgucuccugcuacggcaagaccaagugcaccgccuccaacaagaaccgcggcaucaucaagaccuucuccaacggcugcgacuacgucuccaacaagggcgucgacaccgucuccgucggcaacacccucuacuacgucaacaagcaggagggcaagucccucuacgucaagggcgagcccaucaucaacuucuacgacccccucgucuuccccuccgacgaguucgacgccuccaucucccaggucaacgagaagaucaaccagucccucgccuucauccgcaaguccgacgagcuccuccacaacgucaacgccggcaaguccaccaccaacaucaugaucaccaccaucaucaucgucaucaucgucauccuccucucccucaucgccgucggccuccuccucuacugcaaggcccgcugaggacuaguggaagcauuuuccuggcugauuaaaagaaauuacucagcuauggucaucuguuccuguuagaaggcuaugcagcauauuauauacuaugcgcauguuaugaaaugcauaauaaaaaauuuuaaaaaaucuaaaagaucuaaaaaaaaaaaaaaaaaaaaaaaaaaaaaaaaaaaaaaaaaaaaaaaaaaaaaaaaaaaaaaaaugcaucccccccccccccccccccccccccccccccaaaggcucuuuucagagccaccagaauu

SEQ ID NO: 4319 - RNA, 1943 nt, Artificial Sequence
  mRNA product Design c-2 comprising derived and/or modified sequence from HRSV(A2)__F-del_DSCav1_mut0 (opt3)
gggagacuccugucgggcggaaguaggaggaguagaguuuaaaaacaguacucuuuuuccgguucgggacguaguugaagcaacgacaagccggauaaccgcucuugagacaggaagcuuaccauggagcugcucauccuuaaggccaacgcuauuaccacaauacugacugcagugacguucugcuuugccagcggccagaauaucaccgaagaguucuaccaauccacauguucugcggucucaaaaggguauuugagugcuuuaagaacuggaugguacaccagcguuauuacaaucgaacuguccaacauuaaggagaauaaaugcaacgguaccgacgccaaggugaaacuaaucaagcaggaacucgauaaguauaaaaaugcaguaacugagcugcagcuucugaugcagucuacacccgccaccggcucggggucagcuauagcaagcggaguggccgucuguaagguguugcaccucgagggcgaaguuaacaaaaucaagagugcucugcuguccacgaauaaagccguggucucucucagcaacgguguguccguauuaacuuuuaagguucuggaccuuaagaauuacauugauaaacaauugcugccuauccuaaacaagcagucaugcaguauuagcaauaucgagaccgugauagaguuccagcagaaaaacaauaggcuccuggaaauuacacgggaguuuucugucaacgcgggggugacuaccccaguguccacauauaugcuuaccaauucagaacuguugagccucaucaacgacaugccgauuacgaacgaucaaaagaaacugaugaguaauaacguccagaucguucgccagcagucuuacuccaucauguguauuauaaaggaggaaguguuagcauauguagugcaacugccccucuacggagucaucgacacuccuugcuggaaacuucauacaagcccacuguguaccacuaauacaaaggagggcucgaacauuugcuugacccgaacggaucguggcugguacugugacaaugccgggucuguguccuucuuuccccaggcugaaaccugcaagguucagucaaacagaguguucugugauacaaugaauaguagaacucugccuagcgaggucaaccucugcaauguggacaucuuuaacccaaaauaugauugcaagauaaugaccuccaaaacagacguaucuagcucaguuauuaccagucugggagccaucguguccuguuacgguaagacuaaaugcacagcaagcaauaagaacaggggcaucauuaagaccuucucuaaugggugugauuaugucucaaacaaaggaguggacacugucagugugggcaauacgcuuuacuauguuaacaagcaagaggguaaaagccuguacgugaagggggaacccaucauuaacuuuuaugacccuuugguauucccauccgaugaguuugacgcuucuauaucgcaggucaaugagaaaaucaaccagagccucgccuucauucggaaguccgaugaacuguuacacaaugugaacgcgggaaagucaacaaccaauaucaugaucacuaccauuauaaucguuauuaucgugauucugcuaagucucaucgccgucggccugcuuuuguacugcaaagcacgcugaggacuaguggaagcauuuuccuggcugauuaaaagaaauuacucagcuauggucaucuguuccuguuagaaggcuaugcagcauauuauauacuaugcgcauguuaugaaaugcauaauaaaaaauuuuaaaaaaucuaaaagaucuaaaaaaaaaaaaaaaaaaaaaaaaaaaaaaaaaaaaaaaaaaaaaaaaaaaaaaaaaaaaaaaaugcaucccccccccccccccccccccccccccccccaaaggcucuuuucagagccaccagaauu

SEQ ID NO: 4320 - RNA, 1943 nt, Artificial Sequence
  mRNA product Design c-2 comprising derived and/or modified sequence from HRSV(A2)__F-del_DSCav1_mut0 (opt4)
gggagacuccugucgggcggaaguaggaggaguagaguuuaaaaacaguacucuuuuuccgguucgggacguaguugaagcaacgacaagccggauaaccgcucuugagacaggaagcuuaccauggagcugcugauccugaaggccaacgccaucaccaccauccugaccgccgugaccuucugcuucgccagcggccagaacaucaccgaggaguucuaccagagcaccugcagcgccgugagcaagggcuaccugagcgcccugagaaccggcugguacaccagcgugaucaccaucgagcugagcaacaucaaggagaacaagugcaacggcaccgacgccaaggugaagcugaucaagcaggagcuggacaaguacaagaacgccgugaccgagcugcagcugcugaugcagagcacccccgccaccggcagcggcagcgccaucgccagcggcguggccgugugcaaggugcugcaccuggagggcgaggugaacaagaucaagagcgcccugcugagcaccaacaaggccguggugagccugagcaacggcgugagcgugcugaccuucaaggugcuggaccugaagaacuacaucgacaagcagcugcugcccauccugaacaagcagagcugcagcaucagcaacaucgagaccgugaucgaguuccagcagaagaacaacagacugcuggagaucaccagagaguucagcgugaacgccggcgugaccacccccgugagcaccuacaugcugaccaacagcgagcugcugagccugaucaacgacaugcccaucaccaacgaccagaagaagcugaugagcaacaacgugcagaucgugagacagcagagcuacagcaucaugugcaucaucaaggaggaggugcuggccuacguggugcagcugccccuguacggcgugaucgacacccccugcuggaagcugcacaccagcccccugugcaccaccaacaccaaggagggcagcaacaucugccugaccagaaccgacagaggcugguacugcgacaacgccggcagcgugagcuucuucccccaggccgagaccugcaaggugcagagcaacagaguguucugcgacaccaugaacagcagaacccugcccagcgaggugaaccugugcaacguggacaucuucaaccccaaguacgacugcaagaucaugaccagcaagaccgacgugagcagcagcgugaucaccagccugggcgccaucgugagcugcuacggcaagaccaagugcaccgccagcaacaagaacagaggcaucaucaagaccuucagcaacggcugcgacuacgugagcaacaagggcguggacaccgugagcgugggcaacacccuguacuacgugaacaagcaggagggcaagagccuguacgugaagggcgagcccaucaucaacuucuacgacccccugguguuccccagcgacgaguucgacgccagcaucagccaggugaacgagaagaucaaccagagccuggccuucaucagaaagagcgacgagcugcugcacaacgugaacgccggcaagagcaccaccaacaucaugaucaccaccaucaucaucgugaucaucgugauccugcugagccugaucgccgugggccugcugcuguacugcaaggccagaugaggacuaguggaagcauuuuccuggcugauuaaaagaaauuacucagcuauggucaucuguuccuguuagaaggcuaugcagcauauuauauacuaugcgcauguuaugaaaugcauaauaaaaaauuuuaaaaaaucuaaaagaucuaaaaaaaaaaaaaaaaaaaaaaaaaaaaaaaaaaaaaaaaaaaaaaaaaaaaaaaaaaaaaaaaugcaucccccccccccccccccccccccccccccccaaaggcucuuuucagagccaccagaauu

SEQ ID NO: 4321 - RNA, 1943 nt, Artificial Sequence
  mRNA product Design c-2 comprising derived and/or modified sequence from HRSV(A2)__F-del_DSCav1_mut0 (opt5)
gggagacuccugucgggcggaaguaggaggaguagaguuuaaaaacaguacucuuuuuccgguucgggacguaguugaagcaacgacaagccggauaaccgcucuugagacaggaagcuuaccauggagcugcucauccugaaggccaacgcuauuaccacaauccuuacggccgugaccuucugcuuugcgagcggccagaauauuacagaagaguucuaccaauccaccuguucugcugucagcaaaggguaucuguccgcccucagaacaggaugguacaccucuguuaucacaauugaacugagcaacaucaaggagaauaaaugcaacggcaccgacgccaaggugaaacuuaucaagcaggaacuggauaaguauaaaaaugcugugacggagcuccagcugcugaugcaguccacccccgccacagggucuggaagcgcuauugccuccggcgucgcgguguguaagguucuccaccuggagggggaagugaacaaaaucaagagcgcccuucugucuaccaauaaagcugucgugucccucagcaacggaguuucugugcugacauuuaagguccuugaccugaagaauuacauugauaaacaacuccugccuauccugaacaagcaguccugcagcauuucuaauaucgagaccgugauugaguuccagcagaaaaacaaucggcuccuggaaaucacgcgcgaguuuuccgugaacgccggcgucacaaccccgguuagcacauauaugcuuaccaauuccgaacugcucucucugaucaacgacaugcccauuaccaacgaucaaaagaaacuuaugagcaauaacgugcagaucgugagacagcaguccuacagcauuauguguaucauuaaggaggaaguccuggcuuaugugguucaacucccucuguacggcgugaucgacacacccugcuggaaacugcauacgucuccucucuguaccacaaauaccaaggagggguccaacaucugccugacacggaccgaucgcggaugguacugugacaaugccggcagcgucucuuucuuuccccaggcggaaacgugcaaggugcagagcaacagaguuuucugugauacaaugaacuccagaacccugccuucugaggugaaucucugcaaugucgacauuuuuaacccgaaauaugauugcaagaucaugaccagcaaaacagacguguccagcucugucauuaccucccugggggccaucgugagcuguuacggaaagacaaaaugcacggcuucuaauaagaaccggggcauuaucaagaccuucuccaaugggugugauuauguuagcaacaaaggaguggacacagucuccgugggcaauacccuuuacuauguuaacaagcaagagggcaaaucucuguacgugaagggggaacccaucauuaacuuuuaugacccucucgucuuccccagcgaugaguuugacgccuccaucucucaggugaaugagaaaauuaaccagagccuggcuuucauccgcaaguccgaugaacugcuccacaaugugaacgccggaaagagcacaaccaauauuaugaucacgaccauuaucaucguuauuaucgucauucugcuuucucugaucgccgugggccuccugcuguacugcaaagcuagaugaggacuaguggaagcauuuuccuggcugauuaaaagaaauuacucagcuauggucaucuguuccuguuagaaggcuaugcagcauauuauauacuaugcgcauguuaugaaaugcauaauaaaaaauuuuaaaaaaucuaaaagaucuaaaaaaaaaaaaaaaaaaaaaaaaaaaaaaaaaaaaaaaaaaaaaaaaaaaaaaaaaaaaaaaaugcaucccccccccccccccccccccccccccccccaaaggcucuuuucagagccaccagaauu

SEQ ID NO: 4322 - RNA, 1943 nt, Artificial Sequence
  mRNA product Design c-2 comprising derived and/or modified sequence from HRSV(A2)__F-del_DSCav1_mut0 (opt6)
gggagacuccugucgggcggaaguaggaggaguagaguuuaaaaacaguacucuuuuuccgguucgggacguaguugaagcaacgacaagccggauaaccgcucuugagacaggaagcuuaccauggaauuacucauccucaaagcaaacgcaauaacaacaauacuaacagcagucacuuucugcuucgcauccggacaaaauaucacagaagaauuuuaccaauccaccugcucugcugucuccaaaggauaccuaucugcccucagaaccgguugguauacaucugucauaaccauagaacuaucaaacauuaaagaaaacaaauguaacggaacagacgcaaaagucaaacuuauaaaacaagaauuagacaaauacaaaaacgcagucacagaauuacaacuacuaaugcaaucaaccccagcaaccggaucaggauccgcaauagcuucaggaguagcaguauguaaaguucuacacuuagaaggagaagucaacaaaauuaaauccgcacuauuaucaaccaacaaagcagucguaucuuuaucaaacggaguaucuguacuuacauucaaaguacuagaccuaaaaaauuacauugauaaacaauuacuaccaauacuaaacaaacaaucauguuccaucucuaacauagaaacaguaauagaauuucaacaaaaaaauaacagauuacuugaaaucacccgagaauuuucaguaaacgcaggaguaaccacacccguaucuacauacaugcuaacaaacucugaacuucugagccuaauaaaugacaugccaauaaccaacgaccaaaaaaaacuaauguccaacaacguacaaauaguacgacaacaaucuuacucaaucaugugcauaaucaaagaagaaguacuagcuuauguaguccaacuuccacucuacggaguaauagacacccccugcuggaaacuacacacaucaccacuaugcacaacaaacacaaaagaaggcucaaacauaugccuaacaagaacugacagaggaugguauugugacaaugcaggcucugucucauucuuuccacaagccgaaacaugcaaaguucaaucaaaccgaguuuucugugacacaaugaacucuagaacucucccaucagaagucaacuuaugcaacguugacauauucaacccaaaauaugacuguaaaauaaugacuuccaaaacugauguaucauccuccgucauaacaucccuaggagcuauuguaucauguuacgggaaaaccaaaugcacagccucaaacaaaaaccgcgguaucauaaaaacauuuucaaacggaugugauuacguaagcaauaaaggaguagacaccguaucaguaggaaauacacuauacuauguaaauaaacaagaaggaaaaucacuauaugucaaaggagaaccaaucauaaauuucuaugacccacuuguauucccauccgaugaauuugacgcaagcauuucacaggucaacgaaaaaauaaaccaaucacuagccuucaucagaaaaucagacgaacuacuacauaacguaaacgccggaaaaucaacaaccaacauaaugauaacaacaaucauaauaguuaucauaguaauacuacuaucucuaauagcugucggacucuuacuauauugcaaagcccgauaaggacuaguggaagcauuuuccuggcugauuaaaagaaauuacucagcuauggucaucuguuccuguuagaaggcuaugcagcauauuauauacuaugcgcauguuaugaaaugcauaauaaaaaauuuuaaaaaaucuaaaagaucuaaaaaaaaaaaaaaaaaaaaaaaaaaaaaaaaaaaaaaaaaaaaaaaaaaaaaaaaaaaaaaaaugcaucccccccccccccccccccccccccccccccaaaggcucuuuucagagccaccagaauu

SEQ ID NO: 4323 - RNA, 1943 nt, Artificial Sequence
  mRNA product Design c-2 comprising derived and/or modified sequence from HRSV(A2)__F-del_DSCav1_mut0 (opt11)
gggagacuccugucgggcggaaguaggaggaguagaguuuaaaaacaguacucuuuuuccgguucgggacguaguugaagcaacgacaagccggauaaccgcucuugagacaggaagcuuaccauggaacuacuaauccugaaagccaacgccauaaccacaauccuuaccgcagucaccuucugcuucgccuccggucaaaacaucacagaagaguucuaccaauccaccuguuccgcagucagcaaaggcuaccucuccgcacuccgaaccggaugguacaccagcgucaucaccaucgaacuauccaacauaaaggaaaauaagugcaaugguacagaugccaaggucaaacucauaaagcaagaacucgacaaauacaaaaacgccgucaccgaacuacaacuacuaaugcaaucuacccccgcaacaggcucagguuccgccauagccuccggcgucgccguuugcaaaguccuccaccucgaaggcgaaguaaacaaaaucaaauccgcccuacucucaaccaacaaagcagucgucucccucucaaacggagucucgguccucaccuucaaaguccucgaccucaaaaacuauauagacaaacaacuccuacccauacucaacaaacaguccugcagcauauccaacaucgaaaccgugaucgaguuccaacagaaaaacaacagacuccucgaaaucacucgagaguucuccguaaacgccggcgucacaaccccagucucaacauacaugcucaccaacagcgaacuccuaucacuaaucaacgacaugccuaucacaaaugaucagaagaaacuaaugagcaacaacguccaaaucguccgccaacaaucauacuccaucaugugcaucauaaaagaagaaguccuagccuacgugguccagcuaccccucuacggcguaauugacaccccuugcuggaaacuacacacuucaccccucugcacaaccaacaccaaagaagguucaaacaucugccucacacgaacagaccgcggcugguacugcgacaacgccggauccguauccuucuucccccaagcagaaaccugcaaaguucaauccaaccggguauucugcgacaccaugaacucaagaacccuucccuccgaaguaaaucuaugcaacgucgacauauucaacccaaaauacgacugcaaaaucaugaccuccaaaaccgaugucuccagcagcgucaucaccagccucggcgccaucgucuccugcuacggcaaaacaaaauguacagcauccaacaaaaaccgaggcauaaucaaaaccuucuccaacgggugcgauuacgucagcaacaaaggcgucgacaccgucuccgugggcaacacccuauacuacgucaacaaacaagaaggcaaaucacuguacguaaagggcgaacccaucaucaacuucuaugacccucugguguucccauccgaugaauuugacgcauccauaucucaggucaacgaaaagaucaaccaaucccucgccuucauacgcaaauccgacgaacuccuacacaacgucaacgcugguaaaagcaccaccaacaucaugaucaccacaaucaucaucgucauaaucguuauccuacucucccuuauagcagucggacuccuccucuacugcaaagcccgcuaaggacuaguggaagcauuuuccuggcugauuaaaagaaauuacucagcuauggucaucuguuccuguuagaaggcuaugcagcauauuauauacuaugcgcauguuaugaaaugcauaauaaaaaauuuuaaaaaaucuaaaagaucuaaaaaaaaaaaaaaaaaaaaaaaaaaaaaaaaaaaaaaaaaaaaaaaaaaaaaaaaaaaaaaaaugcaucccccccccccccccccccccccccccccccaaaggcucuuuucagagccaccagaauu

SEQ ID NO: 4324 - RNA, 1920 nt, Artificial Sequence
  mRNA product Design c-3 comprising derived and/or modified sequence from HRSV(A2)__F-del_DSCav1_mut0 (opt1)
gggagaguccgcucagccagguugcagaagcggcuuagcguguguccuaaucuucucucugcguguagguaggccugugccgcaaacaagcuuaccauggagcugcucauccugaaggccaacgccaucaccaccauccugacggcggugaccuucugcuucgccagcggccagaacaucaccgaggaguucuaccaguccacgugcagcgccgucuccaagggguaccucagcgcccugcggaccggcugguacaccuccgugaucaccaucgagcugagcaacaucaaggagaacaagugcaacgggaccgacgccaaggugaagcucaucaagcaggagcuggacaaguacaagaacgcggucacggagcugcagcuccugaugcaguccaccccggcaaccggcuccggcuccgccaucgcgagcggcgucgccgugugcaaggugcugcaccucgagggggaggucaacaagaucaagagcgcccugcuguccaccaacaaggccguggugagccucuccaacggcgucagcgugcugaccuucaaggugcuggaccucaagaacuacaucgacaagcagcugcugcccauccugaacaagcagagcugcuccaucagcaacaucgagacggugaucgaguuccagcagaagaacaaccggcuccuggagaucacccgcgaguucagcgugaacgccggggucaccacccccguguccacguacaugcugaccaacagcgagcuccugucccugaucaacgacaugccgaucaccaacgaccagaagaagcucaugagcaacaacgugcagaucguccggcagcaguccuacagcaucaugugcaucaucaaggaggaggugcuggcguacgugguccagcugccccucuacggcgugaucgacacccccugcuggaagcugcacacgagcccccugugcaccaccaacaccaaggagggguccaacaucugccucacgcgcaccgaccggggcugguacugcgacaacgccggcagcgucuccuucuucccgcaggccgagaccugcaaggugcagagcaaccgcguguucugcgacaccaugaacucccggacgcugcccagcgagguaaaccucugcaacgucgacaucuucaaccccaaguacgacugcaagaucaugaccuccaagaccgacgugagcuccagcgugaucaccucccugggggccaucgucagcugcuacggcaagacgaagugcaccgccagcaacaagaaccgggggaucaucaagaccuucuccaacggcugcgacuacgugagcaacaagggcguggacaccguguccgucgggaacacccuguacuacgugaacaagcaggagggcaagagccucuacgugaagggggagcccaucaucaacuucuacgacccgcuggucuuccccuccgacgaguucgacgcgagcaucucccaggugaacgagaagaucaaccagagccuggccuucauccgcaaguccgacgagcugcuccacaacgugaacgccggcaagagcacgaccaacaucaugaucaccaccaucaucaucgucaucaucgugauccugcugucccucaucgccguggggcugcugcucuacugcaaggcccggugaggacuaguacuggcugcaucucccuuuccucuguccuccauccuucucccaggauggugaagggggaccugguacccagugauccccaccccaggauccuaaaucaugacuuaccugcuaauaaaaacucauuggaaaagugagaagaucuaaaaaaaaaaaaaaaaaaaaaaaaaaaaaaaaaaaaaaaaaaaaaaaaaaaaaaaaaaaaaaaaugcaucccccccccccccccccccccccccccccccaaaggcucuuuucagagccaccagaauu

SEQ ID NO: 4325 - RNA, 1920 nt, Artificial Sequence
  mRNA product Design c-3 comprising derived and/or modified sequence from HRSV(A2)__F-del_DSCav1_mut0 (opt1)
gggagaguccgcucagccagguugcagaagcggcuuagcguguguccuaaucuucucucugcguguagguaggccugugccgcaaacaagcuuaccauggagcugcucauccugaaggccaacgccaucaccaccauccugacggcggugaccuucugcuucgccagcggccagaacaucaccgaggaguucuaccaguccacgugcagcgccgucuccaagggguaccucagcgcccugcgcaccggcugguacaccuccgugaucaccaucgagcugagcaacaucaaggagaacaagugcaacgggaccgacgccaaggugaagcucaucaagcaggagcuggacaaguacaagaacgcggucacggagcugcagcuccugaugcaguccacccccgccaccggcagcggguccgccaucgccagcggcguggcggugugcaagguccugcaccucgagggcgaggugaacaagaucaaguccgcccugcugagcaccaacaaggccguggucucccucagcaacgggguguccgugcugacguucaagguccuggaccucaagaacuacaucgacaagcagcugcugccgauccucaacaagcagagcugcuccaucagcaacaucgagaccgugaucgaguuccagcagaagaacaaccggcugcuggagaucacccgcgaguucuccgugaacgccggcgucaccacgcccgugagcaccuacaugcucaccaacagcgagcugcugucccucaucaacgacaugcccaucaccaacgaccagaagaagcugaugagcaacaacgugcagaucguccggcagcaguccuacagcaucaugugcaucaucaaggaggaggugcuggccuacgugguccagcucccccuguacggggugaucgacacgccgugcuggaagcugcacaccagcccccucugcaccaccaacacgaaggagggcuccaacaucugccugacccgcaccgaccgggggugguacugcgacaacgcgggcuccgugagcuucuucccccaggccgagaccugcaagguccaguccaaccgcguguucugcgacacgaugaacagccggacccuccccuccgaggucaaccugugcaacguggacaucuucaacccgaaguacgacugcaagaucaugaccagcaagaccgacguguccagcuccgucaucacgagccugggcgccaucguguccugcuacgggaagaccaagugcaccgccagcaacaagaaccggggcaucaucaagaccuucuccaacgggugcgacuacgugagcaacaagggcgucgacacggugagcgugggcaacacccucuacuacgucaacaagcaggaggggaagucccuguacgugaagggcgagcccaucaucaacuucuacgacccccugguguuccccagcgacgaguucgacgccuccaucagccaggucaacgagaagaucaaccagucccucgcguucauccgcaagagcgacgagcugcugcacaacgugaacgccgggaaguccaccaccaacaucaugaucaccacgaucaucaucgugaucaucgucauccuccugagccugaucgccgugggccuccugcuguacugcaaggcccggugaggacuaguacuggcugcaucucccuuuccucuguccuccauccuucucccaggauggugaagggggaccugguacccagugauccccaccccaggauccuaaaucaugacuuaccugcuaauaaaaacucauuggaaaagugagaagaucuaaaaaaaaaaaaaaaaaaaaaaaaaaaaaaaaaaaaaaaaaaaaaaaaaaaaaaaaaaaaaaaaugcaucccccccccccccccccccccccccccccccaaaggcucuuuucagagccaccagaauu

SEQ ID NO: 4326 - RNA, 1920 nt, Artificial Sequence
  mRNA product Design c-3 comprising derived and/or modified sequence from HRSV(A2)__F-del_DSCav1_mut0 (opt2)
gggagaguccgcucagccagguugcagaagcggcuuagcguguguccuaaucuucucucugcguguagguaggccugugccgcaaacaagcuuaccauggagcuccucauccucaaggccaacgccaucaccaccauccucaccgccgucaccuucugcuucgccuccggccagaacaucaccgaggaguucuaccaguccaccugcuccgccgucuccaagggcuaccucuccgcccuccgcaccggcugguacaccuccgucaucaccaucgagcucuccaacaucaaggagaacaagugcaacggcaccgacgccaaggucaagcucaucaagcaggagcucgacaaguacaagaacgccgucaccgagcuccagcuccucaugcaguccacccccgccaccggcuccggcuccgccaucgccuccggcgucgccgucugcaagguccuccaccucgagggcgaggucaacaagaucaaguccgcccuccucuccaccaacaaggccgucgucucccucuccaacggcgucuccguccucaccuucaagguccucgaccucaagaacuacaucgacaagcagcuccuccccauccucaacaagcaguccugcuccaucuccaacaucgagaccgucaucgaguuccagcagaagaacaaccgccuccucgagaucacccgcgaguucuccgucaacgccggcgucaccacccccgucuccaccuacaugcucaccaacuccgagcuccucucccucaucaacgacaugcccaucaccaacgaccagaagaagcucauguccaacaacguccagaucguccgccagcaguccuacuccaucaugugcaucaucaaggaggagguccucgccuacgucguccagcucccccucuacggcgucaucgacacccccugcuggaagcuccacaccuccccccucugcaccaccaacaccaaggagggcuccaacaucugccucacccgcaccgaccgcggcugguacugcgacaacgccggcuccgucuccuucuucccccaggccgagaccugcaagguccaguccaaccgcgucuucugcgacaccaugaacucccgcacccuccccuccgaggucaaccucugcaacgucgacaucuucaaccccaaguacgacugcaagaucaugaccuccaagaccgacgucuccuccuccgucaucaccucccucggcgccaucgucuccugcuacggcaagaccaagugcaccgccuccaacaagaaccgcggcaucaucaagaccuucuccaacggcugcgacuacgucuccaacaagggcgucgacaccgucuccgucggcaacacccucuacuacgucaacaagcaggagggcaagucccucuacgucaagggcgagcccaucaucaacuucuacgacccccucgucuuccccuccgacgaguucgacgccuccaucucccaggucaacgagaagaucaaccagucccucgccuucauccgcaaguccgacgagcuccuccacaacgucaacgccggcaaguccaccaccaacaucaugaucaccaccaucaucaucgucaucaucgucauccuccucucccucaucgccgucggccuccuccucuacugcaaggcccgcugaggacuaguacuggcugcaucucccuuuccucuguccuccauccuucucccaggauggugaagggggaccugguacccagugauccccaccccaggauccuaaaucaugacuuaccugcuaauaaaaacucauuggaaaagugagaagaucuaaaaaaaaaaaaaaaaaaaaaaaaaaaaaaaaaaaaaaaaaaaaaaaaaaaaaaaaaaaaaaaaugcaucccccccccccccccccccccccccccccccaaaggcucuuuucagagccaccagaauu

SEQ ID NO: 4327 - RNA, 1920 nt, Artificial Sequence
  mRNA product Design c-3 comprising derived and/or modified sequence from HRSV(A2)__F-del_DSCav1_mut0 (opt3)
gggagaguccgcucagccagguugcagaagcggcuuagcguguguccuaaucuucucucugcguguagguaggccugugccgcaaacaagcuuaccauggagcugcucauccuuaaggccaacgcuauuaccacaauacugacugcagugacguucugcuuugccagcggccagaauaucaccgaagaguucuaccaauccacauguucugcggucucaaaaggguauuugagugcuuuaagaacuggaugguacaccagcguuauuacaaucgaacuguccaacauuaaggagaauaaaugcaacgguaccgacgccaaggugaaacuaaucaagcaggaacucgauaaguauaaaaaugcaguaacugagcugcagcuucugaugcagucuacacccgccaccggcucggggucagcuauagcaagcggaguggccgucuguaagguguugcaccucgagggcgaaguuaacaaaaucaagagugcucugcuguccacgaauaaagccguggucucucucagcaacgguguguccguauuaacuuuuaagguucuggaccuuaagaauuacauugauaaacaauugcugccuauccuaaacaagcagucaugcaguauuagcaauaucgagaccgugauagaguuccagcagaaaaacaauaggcuccuggaaauuacacgggaguuuucugucaacgcgggggugacuaccccaguguccacauauaugcuuaccaauucagaacuguugagccucaucaacgacaugccgauuacgaacgaucaaaagaaacugaugaguaauaacguccagaucguucgccagcagucuuacuccaucauguguauuauaaaggaggaaguguuagcauauguagugcaacugccccucuacggagucaucgacacuccuugcuggaaacuucauacaagcccacuguguaccacuaauacaaaggagggcucgaacauuugcuugacccgaacggaucguggcugguacugugacaaugccgggucuguguccuucuuuccccaggcugaaaccugcaagguucagucaaacagaguguucugugauacaaugaauaguagaacucugccuagcgaggucaaccucugcaauguggacaucuuuaacccaaaauaugauugcaagauaaugaccuccaaaacagacguaucuagcucaguuauuaccagucugggagccaucguguccuguuacgguaagacuaaaugcacagcaagcaauaagaacaggggcaucauuaagaccuucucuaaugggugugauuaugucucaaacaaaggaguggacacugucagugugggcaauacgcuuuacuauguuaacaagcaagaggguaaaagccuguacgugaagggggaacccaucauuaacuuuuaugacccuuugguauucccauccgaugaguuugacgcuucuauaucgcaggucaaugagaaaaucaaccagagccucgccuucauucggaaguccgaugaacuguuacacaaugugaacgcgggaaagucaacaaccaauaucaugaucacuaccauuauaaucguuauuaucgugauucugcuaagucucaucgccgucggccugcuuuuguacugcaaagcacgcugaggacuaguacuggcugcaucucccuuuccucuguccuccauccuucucccaggauggugaagggggaccugguacccagugauccccaccccaggauccuaaaucaugacuuaccugcuaauaaaaacucauuggaaaagugagaagaucuaaaaaaaaaaaaaaaaaaaaaaaaaaaaaaaaaaaaaaaaaaaaaaaaaaaaaaaaaaaaaaaaugcaucccccccccccccccccccccccccccccccaaaggcucuuuucagagccaccagaauu

SEQ ID NO: 4328 - RNA, 1920 nt, Artificial Sequence
  mRNA product Design c-3 comprising derived and/or modified sequence from HRSV(A2)__F-del_DSCav1_mut0 (opt4)
gggagaguccgcucagccagguugcagaagcggcuuagcguguguccuaaucuucucucugcguguagguaggccugugccgcaaacaagcuuaccauggagcugcugauccugaaggccaacgccaucaccaccauccugaccgccgugaccuucugcuucgccagcggccagaacaucaccgaggaguucuaccagagcaccugcagcgccgugagcaagggcuaccugagcgcccugagaaccggcugguacaccagcgugaucaccaucgagcugagcaacaucaaggagaacaagugcaacggcaccgacgccaaggugaagcugaucaagcaggagcuggacaaguacaagaacgccgugaccgagcugcagcugcugaugcagagcacccccgccaccggcagcggcagcgccaucgccagcggcguggccgugugcaaggugcugcaccuggagggcgaggugaacaagaucaagagcgcccugcugagcaccaacaaggccguggugagccugagcaacggcgugagcgugcugaccuucaaggugcuggaccugaagaacuacaucgacaagcagcugcugcccauccugaacaagcagagcugcagcaucagcaacaucgagaccgugaucgaguuccagcagaagaacaacagacugcuggagaucaccagagaguucagcgugaacgccggcgugaccacccccgugagcaccuacaugcugaccaacagcgagcugcugagccugaucaacgacaugcccaucaccaacgaccagaagaagcugaugagcaacaacgugcagaucgugagacagcagagcuacagcaucaugugcaucaucaaggaggaggugcuggccuacguggugcagcugccccuguacggcgugaucgacacccccugcuggaagcugcacaccagcccccugugcaccaccaacaccaaggagggcagcaacaucugccugaccagaaccgacagaggcugguacugcgacaacgccggcagcgugagcuucuucccccaggccgagaccugcaaggugcagagcaacagaguguucugcgacaccaugaacagcagaacccugcccagcgaggugaaccugugcaacguggacaucuucaaccccaaguacgacugcaagaucaugaccagcaagaccgacgugagcagcagcgugaucaccagccugggcgccaucgugagcugcuacggcaagaccaagugcaccgccagcaacaagaacagaggcaucaucaagaccuucagcaacggcugcgacuacgugagcaacaagggcguggacaccgugagcgugggcaacacccuguacuacgugaacaagcaggagggcaagagccuguacgugaagggcgagcccaucaucaacuucuacgacccccugguguuccccagcgacgaguucgacgccagcaucagccaggugaacgagaagaucaaccagagccuggccuucaucagaaagagcgacgagcugcugcacaacgugaacgccggcaagagcaccaccaacaucaugaucaccaccaucaucaucgugaucaucgugauccugcugagccugaucgccgugggccugcugcuguacugcaaggccagaugaggacuaguacuggcugcaucucccuuuccucuguccuccauccuucucccaggauggugaagggggaccugguacccagugauccccaccccaggauccuaaaucaugacuuaccugcuaauaaaaacucauuggaaaagugagaagaucuaaaaaaaaaaaaaaaaaaaaaaaaaaaaaaaaaaaaaaaaaaaaaaaaaaaaaaaaaaaaaaaaugcaucccccccccccccccccccccccccccccccaaaggcucuuuucagagccaccagaauu

SEQ ID NO: 4329 - RNA, 1920 nt, Artificial Sequence
  mRNA product Design c-3 comprising derived and/or modified sequence from HRSV(A2)__F-del_DSCav1_mut0 (opt5)
gggagaguccgcucagccagguugcagaagcggcuuagcguguguccuaaucuucucucugcguguagguaggccugugccgcaaacaagcuuaccauggagcugcucauccugaaggccaacgcuauuaccacaauccuuacggccgugaccuucugcuuugcgagcggccagaauauuacagaagaguucuaccaauccaccuguucugcugucagcaaaggguaucuguccgcccucagaacaggaugguacaccucuguuaucacaauugaacugagcaacaucaaggagaauaaaugcaacggcaccgacgccaaggugaaacuuaucaagcaggaacuggauaaguauaaaaaugcugugacggagcuccagcugcugaugcaguccacccccgccacagggucuggaagcgcuauugccuccggcgucgcgguguguaagguucuccaccuggagggggaagugaacaaaaucaagagcgcccuucugucuaccaauaaagcugucgugucccucagcaacggaguuucugugcugacauuuaagguccuugaccugaagaauuacauugauaaacaacuccugccuauccugaacaagcaguccugcagcauuucuaauaucgagaccgugauugaguuccagcagaaaaacaaucggcuccuggaaaucacgcgcgaguuuuccgugaacgccggcgucacaaccccgguuagcacauauaugcuuaccaauuccgaacugcucucucugaucaacgacaugcccauuaccaacgaucaaaagaaacuuaugagcaauaacgugcagaucgugagacagcaguccuacagcauuauguguaucauuaaggaggaaguccuggcuuaugugguucaacucccucuguacggcgugaucgacacacccugcuggaaacugcauacgucuccucucuguaccacaaauaccaaggagggguccaacaucugccugacacggaccgaucgcggaugguacugugacaaugccggcagcgucucuuucuuuccccaggcggaaacgugcaaggugcagagcaacagaguuuucugugauacaaugaacuccagaacccugccuucugaggugaaucucugcaaugucgacauuuuuaacccgaaauaugauugcaagaucaugaccagcaaaacagacguguccagcucugucauuaccucccugggggccaucgugagcuguuacggaaagacaaaaugcacggcuucuaauaagaaccggggcauuaucaagaccuucuccaaugggugugauuauguuagcaacaaaggaguggacacagucuccgugggcaauacccuuuacuauguuaacaagcaagagggcaaaucucuguacgugaagggggaacccaucauuaacuuuuaugacccucucgucuuccccagcgaugaguuugacgccuccaucucucaggugaaugagaaaauuaaccagagccuggcuuucauccgcaaguccgaugaacugcuccacaaugugaacgccggaaagagcacaaccaauauuaugaucacgaccauuaucaucguuauuaucgucauucugcuuucucugaucgccgugggccuccugcuguacugcaaagcuagaugaggacuaguacuggcugcaucucccuuuccucuguccuccauccuucucccaggauggugaagggggaccugguacccagugauccccaccccaggauccuaaaucaugacuuaccugcuaauaaaaacucauuggaaaagugagaagaucuaaaaaaaaaaaaaaaaaaaaaaaaaaaaaaaaaaaaaaaaaaaaaaaaaaaaaaaaaaaaaaaaugcaucccccccccccccccccccccccccccccccaaaggcucuuuucagagccaccagaauu

SEQ ID NO: 4330 - RNA, 1920 nt, Artificial Sequence
  mRNA product Design c-3 comprising derived and/or modified sequence from HRSV(A2)__F-del_DSCav1_mut0 (opt6)
gggagaguccgcucagccagguugcagaagcggcuuagcguguguccuaaucuucucucugcguguagguaggccugugccgcaaacaagcuuaccauggaauuacucauccucaaagcaaacgcaauaacaacaauacuaacagcagucacuuucugcuucgcauccggacaaaauaucacagaagaauuuuaccaauccaccugcucugcugucuccaaaggauaccuaucugcccucagaaccgguugguauacaucugucauaaccauagaacuaucaaacauuaaagaaaacaaauguaacggaacagacgcaaaagucaaacuuauaaaacaagaauuagacaaauacaaaaacgcagucacagaauuacaacuacuaaugcaaucaaccccagcaaccggaucaggauccgcaauagcuucaggaguagcaguauguaaaguucuacacuuagaaggagaagucaacaaaauuaaauccgcacuauuaucaaccaacaaagcagucguaucuuuaucaaacggaguaucuguacuuacauucaaaguacuagaccuaaaaaauuacauugauaaacaauuacuaccaauacuaaacaaacaaucauguuccaucucuaacauagaaacaguaauagaauuucaacaaaaaaauaacagauuacuugaaaucacccgagaauuuucaguaaacgcaggaguaaccacacccguaucuacauacaugcuaacaaacucugaacuucugagccuaauaaaugacaugccaauaaccaacgaccaaaaaaaacuaauguccaacaacguacaaauaguacgacaacaaucuuacucaaucaugugcauaaucaaagaagaaguacuagcuuauguaguccaacuuccacucuacggaguaauagacacccccugcuggaaacuacacacaucaccacuaugcacaacaaacacaaaagaaggcucaaacauaugccuaacaagaacugacagaggaugguauugugacaaugcaggcucugucucauucuuuccacaagccgaaacaugcaaaguucaaucaaaccgaguuuucugugacacaaugaacucuagaacucucccaucagaagucaacuuaugcaacguugacauauucaacccaaaauaugacuguaaaauaaugacuuccaaaacugauguaucauccuccgucauaacaucccuaggagcuauuguaucauguuacgggaaaaccaaaugcacagccucaaacaaaaaccgcgguaucauaaaaacauuuucaaacggaugugauuacguaagcaauaaaggaguagacaccguaucaguaggaaauacacuauacuauguaaauaaacaagaaggaaaaucacuauaugucaaaggagaaccaaucauaaauuucuaugacccacuuguauucccauccgaugaauuugacgcaagcauuucacaggucaacgaaaaaauaaaccaaucacuagccuucaucagaaaaucagacgaacuacuacauaacguaaacgccggaaaaucaacaaccaacauaaugauaacaacaaucauaauaguuaucauaguaauacuacuaucucuaauagcugucggacucuuacuauauugcaaagcccgauaaggacuaguacuggcugcaucucccuuuccucuguccuccauccuucucccaggauggugaagggggaccugguacccagugauccccaccccaggauccuaaaucaugacuuaccugcuaauaaaaacucauuggaaaagugagaagaucuaaaaaaaaaaaaaaaaaaaaaaaaaaaaaaaaaaaaaaaaaaaaaaaaaaaaaaaaaaaaaaaaugcaucccccccccccccccccccccccccccccccaaaggcucuuuucagagccaccagaauu

SEQ ID NO: 4331 - RNA, 1920 nt, Artificial Sequence
  mRNA product Design c-3 comprising derived and/or modified sequence from HRSV(A2)__F-del_DSCav1_mut0 (opt11)
gggagaguccgcucagccagguugcagaagcggcuuagcguguguccuaaucuucucucugcguguagguaggccugugccgcaaacaagcuuaccauggaacuacuaauccugaaagccaacgccauaaccacaauccuuaccgcagucaccuucugcuucgccuccggucaaaacaucacagaagaguucuaccaauccaccuguuccgcagucagcaaaggcuaccucuccgcacuccgaaccggaugguacaccagcgucaucaccaucgaacuauccaacauaaaggaaaauaagugcaaugguacagaugccaaggucaaacucauaaagcaagaacucgacaaauacaaaaacgccgucaccgaacuacaacuacuaaugcaaucuacccccgcaacaggcucagguuccgccauagccuccggcgucgccguuugcaaaguccuccaccucgaaggcgaaguaaacaaaaucaaauccgcccuacucucaaccaacaaagcagucgucucccucucaaacggagucucgguccucaccuucaaaguccucgaccucaaaaacuauauagacaaacaacuccuacccauacucaacaaacaguccugcagcauauccaacaucgaaaccgugaucgaguuccaacagaaaaacaacagacuccucgaaaucacucgagaguucuccguaaacgccggcgucacaaccccagucucaacauacaugcucaccaacagcgaacuccuaucacuaaucaacgacaugccuaucacaaaugaucagaagaaacuaaugagcaacaacguccaaaucguccgccaacaaucauacuccaucaugugcaucauaaaagaagaaguccuagccuacgugguccagcuaccccucuacggcguaauugacaccccuugcuggaaacuacacacuucaccccucugcacaaccaacaccaaagaagguucaaacaucugccucacacgaacagaccgcggcugguacugcgacaacgccggauccguauccuucuucccccaagcagaaaccugcaaaguucaauccaaccggguauucugcgacaccaugaacucaagaacccuucccuccgaaguaaaucuaugcaacgucgacauauucaacccaaaauacgacugcaaaaucaugaccuccaaaaccgaugucuccagcagcgucaucaccagccucggcgccaucgucuccugcuacggcaaaacaaaauguacagcauccaacaaaaaccgaggcauaaucaaaaccuucuccaacgggugcgauuacgucagcaacaaaggcgucgacaccgucuccgugggcaacacccuauacuacgucaacaaacaagaaggcaaaucacuguacguaaagggcgaacccaucaucaacuucuaugacccucugguguucccauccgaugaauuugacgcauccauaucucaggucaacgaaaagaucaaccaaucccucgccuucauacgcaaauccgacgaacuccuacacaacgucaacgcugguaaaagcaccaccaacaucaugaucaccacaaucaucaucgucauaaucguuauccuacucucccuuauagcagucggacuccuccucuacugcaaagcccgcuaaggacuaguacuggcugcaucucccuuuccucuguccuccauccuucucccaggauggugaagggggaccugguacccagugauccccaccccaggauccuaaaucaugacuuaccugcuaauaaaaacucauuggaaaagugagaagaucuaaaaaaaaaaaaaaaaaaaaaaaaaaaaaaaaaaaaaaaaaaaaaaaaaaaaaaaaaaaaaaaaugcaucccccccccccccccccccccccccccccccaaaggcucuuuucagagccaccagaauu

SEQ ID NO: 4332 - RNA, 1916 nt, Artificial Sequence
  mRNA product Design c-4 comprising derived and/or modified sequence from HRSV(A2)__F-del_DSCav1_mut0 (opt1)
gggagaguccgcucagccagguugcagaagcggcuuagcguguguccuaaucuucucucugcguguagguaggccugugccgcaaacaagcuuaccauggagcugcucauccugaaggccaacgccaucaccaccauccugacggcggugaccuucugcuucgccagcggccagaacaucaccgaggaguucuaccaguccacgugcagcgccgucuccaagggguaccucagcgcccugcggaccggcugguacaccuccgugaucaccaucgagcugagcaacaucaaggagaacaagugcaacgggaccgacgccaaggugaagcucaucaagcaggagcuggacaaguacaagaacgcggucacggagcugcagcuccugaugcaguccaccccggcaaccggcuccggcuccgccaucgcgagcggcgucgccgugugcaaggugcugcaccucgagggggaggucaacaagaucaagagcgcccugcuguccaccaacaaggccguggugagccucuccaacggcgucagcgugcugaccuucaaggugcuggaccucaagaacuacaucgacaagcagcugcugcccauccugaacaagcagagcugcuccaucagcaacaucgagacggugaucgaguuccagcagaagaacaaccggcuccuggagaucacccgcgaguucagcgugaacgccggggucaccacccccguguccacguacaugcugaccaacagcgagcuccugucccugaucaacgacaugccgaucaccaacgaccagaagaagcucaugagcaacaacgugcagaucguccggcagcaguccuacagcaucaugugcaucaucaaggaggaggugcuggcguacgugguccagcugccccucuacggcgugaucgacacccccugcuggaagcugcacacgagcccccugugcaccaccaacaccaaggagggguccaacaucugccucacgcgcaccgaccggggcugguacugcgacaacgccggcagcgucuccuucuucccgcaggccgagaccugcaaggugcagagcaaccgcguguucugcgacaccaugaacucccggacgcugcccagcgagguaaaccucugcaacgucgacaucuucaaccccaaguacgacugcaagaucaugaccuccaagaccgacgugagcuccagcgugaucaccucccugggggccaucgucagcugcuacggcaagacgaagugcaccgccagcaacaagaaccgggggaucaucaagaccuucuccaacggcugcgacuacgugagcaacaagggcguggacaccguguccgucgggaacacccuguacuacgugaacaagcaggagggcaagagccucuacgugaagggggagcccaucaucaacuucuacgacccgcuggucuuccccuccgacgaguucgacgcgagcaucucccaggugaacgagaagaucaaccagagccuggccuucauccgcaaguccgacgagcugcuccacaacgugaacgccggcaagagcacgaccaacaucaugaucaccaccaucaucaucgucaucaucgugauccugcugucccucaucgccguggggcugcugcucuacugcaaggcccggugaggacuaguggaagcauuuuccuggcugauuaaaagaaauuacucagcuauggucaucuguuccuguuagaaggcuaugcagcauauuauauacuaugcgcauguuaugaaaugcauaauaaaaaauuuuaaaaaaucuaaaagaucuaaaaaaaaaaaaaaaaaaaaaaaaaaaaaaaaaaaaaaaaaaaaaaaaaaaaaaaaaaaaaaaaugcaucccccccccccccccccccccccccccccccaaaggcucuuuucagagccaccagaauu

SEQ ID NO: 4333 - RNA, 1916 nt, Artificial Sequence
  mRNA product Design c-4 comprising derived and/or modified sequence from HRSV(A2)__F-del_DSCav1_mut0 (opt1)
gggagaguccgcucagccagguugcagaagcggcuuagcguguguccuaaucuucucucugcguguagguaggccugugccgcaaacaagcuuaccauggagcugcucauccugaaggccaacgccaucaccaccauccugacggcggugaccuucugcuucgccagcggccagaacaucaccgaggaguucuaccaguccacgugcagcgccgucuccaagggguaccucagcgcccugcgcaccggcugguacaccuccgugaucaccaucgagcugagcaacaucaaggagaacaagugcaacgggaccgacgccaaggugaagcucaucaagcaggagcuggacaaguacaagaacgcggucacggagcugcagcuccugaugcaguccacccccgccaccggcagcggguccgccaucgccagcggcguggcggugugcaagguccugcaccucgagggcgaggugaacaagaucaaguccgcccugcugagcaccaacaaggccguggucucccucagcaacgggguguccgugcugacguucaagguccuggaccucaagaacuacaucgacaagcagcugcugccgauccucaacaagcagagcugcuccaucagcaacaucgagaccgugaucgaguuccagcagaagaacaaccggcugcuggagaucacccgcgaguucuccgugaacgccggcgucaccacgcccgugagcaccuacaugcucaccaacagcgagcugcugucccucaucaacgacaugcccaucaccaacgaccagaagaagcugaugagcaacaacgugcagaucguccggcagcaguccuacagcaucaugugcaucaucaaggaggaggugcuggccuacgugguccagcucccccuguacggggugaucgacacgccgugcuggaagcugcacaccagcccccucugcaccaccaacacgaaggagggcuccaacaucugccugacccgcaccgaccgggggugguacugcgacaacgcgggcuccgugagcuucuucccccaggccgagaccugcaagguccaguccaaccgcguguucugcgacacgaugaacagccggacccuccccuccgaggucaaccugugcaacguggacaucuucaacccgaaguacgacugcaagaucaugaccagcaagaccgacguguccagcuccgucaucacgagccugggcgccaucguguccugcuacgggaagaccaagugcaccgccagcaacaagaaccggggcaucaucaagaccuucuccaacgggugcgacuacgugagcaacaagggcgucgacacggugagcgugggcaacacccucuacuacgucaacaagcaggaggggaagucccuguacgugaagggcgagcccaucaucaacuucuacgacccccugguguuccccagcgacgaguucgacgccuccaucagccaggucaacgagaagaucaaccagucccucgcguucauccgcaagagcgacgagcugcugcacaacgugaacgccgggaaguccaccaccaacaucaugaucaccacgaucaucaucgugaucaucgucauccuccugagccugaucgccgugggccuccugcuguacugcaaggcccggugaggacuaguggaagcauuuuccuggcugauuaaaagaaauuacucagcuauggucaucuguuccuguuagaaggcuaugcagcauauuauauacuaugcgcauguuaugaaaugcauaauaaaaaauuuuaaaaaaucuaaaagaucuaaaaaaaaaaaaaaaaaaaaaaaaaaaaaaaaaaaaaaaaaaaaaaaaaaaaaaaaaaaaaaaaugcaucccccccccccccccccccccccccccccccaaaggcucuuuucagagccaccagaauu

SEQ ID NO: 4334 - RNA, 1916 nt, Artificial Sequence
  mRNA product Design c-4 comprising derived and/or modified sequence from HRSV(A2)__F-del_DSCav1_mut0 (opt2)
gggagaguccgcucagccagguugcagaagcggcuuagcguguguccuaaucuucucucugcguguagguaggccugugccgcaaacaagcuuaccauggagcuccucauccucaaggccaacgccaucaccaccauccucaccgccgucaccuucugcuucgccuccggccagaacaucaccgaggaguucuaccaguccaccugcuccgccgucuccaagggcuaccucuccgcccuccgcaccggcugguacaccuccgucaucaccaucgagcucuccaacaucaaggagaacaagugcaacggcaccgacgccaaggucaagcucaucaagcaggagcucgacaaguacaagaacgccgucaccgagcuccagcuccucaugcaguccacccccgccaccggcuccggcuccgccaucgccuccggcgucgccgucugcaagguccuccaccucgagggcgaggucaacaagaucaaguccgcccuccucuccaccaacaaggccgucgucucccucuccaacggcgucuccguccucaccuucaagguccucgaccucaagaacuacaucgacaagcagcuccuccccauccucaacaagcaguccugcuccaucuccaacaucgagaccgucaucgaguuccagcagaagaacaaccgccuccucgagaucacccgcgaguucuccgucaacgccggcgucaccacccccgucuccaccuacaugcucaccaacuccgagcuccucucccucaucaacgacaugcccaucaccaacgaccagaagaagcucauguccaacaacguccagaucguccgccagcaguccuacuccaucaugugcaucaucaaggaggagguccucgccuacgucguccagcucccccucuacggcgucaucgacacccccugcuggaagcuccacaccuccccccucugcaccaccaacaccaaggagggcuccaacaucugccucacccgcaccgaccgcggcugguacugcgacaacgccggcuccgucuccuucuucccccaggccgagaccugcaagguccaguccaaccgcgucuucugcgacaccaugaacucccgcacccuccccuccgaggucaaccucugcaacgucgacaucuucaaccccaaguacgacugcaagaucaugaccuccaagaccgacgucuccuccuccgucaucaccucccucggcgccaucgucuccugcuacggcaagaccaagugcaccgccuccaacaagaaccgcggcaucaucaagaccuucuccaacggcugcgacuacgucuccaacaagggcgucgacaccgucuccgucggcaacacccucuacuacgucaacaagcaggagggcaagucccucuacgucaagggcgagcccaucaucaacuucuacgacccccucgucuuccccuccgacgaguucgacgccuccaucucccaggucaacgagaagaucaaccagucccucgccuucauccgcaaguccgacgagcuccuccacaacgucaacgccggcaaguccaccaccaacaucaugaucaccaccaucaucaucgucaucaucgucauccuccucucccucaucgccgucggccuccuccucuacugcaaggcccgcugaggacuaguggaagcauuuuccuggcugauuaaaagaaauuacucagcuauggucaucuguuccuguuagaaggcuaugcagcauauuauauacuaugcgcauguuaugaaaugcauaauaaaaaauuuuaaaaaaucuaaaagaucuaaaaaaaaaaaaaaaaaaaaaaaaaaaaaaaaaaaaaaaaaaaaaaaaaaaaaaaaaaaaaaaaugcaucccccccccccccccccccccccccccccccaaaggcucuuuucagagccaccagaauu

SEQ ID NO: 4335 - RNA, 1916 nt, Artificial Sequence
  mRNA product Design c-4 comprising derived and/or modified sequence from HRSV(A2)__F-del_DSCav1_mut0 (opt3)
gggagaguccgcucagccagguugcagaagcggcuuagcguguguccuaaucuucucucugcguguagguaggccugugccgcaaacaagcuuaccauggagcugcucauccuuaaggccaacgcuauuaccacaauacugacugcagugacguucugcuuugccagcggccagaauaucaccgaagaguucuaccaauccacauguucugcggucucaaaaggguauuugagugcuuuaagaacuggaugguacaccagcguuauuacaaucgaacuguccaacauuaaggagaauaaaugcaacgguaccgacgccaaggugaaacuaaucaagcaggaacucgauaaguauaaaaaugcaguaacugagcugcagcuucugaugcagucuacacccgccaccggcucggggucagcuauagcaagcggaguggccgucuguaagguguugcaccucgagggcgaaguuaacaaaaucaagagugcucugcuguccacgaauaaagccguggucucucucagcaacgguguguccguauuaacuuuuaagguucuggaccuuaagaauuacauugauaaacaauugcugccuauccuaaacaagcagucaugcaguauuagcaauaucgagaccgugauagaguuccagcagaaaaacaauaggcuccuggaaauuacacgggaguuuucugucaacgcgggggugacuaccccaguguccacauauaugcuuaccaauucagaacuguugagccucaucaacgacaugccgauuacgaacgaucaaaagaaacugaugaguaauaacguccagaucguucgccagcagucuuacuccaucauguguauuauaaaggaggaaguguuagcauauguagugcaacugccccucuacggagucaucgacacuccuugcuggaaacuucauacaagcccacuguguaccacuaauacaaaggagggcucgaacauuugcuugacccgaacggaucguggcugguacugugacaaugccgggucuguguccuucuuuccccaggcugaaaccugcaagguucagucaaacagaguguucugugauacaaugaauaguagaacucugccuagcgaggucaaccucugcaauguggacaucuuuaacccaaaauaugauugcaagauaaugaccuccaaaacagacguaucuagcucaguuauuaccagucugggagccaucguguccuguuacgguaagacuaaaugcacagcaagcaauaagaacaggggcaucauuaagaccuucucuaaugggugugauuaugucucaaacaaaggaguggacacugucagugugggcaauacgcuuuacuauguuaacaagcaagaggguaaaagccuguacgugaagggggaacccaucauuaacuuuuaugacccuuugguauucccauccgaugaguuugacgcuucuauaucgcaggucaaugagaaaaucaaccagagccucgccuucauucggaaguccgaugaacuguuacacaaugugaacgcgggaaagucaacaaccaauaucaugaucacuaccauuauaaucguuauuaucgugauucugcuaagucucaucgccgucggccugcuuuuguacugcaaagcacgcugaggacuaguggaagcauuuuccuggcugauuaaaagaaauuacucagcuauggucaucuguuccuguuagaaggcuaugcagcauauuauauacuaugcgcauguuaugaaaugcauaauaaaaaauuuuaaaaaaucuaaaagaucuaaaaaaaaaaaaaaaaaaaaaaaaaaaaaaaaaaaaaaaaaaaaaaaaaaaaaaaaaaaaaaaaugcaucccccccccccccccccccccccccccccccaaaggcucuuuucagagccaccagaauu

SEQ ID NO: 4336 - RNA, 1916 nt, Artificial Sequence
  mRNA product Design c-4 comprising derived and/or modified sequence from HRSV(A2)__F-del_DSCav1_mut0 (opt4)
gggagaguccgcucagccagguugcagaagcggcuuagcguguguccuaaucuucucucugcguguagguaggccugugccgcaaacaagcuuaccauggagcugcugauccugaaggccaacgccaucaccaccauccugaccgccgugaccuucugcuucgccagcggccagaacaucaccgaggaguucuaccagagcaccugcagcgccgugagcaagggcuaccugagcgcccugagaaccggcugguacaccagcgugaucaccaucgagcugagcaacaucaaggagaacaagugcaacggcaccgacgccaaggugaagcugaucaagcaggagcuggacaaguacaagaacgccgugaccgagcugcagcugcugaugcagagcacccccgccaccggcagcggcagcgccaucgccagcggcguggccgugugcaaggugcugcaccuggagggcgaggugaacaagaucaagagcgcccugcugagcaccaacaaggccguggugagccugagcaacggcgugagcgugcugaccuucaaggugcuggaccugaagaacuacaucgacaagcagcugcugcccauccugaacaagcagagcugcagcaucagcaacaucgagaccgugaucgaguuccagcagaagaacaacagacugcuggagaucaccagagaguucagcgugaacgccggcgugaccacccccgugagcaccuacaugcugaccaacagcgagcugcugagccugaucaacgacaugcccaucaccaacgaccagaagaagcugaugagcaacaacgugcagaucgugagacagcagagcuacagcaucaugugcaucaucaaggaggaggugcuggccuacguggugcagcugccccuguacggcgugaucgacacccccugcuggaagcugcacaccagcccccugugcaccaccaacaccaaggagggcagcaacaucugccugaccagaaccgacagaggcugguacugcgacaacgccggcagcgugagcuucuucccccaggccgagaccugcaaggugcagagcaacagaguguucugcgacaccaugaacagcagaacccugcccagcgaggugaaccugugcaacguggacaucuucaaccccaaguacgacugcaagaucaugaccagcaagaccgacgugagcagcagcgugaucaccagccugggcgccaucgugagcugcuacggcaagaccaagugcaccgccagcaacaagaacagaggcaucaucaagaccuucagcaacggcugcgacuacgugagcaacaagggcguggacaccgugagcgugggcaacacccuguacuacgugaacaagcaggagggcaagagccuguacgugaagggcgagcccaucaucaacuucuacgacccccugguguuccccagcgacgaguucgacgccagcaucagccaggugaacgagaagaucaaccagagccuggccuucaucagaaagagcgacgagcugcugcacaacgugaacgccggcaagagcaccaccaacaucaugaucaccaccaucaucaucgugaucaucgugauccugcugagccugaucgccgugggccugcugcuguacugcaaggccagaugaggacuaguggaagcauuuuccuggcugauuaaaagaaauuacucagcuauggucaucuguuccuguuagaaggcuaugcagcauauuauauacuaugcgcauguuaugaaaugcauaauaaaaaauuuuaaaaaaucuaaaagaucuaaaaaaaaaaaaaaaaaaaaaaaaaaaaaaaaaaaaaaaaaaaaaaaaaaaaaaaaaaaaaaaaugcaucccccccccccccccccccccccccccccccaaaggcucuuuucagagccaccagaauu

SEQ ID NO: 4337 - RNA, 1916 nt, Artificial Sequence
  mRNA product Design c-4 comprising derived and/or modified sequence from HRSV(A2)__F-del_DSCav1_mut0 (opt5)
gggagaguccgcucagccagguugcagaagcggcuuagcguguguccuaaucuucucucugcguguagguaggccugugccgcaaacaagcuuaccauggagcugcucauccugaaggccaacgcuauuaccacaauccuuacggccgugaccuucugcuuugcgagcggccagaauauuacagaagaguucuaccaauccaccuguucugcugucagcaaaggguaucuguccgcccucagaacaggaugguacaccucuguuaucacaauugaacugagcaacaucaaggagaauaaaugcaacggcaccgacgccaaggugaaacuuaucaagcaggaacuggauaaguauaaaaaugcugugacggagcuccagcugcugaugcaguccacccccgccacagggucuggaagcgcuauugccuccggcgucgcgguguguaagguucuccaccuggagggggaagugaacaaaaucaagagcgcccuucugucuaccaauaaagcugucgugucccucagcaacggaguuucugugcugacauuuaagguccuugaccugaagaauuacauugauaaacaacuccugccuauccugaacaagcaguccugcagcauuucuaauaucgagaccgugauugaguuccagcagaaaaacaaucggcuccuggaaaucacgcgcgaguuuuccgugaacgccggcgucacaaccccgguuagcacauauaugcuuaccaauuccgaacugcucucucugaucaacgacaugcccauuaccaacgaucaaaagaaacuuaugagcaauaacgugcagaucgugagacagcaguccuacagcauuauguguaucauuaaggaggaaguccuggcuuaugugguucaacucccucuguacggcgugaucgacacacccugcuggaaacugcauacgucuccucucuguaccacaaauaccaaggagggguccaacaucugccugacacggaccgaucgcggaugguacugugacaaugccggcagcgucucuuucuuuccccaggcggaaacgugcaaggugcagagcaacagaguuuucugugauacaaugaacuccagaacccugccuucugaggugaaucucugcaaugucgacauuuuuaacccgaaauaugauugcaagaucaugaccagcaaaacagacguguccagcucugucauuaccucccugggggccaucgugagcuguuacggaaagacaaaaugcacggcuucuaauaagaaccggggcauuaucaagaccuucuccaaugggugugauuauguuagcaacaaaggaguggacacagucuccgugggcaauacccuuuacuauguuaacaagcaagagggcaaaucucuguacgugaagggggaacccaucauuaacuuuuaugacccucucgucuuccccagcgaugaguuugacgccuccaucucucaggugaaugagaaaauuaaccagagccuggcuuucauccgcaaguccgaugaacugcuccacaaugugaacgccggaaagagcacaaccaauauuaugaucacgaccauuaucaucguuauuaucgucauucugcuuucucugaucgccgugggccuccugcuguacugcaaagcuagaugaggacuaguggaagcauuuuccuggcugauuaaaagaaauuacucagcuauggucaucuguuccuguuagaaggcuaugcagcauauuauauacuaugcgcauguuaugaaaugcauaauaaaaaauuuuaaaaaaucuaaaagaucuaaaaaaaaaaaaaaaaaaaaaaaaaaaaaaaaaaaaaaaaaaaaaaaaaaaaaaaaaaaaaaaaugcaucccccccccccccccccccccccccccccccaaaggcucuuuucagagccaccagaauu

SEQ ID NO: 4338 - RNA, 1916 nt, Artificial Sequence
  mRNA product Design c-4 comprising derived and/or modified sequence from HRSV(A2)__F-del_DSCav1_mut0 (opt6)
gggagaguccgcucagccagguugcagaagcggcuuagcguguguccuaaucuucucucugcguguagguaggccugugccgcaaacaagcuuaccauggaauuacucauccucaaagcaaacgcaauaacaacaauacuaacagcagucacuuucugcuucgcauccggacaaaauaucacagaagaauuuuaccaauccaccugcucugcugucuccaaaggauaccuaucugcccucagaaccgguugguauacaucugucauaaccauagaacuaucaaacauuaaagaaaacaaauguaacggaacagacgcaaaagucaaacuuauaaaacaagaauuagacaaauacaaaaacgcagucacagaauuacaacuacuaaugcaaucaaccccagcaaccggaucaggauccgcaauagcuucaggaguagcaguauguaaaguucuacacuuagaaggagaagucaacaaaauuaaauccgcacuauuaucaaccaacaaagcagucguaucuuuaucaaacggaguaucuguacuuacauucaaaguacuagaccuaaaaaauuacauugauaaacaauuacuaccaauacuaaacaaacaaucauguuccaucucuaacauagaaacaguaauagaauuucaacaaaaaaauaacagauuacuugaaaucacccgagaauuuucaguaaacgcaggaguaaccacacccguaucuacauacaugcuaacaaacucugaacuucugagccuaauaaaugacaugccaauaaccaacgaccaaaaaaaacuaauguccaacaacguacaaauaguacgacaacaaucuuacucaaucaugugcauaaucaaagaagaaguacuagcuuauguaguccaacuuccacucuacggaguaauagacacccccugcuggaaacuacacacaucaccacuaugcacaacaaacacaaaagaaggcucaaacauaugccuaacaagaacugacagaggaugguauugugacaaugcaggcucugucucauucuuuccacaagccgaaacaugcaaaguucaaucaaaccgaguuuucugugacacaaugaacucuagaacucucccaucagaagucaacuuaugcaacguugacauauucaacccaaaauaugacuguaaaauaaugacuuccaaaacugauguaucauccuccgucauaacaucccuaggagcuauuguaucauguuacgggaaaaccaaaugcacagccucaaacaaaaaccgcgguaucauaaaaacauuuucaaacggaugugauuacguaagcaauaaaggaguagacaccguaucaguaggaaauacacuauacuauguaaauaaacaagaaggaaaaucacuauaugucaaaggagaaccaaucauaaauuucuaugacccacuuguauucccauccgaugaauuugacgcaagcauuucacaggucaacgaaaaaauaaaccaaucacuagccuucaucagaaaaucagacgaacuacuacauaacguaaacgccggaaaaucaacaaccaacauaaugauaacaacaaucauaauaguuaucauaguaauacuacuaucucuaauagcugucggacucuuacuauauugcaaagcccgauaaggacuaguggaagcauuuuccuggcugauuaaaagaaauuacucagcuauggucaucuguuccuguuagaaggcuaugcagcauauuauauacuaugcgcauguuaugaaaugcauaauaaaaaauuuuaaaaaaucuaaaagaucuaaaaaaaaaaaaaaaaaaaaaaaaaaaaaaaaaaaaaaaaaaaaaaaaaaaaaaaaaaaaaaaaugcaucccccccccccccccccccccccccccccccaaaggcucuuuucagagccaccagaauu

SEQ ID NO: 4339 - RNA, 1916 nt, Artificial Sequence
  mRNA product Design c-4 comprising derived and/or modified sequence from HRSV(A2)__F-del_DSCav1_mut0 (opt11)
gggagaguccgcucagccagguugcagaagcggcuuagcguguguccuaaucuucucucugcguguagguaggccugugccgcaaacaagcuuaccauggaacuacuaauccugaaagccaacgccauaaccacaauccuuaccgcagucaccuucugcuucgccuccggucaaaacaucacagaagaguucuaccaauccaccuguuccgcagucagcaaaggcuaccucuccgcacuccgaaccggaugguacaccagcgucaucaccaucgaacuauccaacauaaaggaaaauaagugcaaugguacagaugccaaggucaaacucauaaagcaagaacucgacaaauacaaaaacgccgucaccgaacuacaacuacuaaugcaaucuacccccgcaacaggcucagguuccgccauagccuccggcgucgccguuugcaaaguccuccaccucgaaggcgaaguaaacaaaaucaaauccgcccuacucucaaccaacaaagcagucgucucccucucaaacggagucucgguccucaccuucaaaguccucgaccucaaaaacuauauagacaaacaacuccuacccauacucaacaaacaguccugcagcauauccaacaucgaaaccgugaucgaguuccaacagaaaaacaacagacuccucgaaaucacucgagaguucuccguaaacgccggcgucacaaccccagucucaacauacaugcucaccaacagcgaacuccuaucacuaaucaacgacaugccuaucacaaaugaucagaagaaacuaaugagcaacaacguccaaaucguccgccaacaaucauacuccaucaugugcaucauaaaagaagaaguccuagccuacgugguccagcuaccccucuacggcguaauugacaccccuugcuggaaacuacacacuucaccccucugcacaaccaacaccaaagaagguucaaacaucugccucacacgaacagaccgcggcugguacugcgacaacgccggauccguauccuucuucccccaagcagaaaccugcaaaguucaauccaaccggguauucugcgacaccaugaacucaagaacccuucccuccgaaguaaaucuaugcaacgucgacauauucaacccaaaauacgacugcaaaaucaugaccuccaaaaccgaugucuccagcagcgucaucaccagccucggcgccaucgucuccugcuacggcaaaacaaaauguacagcauccaacaaaaaccgaggcauaaucaaaaccuucuccaacgggugcgauuacgucagcaacaaaggcgucgacaccgucuccgugggcaacacccuauacuacgucaacaaacaagaaggcaaaucacuguacguaaagggcgaacccaucaucaacuucuaugacccucugguguucccauccgaugaauuugacgcauccauaucucaggucaacgaaaagaucaaccaaucccucgccuucauacgcaaauccgacgaacuccuacacaacgucaacgcugguaaaagcaccaccaacaucaugaucaccacaaucaucaucgucauaaucguuauccuacucucccuuauagcagucggacuccuccucuacugcaaagcccgcuaaggacuaguggaagcauuuuccuggcugauuaaaagaaauuacucagcuauggucaucuguuccuguuagaaggcuaugcagcauauuauauacuaugcgcauguuaugaaaugcauaauaaaaaauuuuaaaaaaucuaaaagaucuaaaaaaaaaaaaaaaaaaaaaaaaaaaaaaaaaaaaaaaaaaaaaaaaaaaaaaaaaaaaaaaaugcaucccccccccccccccccccccccccccccccaaaggcucuuuucagagccaccagaauu

SEQ ID NO: 4340 - RNA, 1834 nt, Artificial Sequence
  mRNA product Design c-5 comprising derived and/or modified sequence from HRSV(A2)__F-del_DSCav1_mut0 (opt1)
gggagagcggcucggccauuuugucccagucaguccggaggcugcggcugcagaaguaccgccugcggaguaacugcaaagaagcuuaccauggagcugcucauccugaaggccaacgccaucaccaccauccugacggcggugaccuucugcuucgccagcggccagaacaucaccgaggaguucuaccaguccacgugcagcgccgucuccaagggguaccucagcgcccugcggaccggcugguacaccuccgugaucaccaucgagcugagcaacaucaaggagaacaagugcaacgggaccgacgccaaggugaagcucaucaagcaggagcuggacaaguacaagaacgcggucacggagcugcagcuccugaugcaguccaccccggcaaccggcuccggcuccgccaucgcgagcggcgucgccgugugcaaggugcugcaccucgagggggaggucaacaagaucaagagcgcccugcuguccaccaacaaggccguggugagccucuccaacggcgucagcgugcugaccuucaaggugcuggaccucaagaacuacaucgacaagcagcugcugcccauccugaacaagcagagcugcuccaucagcaacaucgagacggugaucgaguuccagcagaagaacaaccggcuccuggagaucacccgcgaguucagcgugaacgccggggucaccacccccguguccacguacaugcugaccaacagcgagcuccugucccugaucaacgacaugccgaucaccaacgaccagaagaagcucaugagcaacaacgugcagaucguccggcagcaguccuacagcaucaugugcaucaucaaggaggaggugcuggcguacgugguccagcugccccucuacggcgugaucgacacccccugcuggaagcugcacacgagcccccugugcaccaccaacaccaaggagggguccaacaucugccucacgcgcaccgaccggggcugguacugcgacaacgccggcagcgucuccuucuucccgcaggccgagaccugcaaggugcagagcaaccgcguguucugcgacaccaugaacucccggacgcugcccagcgagguaaaccucugcaacgucgacaucuucaaccccaaguacgacugcaagaucaugaccuccaagaccgacgugagcuccagcgugaucaccucccugggggccaucgucagcugcuacggcaagacgaagugcaccgccagcaacaagaaccgggggaucaucaagaccuucuccaacggcugcgacuacgugagcaacaagggcguggacaccguguccgucgggaacacccuguacuacgugaacaagcaggagggcaagagccucuacgugaagggggagcccaucaucaacuucuacgacccgcuggucuuccccuccgacgaguucgacgcgagcaucucccaggugaacgagaagaucaaccagagccuggccuucauccgcaaguccgacgagcugcuccacaacgugaacgccggcaagagcacgaccaacaucaugaucaccaccaucaucaucgucaucaucgugauccugcugucccucaucgccguggggcugcugcucuacugcaaggcccggugaggacuagucccuguucccagagcccacuuuuuuuucuuuuuuugaaauaaaauagccugucuuucagaucuaaaaaaaaaaaaaaaaaaaaaaaaaaaaaaaaaaaaaaaaaaaaaaaaaaaaaaaaaaaaaaaaugcaucccccccccccccccccccccccccccccccaaaggcucuuuucagagccaccagaauu

SEQ ID NO: 4341 - RNA, 1834 nt, Artificial Sequence
  mRNA product Design c-5 comprising derived and/or modified sequence from HRSV(A2)__F-del_DSCav1_mut0 (opt1)
gggagagcggcucggccauuuugucccagucaguccggaggcugcggcugcagaaguaccgccugcggaguaacugcaaagaagcuuaccauggagcugcucauccugaaggccaacgccaucaccaccauccugacggcggugaccuucugcuucgccagcggccagaacaucaccgaggaguucuaccaguccacgugcagcgccgucuccaagggguaccucagcgcccugcgcaccggcugguacaccuccgugaucaccaucgagcugagcaacaucaaggagaacaagugcaacgggaccgacgccaaggugaagcucaucaagcaggagcuggacaaguacaagaacgcggucacggagcugcagcuccugaugcaguccacccccgccaccggcagcggguccgccaucgccagcggcguggcggugugcaagguccugcaccucgagggcgaggugaacaagaucaaguccgcccugcugagcaccaacaaggccguggucucccucagcaacgggguguccgugcugacguucaagguccuggaccucaagaacuacaucgacaagcagcugcugccgauccucaacaagcagagcugcuccaucagcaacaucgagaccgugaucgaguuccagcagaagaacaaccggcugcuggagaucacccgcgaguucuccgugaacgccggcgucaccacgcccgugagcaccuacaugcucaccaacagcgagcugcugucccucaucaacgacaugcccaucaccaacgaccagaagaagcugaugagcaacaacgugcagaucguccggcagcaguccuacagcaucaugugcaucaucaaggaggaggugcuggccuacgugguccagcucccccuguacggggugaucgacacgccgugcuggaagcugcacaccagcccccucugcaccaccaacacgaaggagggcuccaacaucugccugacccgcaccgaccgggggugguacugcgacaacgcgggcuccgugagcuucuucccccaggccgagaccugcaagguccaguccaaccgcguguucugcgacacgaugaacagccggacccuccccuccgaggucaaccugugcaacguggacaucuucaacccgaaguacgacugcaagaucaugaccagcaagaccgacguguccagcuccgucaucacgagccugggcgccaucguguccugcuacgggaagaccaagugcaccgccagcaacaagaaccggggcaucaucaagaccuucuccaacgggugcgacuacgugagcaacaagggcgucgacacggugagcgugggcaacacccucuacuacgucaacaagcaggaggggaagucccuguacgugaagggcgagcccaucaucaacuucuacgacccccugguguuccccagcgacgaguucgacgccuccaucagccaggucaacgagaagaucaaccagucccucgcguucauccgcaagagcgacgagcugcugcacaacgugaacgccgggaaguccaccaccaacaucaugaucaccacgaucaucaucgugaucaucgucauccuccugagccugaucgccgugggccuccugcuguacugcaaggcccggugaggacuagucccuguucccagagcccacuuuuuuuucuuuuuuugaaauaaaauagccugucuuucagaucuaaaaaaaaaaaaaaaaaaaaaaaaaaaaaaaaaaaaaaaaaaaaaaaaaaaaaaaaaaaaaaaaugcaucccccccccccccccccccccccccccccccaaaggcucuuuucagagccaccagaauu

SEQ ID NO: 4342 - RNA, 1834 nt, Artificial Sequence
  mRNA product Design c-5 comprising derived and/or modified sequence from HRSV(A2)__F-del_DSCav1_mut0 (opt2)
gggagagcggcucggccauuuugucccagucaguccggaggcugcggcugcagaaguaccgccugcggaguaacugcaaagaagcuuaccauggagcuccucauccucaaggccaacgccaucaccaccauccucaccgccgucaccuucugcuucgccuccggccagaacaucaccgaggaguucuaccaguccaccugcuccgccgucuccaagggcuaccucuccgcccuccgcaccggcugguacaccuccgucaucaccaucgagcucuccaacaucaaggagaacaagugcaacggcaccgacgccaaggucaagcucaucaagcaggagcucgacaaguacaagaacgccgucaccgagcuccagcuccucaugcaguccacccccgccaccggcuccggcuccgccaucgccuccggcgucgccgucugcaagguccuccaccucgagggcgaggucaacaagaucaaguccgcccuccucuccaccaacaaggccgucgucucccucuccaacggcgucuccguccucaccuucaagguccucgaccucaagaacuacaucgacaagcagcuccuccccauccucaacaagcaguccugcuccaucuccaacaucgagaccgucaucgaguuccagcagaagaacaaccgccuccucgagaucacccgcgaguucuccgucaacgccggcgucaccacccccgucuccaccuacaugcucaccaacuccgagcuccucucccucaucaacgacaugcccaucaccaacgaccagaagaagcucauguccaacaacguccagaucguccgccagcaguccuacuccaucaugugcaucaucaaggaggagguccucgccuacgucguccagcucccccucuacggcgucaucgacacccccugcuggaagcuccacaccuccccccucugcaccaccaacaccaaggagggcuccaacaucugccucacccgcaccgaccgcggcugguacugcgacaacgccggcuccgucuccuucuucccccaggccgagaccugcaagguccaguccaaccgcgucuucugcgacaccaugaacucccgcacccuccccuccgaggucaaccucugcaacgucgacaucuucaaccccaaguacgacugcaagaucaugaccuccaagaccgacgucuccuccuccgucaucaccucccucggcgccaucgucuccugcuacggcaagaccaagugcaccgccuccaacaagaaccgcggcaucaucaagaccuucuccaacggcugcgacuacgucuccaacaagggcgucgacaccgucuccgucggcaacacccucuacuacgucaacaagcaggagggcaagucccucuacgucaagggcgagcccaucaucaacuucuacgacccccucgucuuccccuccgacgaguucgacgccuccaucucccaggucaacgagaagaucaaccagucccucgccuucauccgcaaguccgacgagcuccuccacaacgucaacgccggcaaguccaccaccaacaucaugaucaccaccaucaucaucgucaucaucgucauccuccucucccucaucgccgucggccuccuccucuacugcaaggcccgcugaggacuagucccuguucccagagcccacuuuuuuuucuuuuuuugaaauaaaauagccugucuuucagaucuaaaaaaaaaaaaaaaaaaaaaaaaaaaaaaaaaaaaaaaaaaaaaaaaaaaaaaaaaaaaaaaaugcaucccccccccccccccccccccccccccccccaaaggcucuuuucagagccaccagaauu

SEQ ID NO: 4343 - RNA, 1834 nt, Artificial Sequence
  mRNA product Design c-5 comprising derived and/or modified sequence from HRSV(A2)__F-del_DSCav1_mut0 (opt3)
gggagagcggcucggccauuuugucccagucaguccggaggcugcggcugcagaaguaccgccugcggaguaacugcaaagaagcuuaccauggagcugcucauccuuaaggccaacgcuauuaccacaauacugacugcagugacguucugcuuugccagcggccagaauaucaccgaagaguucuaccaauccacauguucugcggucucaaaaggguauuugagugcuuuaagaacuggaugguacaccagcguuauuacaaucgaacuguccaacauuaaggagaauaaaugcaacgguaccgacgccaaggugaaacuaaucaagcaggaacucgauaaguauaaaaaugcaguaacugagcugcagcuucugaugcagucuacacccgccaccggcucggggucagcuauagcaagcggaguggccgucuguaagguguugcaccucgagggcgaaguuaacaaaaucaagagugcucugcuguccacgaauaaagccguggucucucucagcaacgguguguccguauuaacuuuuaagguucuggaccuuaagaauuacauugauaaacaauugcugccuauccuaaacaagcagucaugcaguauuagcaauaucgagaccgugauagaguuccagcagaaaaacaauaggcuccuggaaauuacacgggaguuuucugucaacgcgggggugacuaccccaguguccacauauaugcuuaccaauucagaacuguugagccucaucaacgacaugccgauuacgaacgaucaaaagaaacugaugaguaauaacguccagaucguucgccagcagucuuacuccaucauguguauuauaaaggaggaaguguuagcauauguagugcaacugccccucuacggagucaucgacacuccuugcuggaaacuucauacaagcccacuguguaccacuaauacaaaggagggcucgaacauuugcuugacccgaacggaucguggcugguacugugacaaugccgggucuguguccuucuuuccccaggcugaaaccugcaagguucagucaaacagaguguucugugauacaaugaauaguagaacucugccuagcgaggucaaccucugcaauguggacaucuuuaacccaaaauaugauugcaagauaaugaccuccaaaacagacguaucuagcucaguuauuaccagucugggagccaucguguccuguuacgguaagacuaaaugcacagcaagcaauaagaacaggggcaucauuaagaccuucucuaaugggugugauuaugucucaaacaaaggaguggacacugucagugugggcaauacgcuuuacuauguuaacaagcaagaggguaaaagccuguacgugaagggggaacccaucauuaacuuuuaugacccuuugguauucccauccgaugaguuugacgcuucuauaucgcaggucaaugagaaaaucaaccagagccucgccuucauucggaaguccgaugaacuguuacacaaugugaacgcgggaaagucaacaaccaauaucaugaucacuaccauuauaaucguuauuaucgugauucugcuaagucucaucgccgucggccugcuuuuguacugcaaagcacgcugaggacuagucccuguucccagagcccacuuuuuuuucuuuuuuugaaauaaaauagccugucuuucagaucuaaaaaaaaaaaaaaaaaaaaaaaaaaaaaaaaaaaaaaaaaaaaaaaaaaaaaaaaaaaaaaaaugcaucccccccccccccccccccccccccccccccaaaggcucuuuucagagccaccagaauu

SEQ ID NO: 4344 - RNA, 1834 nt, Artificial Sequence
  mRNA product Design c-5 comprising derived and/or modified sequence from HRSV(A2)__F-del_DSCav1_mut0 (opt4)
gggagagcggcucggccauuuugucccagucaguccggaggcugcggcugcagaaguaccgccugcggaguaacugcaaagaagcuuaccauggagcugcugauccugaaggccaacgccaucaccaccauccugaccgccgugaccuucugcuucgccagcggccagaacaucaccgaggaguucuaccagagcaccugcagcgccgugagcaagggcuaccugagcgcccugagaaccggcugguacaccagcgugaucaccaucgagcugagcaacaucaaggagaacaagugcaacggcaccgacgccaaggugaagcugaucaagcaggagcuggacaaguacaagaacgccgugaccgagcugcagcugcugaugcagagcacccccgccaccggcagcggcagcgccaucgccagcggcguggccgugugcaaggugcugcaccuggagggcgaggugaacaagaucaagagcgcccugcugagcaccaacaaggccguggugagccugagcaacggcgugagcgugcugaccuucaaggugcuggaccugaagaacuacaucgacaagcagcugcugcccauccugaacaagcagagcugcagcaucagcaacaucgagaccgugaucgaguuccagcagaagaacaacagacugcuggagaucaccagagaguucagcgugaacgccggcgugaccacccccgugagcaccuacaugcugaccaacagcgagcugcugagccugaucaacgacaugcccaucaccaacgaccagaagaagcugaugagcaacaacgugcagaucgugagacagcagagcuacagcaucaugugcaucaucaaggaggaggugcuggccuacguggugcagcugccccuguacggcgugaucgacacccccugcuggaagcugcacaccagcccccugugcaccaccaacaccaaggagggcagcaacaucugccugaccagaaccgacagaggcugguacugcgacaacgccggcagcgugagcuucuucccccaggccgagaccugcaaggugcagagcaacagaguguucugcgacaccaugaacagcagaacccugcccagcgaggugaaccugugcaacguggacaucuucaaccccaaguacgacugcaagaucaugaccagcaagaccgacgugagcagcagcgugaucaccagccugggcgccaucgugagcugcuacggcaagaccaagugcaccgccagcaacaagaacagaggcaucaucaagaccuucagcaacggcugcgacuacgugagcaacaagggcguggacaccgugagcgugggcaacacccuguacuacgugaacaagcaggagggcaagagccuguacgugaagggcgagcccaucaucaacuucuacgacccccugguguuccccagcgacgaguucgacgccagcaucagccaggugaacgagaagaucaaccagagccuggccuucaucagaaagagcgacgagcugcugcacaacgugaacgccggcaagagcaccaccaacaucaugaucaccaccaucaucaucgugaucaucgugauccugcugagccugaucgccgugggccugcugcuguacugcaaggccagaugaggacuagucccuguucccagagcccacuuuuuuuucuuuuuuugaaauaaaauagccugucuuucagaucuaaaaaaaaaaaaaaaaaaaaaaaaaaaaaaaaaaaaaaaaaaaaaaaaaaaaaaaaaaaaaaaaugcaucccccccccccccccccccccccccccccccaaaggcucuuuucagagccaccagaauu

SEQ ID NO: 4345 - RNA, 1834 nt, Artificial Sequence
  mRNA product Design c-5 comprising derived and/or modified sequence from HRSV(A2)__F-del_DSCav1_mut0 (opt5)
gggagagcggcucggccauuuugucccagucaguccggaggcugcggcugcagaaguaccgccugcggaguaacugcaaagaagcuuaccauggagcugcucauccugaaggccaacgcuauuaccacaauccuuacggccgugaccuucugcuuugcgagcggccagaauauuacagaagaguucuaccaauccaccuguucugcugucagcaaaggguaucuguccgcccucagaacaggaugguacaccucuguuaucacaauugaacugagcaacaucaaggagaauaaaugcaacggcaccgacgccaaggugaaacuuaucaagcaggaacuggauaaguauaaaaaugcugugacggagcuccagcugcugaugcaguccacccccgccacagggucuggaagcgcuauugccuccggcgucgcgguguguaagguucuccaccuggagggggaagugaacaaaaucaagagcgcccuucugucuaccaauaaagcugucgugucccucagcaacggaguuucugugcugacauuuaagguccuugaccugaagaauuacauugauaaacaacuccugccuauccugaacaagcaguccugcagcauuucuaauaucgagaccgugauugaguuccagcagaaaaacaaucggcuccuggaaaucacgcgcgaguuuuccgugaacgccggcgucacaaccccgguuagcacauauaugcuuaccaauuccgaacugcucucucugaucaacgacaugcccauuaccaacgaucaaaagaaacuuaugagcaauaacgugcagaucgugagacagcaguccuacagcauuauguguaucauuaaggaggaaguccuggcuuaugugguucaacucccucuguacggcgugaucgacacacccugcuggaaacugcauacgucuccucucuguaccacaaauaccaaggagggguccaacaucugccugacacggaccgaucgcggaugguacugugacaaugccggcagcgucucuuucuuuccccaggcggaaacgugcaaggugcagagcaacagaguuuucugugauacaaugaacuccagaacccugccuucugaggugaaucucugcaaugucgacauuuuuaacccgaaauaugauugcaagaucaugaccagcaaaacagacguguccagcucugucauuaccucccugggggccaucgugagcuguuacggaaagacaaaaugcacggcuucuaauaagaaccggggcauuaucaagaccuucuccaaugggugugauuauguuagcaacaaaggaguggacacagucuccgugggcaauacccuuuacuauguuaacaagcaagagggcaaaucucuguacgugaagggggaacccaucauuaacuuuuaugacccucucgucuuccccagcgaugaguuugacgccuccaucucucaggugaaugagaaaauuaaccagagccuggcuuucauccgcaaguccgaugaacugcuccacaaugugaacgccggaaagagcacaaccaauauuaugaucacgaccauuaucaucguuauuaucgucauucugcuuucucugaucgccgugggccuccugcuguacugcaaagcuagaugaggacuagucccuguucccagagcccacuuuuuuuucuuuuuuugaaauaaaauagccugucuuucagaucuaaaaaaaaaaaaaaaaaaaaaaaaaaaaaaaaaaaaaaaaaaaaaaaaaaaaaaaaaaaaaaaaugcaucccccccccccccccccccccccccccccccaaaggcucuuuucagagccaccagaauu

SEQ ID NO: 4346 - RNA, 1834 nt, Artificial Sequence
  mRNA product Design c-5 comprising derived and/or modified sequence from HRSV(A2)__F-del_DSCav1_mut0 (opt6)
gggagagcggcucggccauuuugucccagucaguccggaggcugcggcugcagaaguaccgccugcggaguaacugcaaagaagcuuaccauggaauuacucauccucaaagcaaacgcaauaacaacaauacuaacagcagucacuuucugcuucgcauccggacaaaauaucacagaagaauuuuaccaauccaccugcucugcugucuccaaaggauaccuaucugcccucagaaccgguugguauacaucugucauaaccauagaacuaucaaacauuaaagaaaacaaauguaacggaacagacgcaaaagucaaacuuauaaaacaagaauuagacaaauacaaaaacgcagucacagaauuacaacuacuaaugcaaucaaccccagcaaccggaucaggauccgcaauagcuucaggaguagcaguauguaaaguucuacacuuagaaggagaagucaacaaaauuaaauccgcacuauuaucaaccaacaaagcagucguaucuuuaucaaacggaguaucuguacuuacauucaaaguacuagaccuaaaaaauuacauugauaaacaauuacuaccaauacuaaacaaacaaucauguuccaucucuaacauagaaacaguaauagaauuucaacaaaaaaauaacagauuacuugaaaucacccgagaauuuucaguaaacgcaggaguaaccacacccguaucuacauacaugcuaacaaacucugaacuucugagccuaauaaaugacaugccaauaaccaacgaccaaaaaaaacuaauguccaacaacguacaaauaguacgacaacaaucuuacucaaucaugugcauaaucaaagaagaaguacuagcuuauguaguccaacuuccacucuacggaguaauagacacccccugcuggaaacuacacacaucaccacuaugcacaacaaacacaaaagaaggcucaaacauaugccuaacaagaacugacagaggaugguauugugacaaugcaggcucugucucauucuuuccacaagccgaaacaugcaaaguucaaucaaaccgaguuuucugugacacaaugaacucuagaacucucccaucagaagucaacuuaugcaacguugacauauucaacccaaaauaugacuguaaaauaaugacuuccaaaacugauguaucauccuccgucauaacaucccuaggagcuauuguaucauguuacgggaaaaccaaaugcacagccucaaacaaaaaccgcgguaucauaaaaacauuuucaaacggaugugauuacguaagcaauaaaggaguagacaccguaucaguaggaaauacacuauacuauguaaauaaacaagaaggaaaaucacuauaugucaaaggagaaccaaucauaaauuucuaugacccacuuguauucccauccgaugaauuugacgcaagcauuucacaggucaacgaaaaaauaaaccaaucacuagccuucaucagaaaaucagacgaacuacuacauaacguaaacgccggaaaaucaacaaccaacauaaugauaacaacaaucauaauaguuaucauaguaauacuacuaucucuaauagcugucggacucuuacuauauugcaaagcccgauaaggacuagucccuguucccagagcccacuuuuuuuucuuuuuuugaaauaaaauagccugucuuucagaucuaaaaaaaaaaaaaaaaaaaaaaaaaaaaaaaaaaaaaaaaaaaaaaaaaaaaaaaaaaaaaaaaugcaucccccccccccccccccccccccccccccccaaaggcucuuuucagagccaccagaauu

SEQ ID NO: 4347 - RNA, 1834 nt, Artificial Sequence
  mRNA product Design c-5 comprising derived and/or modified sequence from HRSV(A2)__F-del_DSCav1_mut0 (opt11)
gggagagcggcucggccauuuugucccagucaguccggaggcugcggcugcagaaguaccgccugcggaguaacugcaaagaagcuuaccauggaacuacuaauccugaaagccaacgccauaaccacaauccuuaccgcagucaccuucugcuucgccuccggucaaaacaucacagaagaguucuaccaauccaccuguuccgcagucagcaaaggcuaccucuccgcacuccgaaccggaugguacaccagcgucaucaccaucgaacuauccaacauaaaggaaaauaagugcaaugguacagaugccaaggucaaacucauaaagcaagaacucgacaaauacaaaaacgccgucaccgaacuacaacuacuaaugcaaucuacccccgcaacaggcucagguuccgccauagccuccggcgucgccguuugcaaaguccuccaccucgaaggcgaaguaaacaaaaucaaauccgcccuacucucaaccaacaaagcagucgucucccucucaaacggagucucgguccucaccuucaaaguccucgaccucaaaaacuauauagacaaacaacuccuacccauacucaacaaacaguccugcagcauauccaacaucgaaaccgugaucgaguuccaacagaaaaacaacagacuccucgaaaucacucgagaguucuccguaaacgccggcgucacaaccccagucucaacauacaugcucaccaacagcgaacuccuaucacuaaucaacgacaugccuaucacaaaugaucagaagaaacuaaugagcaacaacguccaaaucguccgccaacaaucauacuccaucaugugcaucauaaaagaagaaguccuagccuacgugguccagcuaccccucuacggcguaauugacaccccuugcuggaaacuacacacuucaccccucugcacaaccaacaccaaagaagguucaaacaucugccucacacgaacagaccgcggcugguacugcgacaacgccggauccguauccuucuucccccaagcagaaaccugcaaaguucaauccaaccggguauucugcgacaccaugaacucaagaacccuucccuccgaaguaaaucuaugcaacgucgacauauucaacccaaaauacgacugcaaaaucaugaccuccaaaaccgaugucuccagcagcgucaucaccagccucggcgccaucgucuccugcuacggcaaaacaaaauguacagcauccaacaaaaaccgaggcauaaucaaaaccuucuccaacgggugcgauuacgucagcaacaaaggcgucgacaccgucuccgugggcaacacccuauacuacgucaacaaacaagaaggcaaaucacuguacguaaagggcgaacccaucaucaacuucuaugacccucugguguucccauccgaugaauuugacgcauccauaucucaggucaacgaaaagaucaaccaaucccucgccuucauacgcaaauccgacgaacuccuacacaacgucaacgcugguaaaagcaccaccaacaucaugaucaccacaaucaucaucgucauaaucguuauccuacucucccuuauagcagucggacuccuccucuacugcaaagcccgcuaaggacuagucccuguucccagagcccacuuuuuuuucuuuuuuugaaauaaaauagccugucuuucagaucuaaaaaaaaaaaaaaaaaaaaaaaaaaaaaaaaaaaaaaaaaaaaaaaaaaaaaaaaaaaaaaaaugcaucccccccccccccccccccccccccccccccaaaggcucuuuucagagccaccagaauu

SEQ ID NO: 4348 - RNA, 1843 nt, Artificial Sequence
  mRNA product Design d-1 comprising derived and/or modified sequence from HRSV(A2)__F-del_DSCav1_mut0 (opt1)
gggagacccgugacccggaaguuguacggcuacgcgacuuucccucccacaaacccucgcgcccuuccuuuccuacuugggcccggcagaaagcuuaccauggagcugcucauccugaaggccaacgccaucaccaccauccugacggcggugaccuucugcuucgccagcggccagaacaucaccgaggaguucuaccaguccacgugcagcgccgucuccaagggguaccucagcgcccugcggaccggcugguacaccuccgugaucaccaucgagcugagcaacaucaaggagaacaagugcaacgggaccgacgccaaggugaagcucaucaagcaggagcuggacaaguacaagaacgcggucacggagcugcagcuccugaugcaguccaccccggcaaccggcuccggcuccgccaucgcgagcggcgucgccgugugcaaggugcugcaccucgagggggaggucaacaagaucaagagcgcccugcuguccaccaacaaggccguggugagccucuccaacggcgucagcgugcugaccuucaaggugcuggaccucaagaacuacaucgacaagcagcugcugcccauccugaacaagcagagcugcuccaucagcaacaucgagacggugaucgaguuccagcagaagaacaaccggcuccuggagaucacccgcgaguucagcgugaacgccggggucaccacccccguguccacguacaugcugaccaacagcgagcuccugucccugaucaacgacaugccgaucaccaacgaccagaagaagcucaugagcaacaacgugcagaucguccggcagcaguccuacagcaucaugugcaucaucaaggaggaggugcuggcguacgugguccagcugccccucuacggcgugaucgacacccccugcuggaagcugcacacgagcccccugugcaccaccaacaccaaggagggguccaacaucugccucacgcgcaccgaccggggcugguacugcgacaacgccggcagcgucuccuucuucccgcaggccgagaccugcaaggugcagagcaaccgcguguucugcgacaccaugaacucccggacgcugcccagcgagguaaaccucugcaacgucgacaucuucaaccccaaguacgacugcaagaucaugaccuccaagaccgacgugagcuccagcgugaucaccucccugggggccaucgucagcugcuacggcaagacgaagugcaccgccagcaacaagaaccgggggaucaucaagaccuucuccaacggcugcgacuacgugagcaacaagggcguggacaccguguccgucgggaacacccuguacuacgugaacaagcaggagggcaagagccucuacgugaagggggagcccaucaucaacuucuacgacccgcuggucuuccccuccgacgaguucgacgcgagcaucucccaggugaacgagaagaucaaccagagccuggccuucauccgcaaguccgacgagcugcuccacaacgugaacgccggcaagagcacgaccaacaucaugaucaccaccaucaucaucgucaucaucgugauccugcugucccucaucgccguggggcugcugcucuacugcaaggcccggugaggacuagucccuguucccagagcccacuuuuuuuucuuuuuuugaaauaaaauagccugucuuucagaucuaaaaaaaaaaaaaaaaaaaaaaaaaaaaaaaaaaaaaaaaaaaaaaaaaaaaaaaaaaaaaaaaugcaucccccccccccccccccccccccccccccccaaaggcucuuuucagagccaccagaauu

SEQ ID NO: 4349 - RNA, 1843 nt, Artificial Sequence
  mRNA product Design d-1 comprising derived and/or modified sequence from HRSV(A2)__F-del_DSCav1_mut0 (opt1)
gggagacccgugacccggaaguuguacggcuacgcgacuuucccucccacaaacccucgcgcccuuccuuuccuacuugggcccggcagaaagcuuaccauggagcugcucauccugaaggccaacgccaucaccaccauccugacggcggugaccuucugcuucgccagcggccagaacaucaccgaggaguucuaccaguccacgugcagcgccgucuccaagggguaccucagcgcccugcgcaccggcugguacaccuccgugaucaccaucgagcugagcaacaucaaggagaacaagugcaacgggaccgacgccaaggugaagcucaucaagcaggagcuggacaaguacaagaacgcggucacggagcugcagcuccugaugcaguccacccccgccaccggcagcggguccgccaucgccagcggcguggcggugugcaagguccugcaccucgagggcgaggugaacaagaucaaguccgcccugcugagcaccaacaaggccguggucucccucagcaacgggguguccgugcugacguucaagguccuggaccucaagaacuacaucgacaagcagcugcugccgauccucaacaagcagagcugcuccaucagcaacaucgagaccgugaucgaguuccagcagaagaacaaccggcugcuggagaucacccgcgaguucuccgugaacgccggcgucaccacgcccgugagcaccuacaugcucaccaacagcgagcugcugucccucaucaacgacaugcccaucaccaacgaccagaagaagcugaugagcaacaacgugcagaucguccggcagcaguccuacagcaucaugugcaucaucaaggaggaggugcuggccuacgugguccagcucccccuguacggggugaucgacacgccgugcuggaagcugcacaccagcccccucugcaccaccaacacgaaggagggcuccaacaucugccugacccgcaccgaccgggggugguacugcgacaacgcgggcuccgugagcuucuucccccaggccgagaccugcaagguccaguccaaccgcguguucugcgacacgaugaacagccggacccuccccuccgaggucaaccugugcaacguggacaucuucaacccgaaguacgacugcaagaucaugaccagcaagaccgacguguccagcuccgucaucacgagccugggcgccaucguguccugcuacgggaagaccaagugcaccgccagcaacaagaaccggggcaucaucaagaccuucuccaacgggugcgacuacgugagcaacaagggcgucgacacggugagcgugggcaacacccucuacuacgucaacaagcaggaggggaagucccuguacgugaagggcgagcccaucaucaacuucuacgacccccugguguuccccagcgacgaguucgacgccuccaucagccaggucaacgagaagaucaaccagucccucgcguucauccgcaagagcgacgagcugcugcacaacgugaacgccgggaaguccaccaccaacaucaugaucaccacgaucaucaucgugaucaucgucauccuccugagccugaucgccgugggccuccugcuguacugcaaggcccggugaggacuagucccuguucccagagcccacuuuuuuuucuuuuuuugaaauaaaauagccugucuuucagaucuaaaaaaaaaaaaaaaaaaaaaaaaaaaaaaaaaaaaaaaaaaaaaaaaaaaaaaaaaaaaaaaaugcaucccccccccccccccccccccccccccccccaaaggcucuuuucagagccaccagaauu

SEQ ID NO: 4350 - RNA, 1843 nt, Artificial Sequence
  mRNA product Design d-1 comprising derived and/or modified sequence from HRSV(A2)__F-del_DSCav1_mut0 (opt2)
gggagacccgugacccggaaguuguacggcuacgcgacuuucccucccacaaacccucgcgcccuuccuuuccuacuugggcccggcagaaagcuuaccauggagcuccucauccucaaggccaacgccaucaccaccauccucaccgccgucaccuucugcuucgccuccggccagaacaucaccgaggaguucuaccaguccaccugcuccgccgucuccaagggcuaccucuccgcccuccgcaccggcugguacaccuccgucaucaccaucgagcucuccaacaucaaggagaacaagugcaacggcaccgacgccaaggucaagcucaucaagcaggagcucgacaaguacaagaacgccgucaccgagcuccagcuccucaugcaguccacccccgccaccggcuccggcuccgccaucgccuccggcgucgccgucugcaagguccuccaccucgagggcgaggucaacaagaucaaguccgcccuccucuccaccaacaaggccgucgucucccucuccaacggcgucuccguccucaccuucaagguccucgaccucaagaacuacaucgacaagcagcuccuccccauccucaacaagcaguccugcuccaucuccaacaucgagaccgucaucgaguuccagcagaagaacaaccgccuccucgagaucacccgcgaguucuccgucaacgccggcgucaccacccccgucuccaccuacaugcucaccaacuccgagcuccucucccucaucaacgacaugcccaucaccaacgaccagaagaagcucauguccaacaacguccagaucguccgccagcaguccuacuccaucaugugcaucaucaaggaggagguccucgccuacgucguccagcucccccucuacggcgucaucgacacccccugcuggaagcuccacaccuccccccucugcaccaccaacaccaaggagggcuccaacaucugccucacccgcaccgaccgcggcugguacugcgacaacgccggcuccgucuccuucuucccccaggccgagaccugcaagguccaguccaaccgcgucuucugcgacaccaugaacucccgcacccuccccuccgaggucaaccucugcaacgucgacaucuucaaccccaaguacgacugcaagaucaugaccuccaagaccgacgucuccuccuccgucaucaccucccucggcgccaucgucuccugcuacggcaagaccaagugcaccgccuccaacaagaaccgcggcaucaucaagaccuucuccaacggcugcgacuacgucuccaacaagggcgucgacaccgucuccgucggcaacacccucuacuacgucaacaagcaggagggcaagucccucuacgucaagggcgagcccaucaucaacuucuacgacccccucgucuuccccuccgacgaguucgacgccuccaucucccaggucaacgagaagaucaaccagucccucgccuucauccgcaaguccgacgagcuccuccacaacgucaacgccggcaaguccaccaccaacaucaugaucaccaccaucaucaucgucaucaucgucauccuccucucccucaucgccgucggccuccuccucuacugcaaggcccgcugaggacuagucccuguucccagagcccacuuuuuuuucuuuuuuugaaauaaaauagccugucuuucagaucuaaaaaaaaaaaaaaaaaaaaaaaaaaaaaaaaaaaaaaaaaaaaaaaaaaaaaaaaaaaaaaaaugcaucccccccccccccccccccccccccccccccaaaggcucuuuucagagccaccagaauu

SEQ ID NO: 4351 - RNA, 1843 nt, Artificial Sequence
  mRNA product Design d-1 comprising derived and/or modified sequence from HRSV(A2)__F-del_DSCav1_mut0 (opt3)
gggagacccgugacccggaaguuguacggcuacgcgacuuucccucccacaaacccucgcgcccuuccuuuccuacuugggcccggcagaaagcuuaccauggagcugcucauccuuaaggccaacgcuauuaccacaauacugacugcagugacguucugcuuugccagcggccagaauaucaccgaagaguucuaccaauccacauguucugcggucucaaaaggguauuugagugcuuuaagaacuggaugguacaccagcguuauuacaaucgaacuguccaacauuaaggagaauaaaugcaacgguaccgacgccaaggugaaacuaaucaagcaggaacucgauaaguauaaaaaugcaguaacugagcugcagcuucugaugcagucuacacccgccaccggcucggggucagcuauagcaagcggaguggccgucuguaagguguugcaccucgagggcgaaguuaacaaaaucaagagugcucugcuguccacgaauaaagccguggucucucucagcaacgguguguccguauuaacuuuuaagguucuggaccuuaagaauuacauugauaaacaauugcugccuauccuaaacaagcagucaugcaguauuagcaauaucgagaccgugauagaguuccagcagaaaaacaauaggcuccuggaaauuacacgggaguuuucugucaacgcgggggugacuaccccaguguccacauauaugcuuaccaauucagaacuguugagccucaucaacgacaugccgauuacgaacgaucaaaagaaacugaugaguaauaacguccagaucguucgccagcagucuuacuccaucauguguauuauaaaggaggaaguguuagcauauguagugcaacugccccucuacggagucaucgacacuccuugcuggaaacuucauacaagcccacuguguaccacuaauacaaaggagggcucgaacauuugcuugacccgaacggaucguggcugguacugugacaaugccgggucuguguccuucuuuccccaggcugaaaccugcaagguucagucaaacagaguguucugugauacaaugaauaguagaacucugccuagcgaggucaaccucugcaauguggacaucuuuaacccaaaauaugauugcaagauaaugaccuccaaaacagacguaucuagcucaguuauuaccagucugggagccaucguguccuguuacgguaagacuaaaugcacagcaagcaauaagaacaggggcaucauuaagaccuucucuaaugggugugauuaugucucaaacaaaggaguggacacugucagugugggcaauacgcuuuacuauguuaacaagcaagaggguaaaagccuguacgugaagggggaacccaucauuaacuuuuaugacccuuugguauucccauccgaugaguuugacgcuucuauaucgcaggucaaugagaaaaucaaccagagccucgccuucauucggaaguccgaugaacuguuacacaaugugaacgcgggaaagucaacaaccaauaucaugaucacuaccauuauaaucguuauuaucgugauucugcuaagucucaucgccgucggccugcuuuuguacugcaaagcacgcugaggacuagucccuguucccagagcccacuuuuuuuucuuuuuuugaaauaaaauagccugucuuucagaucuaaaaaaaaaaaaaaaaaaaaaaaaaaaaaaaaaaaaaaaaaaaaaaaaaaaaaaaaaaaaaaaaugcaucccccccccccccccccccccccccccccccaaaggcucuuuucagagccaccagaauu

SEQ ID NO: 4352 - RNA, 1843 nt, Artificial Sequence
  mRNA product Design d-1 comprising derived and/or modified sequence from HRSV(A2)__F-del_DSCav1_mut0 (opt4)
gggagacccgugacccggaaguuguacggcuacgcgacuuucccucccacaaacccucgcgcccuuccuuuccuacuugggcccggcagaaagcuuaccauggagcugcugauccugaaggccaacgccaucaccaccauccugaccgccgugaccuucugcuucgccagcggccagaacaucaccgaggaguucuaccagagcaccugcagcgccgugagcaagggcuaccugagcgcccugagaaccggcugguacaccagcgugaucaccaucgagcugagcaacaucaaggagaacaagugcaacggcaccgacgccaaggugaagcugaucaagcaggagcuggacaaguacaagaacgccgugaccgagcugcagcugcugaugcagagcacccccgccaccggcagcggcagcgccaucgccagcggcguggccgugugcaaggugcugcaccuggagggcgaggugaacaagaucaagagcgcccugcugagcaccaacaaggccguggugagccugagcaacggcgugagcgugcugaccuucaaggugcuggaccugaagaacuacaucgacaagcagcugcugcccauccugaacaagcagagcugcagcaucagcaacaucgagaccgugaucgaguuccagcagaagaacaacagacugcuggagaucaccagagaguucagcgugaacgccggcgugaccacccccgugagcaccuacaugcugaccaacagcgagcugcugagccugaucaacgacaugcccaucaccaacgaccagaagaagcugaugagcaacaacgugcagaucgugagacagcagagcuacagcaucaugugcaucaucaaggaggaggugcuggccuacguggugcagcugccccuguacggcgugaucgacacccccugcuggaagcugcacaccagcccccugugcaccaccaacaccaaggagggcagcaacaucugccugaccagaaccgacagaggcugguacugcgacaacgccggcagcgugagcuucuucccccaggccgagaccugcaaggugcagagcaacagaguguucugcgacaccaugaacagcagaacccugcccagcgaggugaaccugugcaacguggacaucuucaaccccaaguacgacugcaagaucaugaccagcaagaccgacgugagcagcagcgugaucaccagccugggcgccaucgugagcugcuacggcaagaccaagugcaccgccagcaacaagaacagaggcaucaucaagaccuucagcaacggcugcgacuacgugagcaacaagggcguggacaccgugagcgugggcaacacccuguacuacgugaacaagcaggagggcaagagccuguacgugaagggcgagcccaucaucaacuucuacgacccccugguguuccccagcgacgaguucgacgccagcaucagccaggugaacgagaagaucaaccagagccuggccuucaucagaaagagcgacgagcugcugcacaacgugaacgccggcaagagcaccaccaacaucaugaucaccaccaucaucaucgugaucaucgugauccugcugagccugaucgccgugggccugcugcuguacugcaaggccagaugaggacuagucccuguucccagagcccacuuuuuuuucuuuuuuugaaauaaaauagccugucuuucagaucuaaaaaaaaaaaaaaaaaaaaaaaaaaaaaaaaaaaaaaaaaaaaaaaaaaaaaaaaaaaaaaaaugcaucccccccccccccccccccccccccccccccaaaggcucuuuucagagccaccagaauu

SEQ ID NO: 4353 - RNA, 1843 nt, Artificial Sequence
  mRNA product Design d-1 comprising derived and/or modified sequence from HRSV(A2)__F-del_DSCav1_mut0 (opt5)
gggagacccgugacccggaaguuguacggcuacgcgacuuucccucccacaaacccucgcgcccuuccuuuccuacuugggcccggcagaaagcuuaccauggagcugcucauccugaaggccaacgcuauuaccacaauccuuacggccgugaccuucugcuuugcgagcggccagaauauuacagaagaguucuaccaauccaccuguucugcugucagcaaaggguaucuguccgcccucagaacaggaugguacaccucuguuaucacaauugaacugagcaacaucaaggagaauaaaugcaacggcaccgacgccaaggugaaacuuaucaagcaggaacuggauaaguauaaaaaugcugugacggagcuccagcugcugaugcaguccacccccgccacagggucuggaagcgcuauugccuccggcgucgcgguguguaagguucuccaccuggagggggaagugaacaaaaucaagagcgcccuucugucuaccaauaaagcugucgugucccucagcaacggaguuucugugcugacauuuaagguccuugaccugaagaauuacauugauaaacaacuccugccuauccugaacaagcaguccugcagcauuucuaauaucgagaccgugauugaguuccagcagaaaaacaaucggcuccuggaaaucacgcgcgaguuuuccgugaacgccggcgucacaaccccgguuagcacauauaugcuuaccaauuccgaacugcucucucugaucaacgacaugcccauuaccaacgaucaaaagaaacuuaugagcaauaacgugcagaucgugagacagcaguccuacagcauuauguguaucauuaaggaggaaguccuggcuuaugugguucaacucccucuguacggcgugaucgacacacccugcuggaaacugcauacgucuccucucuguaccacaaauaccaaggagggguccaacaucugccugacacggaccgaucgcggaugguacugugacaaugccggcagcgucucuuucuuuccccaggcggaaacgugcaaggugcagagcaacagaguuuucugugauacaaugaacuccagaacccugccuucugaggugaaucucugcaaugucgacauuuuuaacccgaaauaugauugcaagaucaugaccagcaaaacagacguguccagcucugucauuaccucccugggggccaucgugagcuguuacggaaagacaaaaugcacggcuucuaauaagaaccggggcauuaucaagaccuucuccaaugggugugauuauguuagcaacaaaggaguggacacagucuccgugggcaauacccuuuacuauguuaacaagcaagagggcaaaucucuguacgugaagggggaacccaucauuaacuuuuaugacccucucgucuuccccagcgaugaguuugacgccuccaucucucaggugaaugagaaaauuaaccagagccuggcuuucauccgcaaguccgaugaacugcuccacaaugugaacgccggaaagagcacaaccaauauuaugaucacgaccauuaucaucguuauuaucgucauucugcuuucucugaucgccgugggccuccugcuguacugcaaagcuagaugaggacuagucccuguucccagagcccacuuuuuuuucuuuuuuugaaauaaaauagccugucuuucagaucuaaaaaaaaaaaaaaaaaaaaaaaaaaaaaaaaaaaaaaaaaaaaaaaaaaaaaaaaaaaaaaaaugcaucccccccccccccccccccccccccccccccaaaggcucuuuucagagccaccagaauu

SEQ ID NO: 4354 - RNA, 1843 nt, Artificial Sequence
  mRNA product Design d-1 comprising derived and/or modified sequence from HRSV(A2)__F-del_DSCav1_mut0 (opt6)
gggagacccgugacccggaaguuguacggcuacgcgacuuucccucccacaaacccucgcgcccuuccuuuccuacuugggcccggcagaaagcuuaccauggaauuacucauccucaaagcaaacgcaauaacaacaauacuaacagcagucacuuucugcuucgcauccggacaaaauaucacagaagaauuuuaccaauccaccugcucugcugucuccaaaggauaccuaucugcccucagaaccgguugguauacaucugucauaaccauagaacuaucaaacauuaaagaaaacaaauguaacggaacagacgcaaaagucaaacuuauaaaacaagaauuagacaaauacaaaaacgcagucacagaauuacaacuacuaaugcaaucaaccccagcaaccggaucaggauccgcaauagcuucaggaguagcaguauguaaaguucuacacuuagaaggagaagucaacaaaauuaaauccgcacuauuaucaaccaacaaagcagucguaucuuuaucaaacggaguaucuguacuuacauucaaaguacuagaccuaaaaaauuacauugauaaacaauuacuaccaauacuaaacaaacaaucauguuccaucucuaacauagaaacaguaauagaauuucaacaaaaaaauaacagauuacuugaaaucacccgagaauuuucaguaaacgcaggaguaaccacacccguaucuacauacaugcuaacaaacucugaacuucugagccuaauaaaugacaugccaauaaccaacgaccaaaaaaaacuaauguccaacaacguacaaauaguacgacaacaaucuuacucaaucaugugcauaaucaaagaagaaguacuagcuuauguaguccaacuuccacucuacggaguaauagacacccccugcuggaaacuacacacaucaccacuaugcacaacaaacacaaaagaaggcucaaacauaugccuaacaagaacugacagaggaugguauugugacaaugcaggcucugucucauucuuuccacaagccgaaacaugcaaaguucaaucaaaccgaguuuucugugacacaaugaacucuagaacucucccaucagaagucaacuuaugcaacguugacauauucaacccaaaauaugacuguaaaauaaugacuuccaaaacugauguaucauccuccgucauaacaucccuaggagcuauuguaucauguuacgggaaaaccaaaugcacagccucaaacaaaaaccgcgguaucauaaaaacauuuucaaacggaugugauuacguaagcaauaaaggaguagacaccguaucaguaggaaauacacuauacuauguaaauaaacaagaaggaaaaucacuauaugucaaaggagaaccaaucauaaauuucuaugacccacuuguauucccauccgaugaauuugacgcaagcauuucacaggucaacgaaaaaauaaaccaaucacuagccuucaucagaaaaucagacgaacuacuacauaacguaaacgccggaaaaucaacaaccaacauaaugauaacaacaaucauaauaguuaucauaguaauacuacuaucucuaauagcugucggacucuuacuauauugcaaagcccgauaaggacuagucccuguucccagagcccacuuuuuuuucuuuuuuugaaauaaaauagccugucuuucagaucuaaaaaaaaaaaaaaaaaaaaaaaaaaaaaaaaaaaaaaaaaaaaaaaaaaaaaaaaaaaaaaaaugcaucccccccccccccccccccccccccccccccaaaggcucuuuucagagccaccagaauu

SEQ ID NO: 4355 - RNA, 1843 nt, Artificial Sequence
  mRNA product Design d-1 comprising derived and/or modified sequence from HRSV(A2)__F-del_DSCav1_mut0 (opt11)
gggagacccgugacccggaaguuguacggcuacgcgacuuucccucccacaaacccucgcgcccuuccuuuccuacuugggcccggcagaaagcuuaccauggaacuacuaauccugaaagccaacgccauaaccacaauccuuaccgcagucaccuucugcuucgccuccggucaaaacaucacagaagaguucuaccaauccaccuguuccgcagucagcaaaggcuaccucuccgcacuccgaaccggaugguacaccagcgucaucaccaucgaacuauccaacauaaaggaaaauaagugcaaugguacagaugccaaggucaaacucauaaagcaagaacucgacaaauacaaaaacgccgucaccgaacuacaacuacuaaugcaaucuacccccgcaacaggcucagguuccgccauagccuccggcgucgccguuugcaaaguccuccaccucgaaggcgaaguaaacaaaaucaaauccgcccuacucucaaccaacaaagcagucgucucccucucaaacggagucucgguccucaccuucaaaguccucgaccucaaaaacuauauagacaaacaacuccuacccauacucaacaaacaguccugcagcauauccaacaucgaaaccgugaucgaguuccaacagaaaaacaacagacuccucgaaaucacucgagaguucuccguaaacgccggcgucacaaccccagucucaacauacaugcucaccaacagcgaacuccuaucacuaaucaacgacaugccuaucacaaaugaucagaagaaacuaaugagcaacaacguccaaaucguccgccaacaaucauacuccaucaugugcaucauaaaagaagaaguccuagccuacgugguccagcuaccccucuacggcguaauugacaccccuugcuggaaacuacacacuucaccccucugcacaaccaacaccaaagaagguucaaacaucugccucacacgaacagaccgcggcugguacugcgacaacgccggauccguauccuucuucccccaagcagaaaccugcaaaguucaauccaaccggguauucugcgacaccaugaacucaagaacccuucccuccgaaguaaaucuaugcaacgucgacauauucaacccaaaauacgacugcaaaaucaugaccuccaaaaccgaugucuccagcagcgucaucaccagccucggcgccaucgucuccugcuacggcaaaacaaaauguacagcauccaacaaaaaccgaggcauaaucaaaaccuucuccaacgggugcgauuacgucagcaacaaaggcgucgacaccgucuccgugggcaacacccuauacuacgucaacaaacaagaaggcaaaucacuguacguaaagggcgaacccaucaucaacuucuaugacccucugguguucccauccgaugaauuugacgcauccauaucucaggucaacgaaaagaucaaccaaucccucgccuucauacgcaaauccgacgaacuccuacacaacgucaacgcugguaaaagcaccaccaacaucaugaucaccacaaucaucaucgucauaaucguuauccuacucucccuuauagcagucggacuccuccucuacugcaaagcccgcuaaggacuagucccuguucccagagcccacuuuuuuuucuuuuuuugaaauaaaauagccugucuuucagaucuaaaaaaaaaaaaaaaaaaaaaaaaaaaaaaaaaaaaaaaaaaaaaaaaaaaaaaaaaaaaaaaaugcaucccccccccccccccccccccccccccccccaaaggcucuuuucagagccaccagaauu

SEQ ID NO: 4356 - RNA, 1898 nt, Artificial Sequence
  mRNA product Design d-2 comprising derived and/or modified sequence from HRSV(A2)__F-del_DSCav1_mut0 (opt1)
gggagagcggcucggccauuuugucccagucaguccggaggcugcggcugcagaaguaccgccugcggaguaacugcaaagaagcuuaccauggagcugcucauccugaaggccaacgccaucaccaccauccugacggcggugaccuucugcuucgccagcggccagaacaucaccgaggaguucuaccaguccacgugcagcgccgucuccaagggguaccucagcgcccugcggaccggcugguacaccuccgugaucaccaucgagcugagcaacaucaaggagaacaagugcaacgggaccgacgccaaggugaagcucaucaagcaggagcuggacaaguacaagaacgcggucacggagcugcagcuccugaugcaguccaccccggcaaccggcuccggcuccgccaucgcgagcggcgucgccgugugcaaggugcugcaccucgagggggaggucaacaagaucaagagcgcccugcuguccaccaacaaggccguggugagccucuccaacggcgucagcgugcugaccuucaaggugcuggaccucaagaacuacaucgacaagcagcugcugcccauccugaacaagcagagcugcuccaucagcaacaucgagacggugaucgaguuccagcagaagaacaaccggcuccuggagaucacccgcgaguucagcgugaacgccggggucaccacccccguguccacguacaugcugaccaacagcgagcuccugucccugaucaacgacaugccgaucaccaacgaccagaagaagcucaugagcaacaacgugcagaucguccggcagcaguccuacagcaucaugugcaucaucaaggaggaggugcuggcguacgugguccagcugccccucuacggcgugaucgacacccccugcuggaagcugcacacgagcccccugugcaccaccaacaccaaggagggguccaacaucugccucacgcgcaccgaccggggcugguacugcgacaacgccggcagcgucuccuucuucccgcaggccgagaccugcaaggugcagagcaaccgcguguucugcgacaccaugaacucccggacgcugcccagcgagguaaaccucugcaacgucgacaucuucaaccccaaguacgacugcaagaucaugaccuccaagaccgacgugagcuccagcgugaucaccucccugggggccaucgucagcugcuacggcaagacgaagugcaccgccagcaacaagaaccgggggaucaucaagaccuucuccaacggcugcgacuacgugagcaacaagggcguggacaccguguccgucgggaacacccuguacuacgugaacaagcaggagggcaagagccucuacgugaagggggagcccaucaucaacuucuacgacccgcuggucuuccccuccgacgaguucgacgcgagcaucucccaggugaacgagaagaucaaccagagccuggccuucauccgcaaguccgacgagcugcuccacaacgugaacgccggcaagagcacgaccaacaucaugaucaccaccaucaucaucgucaucaucgugauccugcugucccucaucgccguggggcugcugcucuacugcaaggcccggugaggacuaguaauaaggaaacuguaugaaugucugugggcaggaagugaagagauccuucuguaaagguuuuuggaauuaugucugcugaauaauaaacuuuuuugaaauaauaaaucugguagaaaaaugagaucuaaaaaaaaaaaaaaaaaaaaaaaaaaaaaaaaaaaaaaaaaaaaaaaaaaaaaaaaaaaaaaaaugcaucccccccccccccccccccccccccccccccaaaggcucuuuucagagccaccagaauu

SEQ ID NO: 4357 - RNA, 1898 nt, Artificial Sequence
  mRNA product Design d-2 comprising derived and/or modified sequence from HRSV(A2)__F-del_DSCav1_mut0 (opt1)
gggagagcggcucggccauuuugucccagucaguccggaggcugcggcugcagaaguaccgccugcggaguaacugcaaagaagcuuaccauggagcugcucauccugaaggccaacgccaucaccaccauccugacggcggugaccuucugcuucgccagcggccagaacaucaccgaggaguucuaccaguccacgugcagcgccgucuccaagggguaccucagcgcccugcgcaccggcugguacaccuccgugaucaccaucgagcugagcaacaucaaggagaacaagugcaacgggaccgacgccaaggugaagcucaucaagcaggagcuggacaaguacaagaacgcggucacggagcugcagcuccugaugcaguccacccccgccaccggcagcggguccgccaucgccagcggcguggcggugugcaagguccugcaccucgagggcgaggugaacaagaucaaguccgcccugcugagcaccaacaaggccguggucucccucagcaacgggguguccgugcugacguucaagguccuggaccucaagaacuacaucgacaagcagcugcugccgauccucaacaagcagagcugcuccaucagcaacaucgagaccgugaucgaguuccagcagaagaacaaccggcugcuggagaucacccgcgaguucuccgugaacgccggcgucaccacgcccgugagcaccuacaugcucaccaacagcgagcugcugucccucaucaacgacaugcccaucaccaacgaccagaagaagcugaugagcaacaacgugcagaucguccggcagcaguccuacagcaucaugugcaucaucaaggaggaggugcuggccuacgugguccagcucccccuguacggggugaucgacacgccgugcuggaagcugcacaccagcccccucugcaccaccaacacgaaggagggcuccaacaucugccugacccgcaccgaccgggggugguacugcgacaacgcgggcuccgugagcuucuucccccaggccgagaccugcaagguccaguccaaccgcguguucugcgacacgaugaacagccggacccuccccuccgaggucaaccugugcaacguggacaucuucaacccgaaguacgacugcaagaucaugaccagcaagaccgacguguccagcuccgucaucacgagccugggcgccaucguguccugcuacgggaagaccaagugcaccgccagcaacaagaaccggggcaucaucaagaccuucuccaacgggugcgacuacgugagcaacaagggcgucgacacggugagcgugggcaacacccucuacuacgucaacaagcaggaggggaagucccuguacgugaagggcgagcccaucaucaacuucuacgacccccugguguuccccagcgacgaguucgacgccuccaucagccaggucaacgagaagaucaaccagucccucgcguucauccgcaagagcgacgagcugcugcacaacgugaacgccgggaaguccaccaccaacaucaugaucaccacgaucaucaucgugaucaucgucauccuccugagccugaucgccgugggccuccugcuguacugcaaggcccggugaggacuaguaauaaggaaacuguaugaaugucugugggcaggaagugaagagauccuucuguaaagguuuuuggaauuaugucugcugaauaauaaacuuuuuugaaauaauaaaucugguagaaaaaugagaucuaaaaaaaaaaaaaaaaaaaaaaaaaaaaaaaaaaaaaaaaaaaaaaaaaaaaaaaaaaaaaaaaugcaucccccccccccccccccccccccccccccccaaaggcucuuuucagagccaccagaauu

SEQ ID NO: 4358 - RNA, 1898 nt, Artificial Sequence
  mRNA product Design d-2 comprising derived and/or modified sequence from HRSV(A2)__F-del_DSCav1_mut0 (opt2)
gggagagcggcucggccauuuugucccagucaguccggaggcugcggcugcagaaguaccgccugcggaguaacugcaaagaagcuuaccauggagcuccucauccucaaggccaacgccaucaccaccauccucaccgccgucaccuucugcuucgccuccggccagaacaucaccgaggaguucuaccaguccaccugcuccgccgucuccaagggcuaccucuccgcccuccgcaccggcugguacaccuccgucaucaccaucgagcucuccaacaucaaggagaacaagugcaacggcaccgacgccaaggucaagcucaucaagcaggagcucgacaaguacaagaacgccgucaccgagcuccagcuccucaugcaguccacccccgccaccggcuccggcuccgccaucgccuccggcgucgccgucugcaagguccuccaccucgagggcgaggucaacaagaucaaguccgcccuccucuccaccaacaaggccgucgucucccucuccaacggcgucuccguccucaccuucaagguccucgaccucaagaacuacaucgacaagcagcuccuccccauccucaacaagcaguccugcuccaucuccaacaucgagaccgucaucgaguuccagcagaagaacaaccgccuccucgagaucacccgcgaguucuccgucaacgccggcgucaccacccccgucuccaccuacaugcucaccaacuccgagcuccucucccucaucaacgacaugcccaucaccaacgaccagaagaagcucauguccaacaacguccagaucguccgccagcaguccuacuccaucaugugcaucaucaaggaggagguccucgccuacgucguccagcucccccucuacggcgucaucgacacccccugcuggaagcuccacaccuccccccucugcaccaccaacaccaaggagggcuccaacaucugccucacccgcaccgaccgcggcugguacugcgacaacgccggcuccgucuccuucuucccccaggccgagaccugcaagguccaguccaaccgcgucuucugcgacaccaugaacucccgcacccuccccuccgaggucaaccucugcaacgucgacaucuucaaccccaaguacgacugcaagaucaugaccuccaagaccgacgucuccuccuccgucaucaccucccucggcgccaucgucuccugcuacggcaagaccaagugcaccgccuccaacaagaaccgcggcaucaucaagaccuucuccaacggcugcgacuacgucuccaacaagggcgucgacaccgucuccgucggcaacacccucuacuacgucaacaagcaggagggcaagucccucuacgucaagggcgagcccaucaucaacuucuacgacccccucgucuuccccuccgacgaguucgacgccuccaucucccaggucaacgagaagaucaaccagucccucgccuucauccgcaaguccgacgagcuccuccacaacgucaacgccggcaaguccaccaccaacaucaugaucaccaccaucaucaucgucaucaucgucauccuccucucccucaucgccgucggccuccuccucuacugcaaggcccgcugaggacuaguaauaaggaaacuguaugaaugucugugggcaggaagugaagagauccuucuguaaagguuuuuggaauuaugucugcugaauaauaaacuuuuuugaaauaauaaaucugguagaaaaaugagaucuaaaaaaaaaaaaaaaaaaaaaaaaaaaaaaaaaaaaaaaaaaaaaaaaaaaaaaaaaaaaaaaaugcaucccccccccccccccccccccccccccccccaaaggcucuuuucagagccaccagaauu

SEQ ID NO: 4359 - RNA, 1898 nt, Artificial Sequence
  mRNA product Design d-2 comprising derived and/or modified sequence from HRSV(A2)__F-del_DSCav1_mut0 (opt3)
gggagagcggcucggccauuuugucccagucaguccggaggcugcggcugcagaaguaccgccugcggaguaacugcaaagaagcuuaccauggagcugcucauccuuaaggccaacgcuauuaccacaauacugacugcagugacguucugcuuugccagcggccagaauaucaccgaagaguucuaccaauccacauguucugcggucucaaaaggguauuugagugcuuuaagaacuggaugguacaccagcguuauuacaaucgaacuguccaacauuaaggagaauaaaugcaacgguaccgacgccaaggugaaacuaaucaagcaggaacucgauaaguauaaaaaugcaguaacugagcugcagcuucugaugcagucuacacccgccaccggcucggggucagcuauagcaagcggaguggccgucuguaagguguugcaccucgagggcgaaguuaacaaaaucaagagugcucugcuguccacgaauaaagccguggucucucucagcaacgguguguccguauuaacuuuuaagguucuggaccuuaagaauuacauugauaaacaauugcugccuauccuaaacaagcagucaugcaguauuagcaauaucgagaccgugauagaguuccagcagaaaaacaauaggcuccuggaaauuacacgggaguuuucugucaacgcgggggugacuaccccaguguccacauauaugcuuaccaauucagaacuguugagccucaucaacgacaugccgauuacgaacgaucaaaagaaacugaugaguaauaacguccagaucguucgccagcagucuuacuccaucauguguauuauaaaggaggaaguguuagcauauguagugcaacugccccucuacggagucaucgacacuccuugcuggaaacuucauacaagcccacuguguaccacuaauacaaaggagggcucgaacauuugcuugacccgaacggaucguggcugguacugugacaaugccgggucuguguccuucuuuccccaggcugaaaccugcaagguucagucaaacagaguguucugugauacaaugaauaguagaacucugccuagcgaggucaaccucugcaauguggacaucuuuaacccaaaauaugauugcaagauaaugaccuccaaaacagacguaucuagcucaguuauuaccagucugggagccaucguguccuguuacgguaagacuaaaugcacagcaagcaauaagaacaggggcaucauuaagaccuucucuaaugggugugauuaugucucaaacaaaggaguggacacugucagugugggcaauacgcuuuacuauguuaacaagcaagaggguaaaagccuguacgugaagggggaacccaucauuaacuuuuaugacccuuugguauucccauccgaugaguuugacgcuucuauaucgcaggucaaugagaaaaucaaccagagccucgccuucauucggaaguccgaugaacuguuacacaaugugaacgcgggaaagucaacaaccaauaucaugaucacuaccauuauaaucguuauuaucgugauucugcuaagucucaucgccgucggccugcuuuuguacugcaaagcacgcugaggacuaguaauaaggaaacuguaugaaugucugugggcaggaagugaagagauccuucuguaaagguuuuuggaauuaugucugcugaauaauaaacuuuuuugaaauaauaaaucugguagaaaaaugagaucuaaaaaaaaaaaaaaaaaaaaaaaaaaaaaaaaaaaaaaaaaaaaaaaaaaaaaaaaaaaaaaaaugcaucccccccccccccccccccccccccccccccaaaggcucuuuucagagccaccagaauu

SEQ ID NO: 4360 - RNA, 1898 nt, Artificial Sequence
  mRNA product Design d-2 comprising derived and/or modified sequence from HRSV(A2)__F-del_DSCav1_mut0 (opt4)
gggagagcggcucggccauuuugucccagucaguccggaggcugcggcugcagaaguaccgccugcggaguaacugcaaagaagcuuaccauggagcugcugauccugaaggccaacgccaucaccaccauccugaccgccgugaccuucugcuucgccagcggccagaacaucaccgaggaguucuaccagagcaccugcagcgccgugagcaagggcuaccugagcgcccugagaaccggcugguacaccagcgugaucaccaucgagcugagcaacaucaaggagaacaagugcaacggcaccgacgccaaggugaagcugaucaagcaggagcuggacaaguacaagaacgccgugaccgagcugcagcugcugaugcagagcacccccgccaccggcagcggcagcgccaucgccagcggcguggccgugugcaaggugcugcaccuggagggcgaggugaacaagaucaagagcgcccugcugagcaccaacaaggccguggugagccugagcaacggcgugagcgugcugaccuucaaggugcuggaccugaagaacuacaucgacaagcagcugcugcccauccugaacaagcagagcugcagcaucagcaacaucgagaccgugaucgaguuccagcagaagaacaacagacugcuggagaucaccagagaguucagcgugaacgccggcgugaccacccccgugagcaccuacaugcugaccaacagcgagcugcugagccugaucaacgacaugcccaucaccaacgaccagaagaagcugaugagcaacaacgugcagaucgugagacagcagagcuacagcaucaugugcaucaucaaggaggaggugcuggccuacguggugcagcugccccuguacggcgugaucgacacccccugcuggaagcugcacaccagcccccugugcaccaccaacaccaaggagggcagcaacaucugccugaccagaaccgacagaggcugguacugcgacaacgccggcagcgugagcuucuucccccaggccgagaccugcaaggugcagagcaacagaguguucugcgacaccaugaacagcagaacccugcccagcgaggugaaccugugcaacguggacaucuucaaccccaaguacgacugcaagaucaugaccagcaagaccgacgugagcagcagcgugaucaccagccugggcgccaucgugagcugcuacggcaagaccaagugcaccgccagcaacaagaacagaggcaucaucaagaccuucagcaacggcugcgacuacgugagcaacaagggcguggacaccgugagcgugggcaacacccuguacuacgugaacaagcaggagggcaagagccuguacgugaagggcgagcccaucaucaacuucuacgacccccugguguuccccagcgacgaguucgacgccagcaucagccaggugaacgagaagaucaaccagagccuggccuucaucagaaagagcgacgagcugcugcacaacgugaacgccggcaagagcaccaccaacaucaugaucaccaccaucaucaucgugaucaucgugauccugcugagccugaucgccgugggccugcugcuguacugcaaggccagaugaggacuaguaauaaggaaacuguaugaaugucugugggcaggaagugaagagauccuucuguaaagguuuuuggaauuaugucugcugaauaauaaacuuuuuugaaauaauaaaucugguagaaaaaugagaucuaaaaaaaaaaaaaaaaaaaaaaaaaaaaaaaaaaaaaaaaaaaaaaaaaaaaaaaaaaaaaaaaugcaucccccccccccccccccccccccccccccccaaaggcucuuuucagagccaccagaauu

SEQ ID NO: 4361 - RNA, 1898 nt, Artificial Sequence
  mRNA product Design d-2 comprising derived and/or modified sequence from HRSV(A2)__F-del_DSCav1_mut0 (opt5)
gggagagcggcucggccauuuugucccagucaguccggaggcugcggcugcagaaguaccgccugcggaguaacugcaaagaagcuuaccauggagcugcucauccugaaggccaacgcuauuaccacaauccuuacggccgugaccuucugcuuugcgagcggccagaauauuacagaagaguucuaccaauccaccuguucugcugucagcaaaggguaucuguccgcccucagaacaggaugguacaccucuguuaucacaauugaacugagcaacaucaaggagaauaaaugcaacggcaccgacgccaaggugaaacuuaucaagcaggaacuggauaaguauaaaaaugcugugacggagcuccagcugcugaugcaguccacccccgccacagggucuggaagcgcuauugccuccggcgucgcgguguguaagguucuccaccuggagggggaagugaacaaaaucaagagcgcccuucugucuaccaauaaagcugucgugucccucagcaacggaguuucugugcugacauuuaagguccuugaccugaagaauuacauugauaaacaacuccugccuauccugaacaagcaguccugcagcauuucuaauaucgagaccgugauugaguuccagcagaaaaacaaucggcuccuggaaaucacgcgcgaguuuuccgugaacgccggcgucacaaccccgguuagcacauauaugcuuaccaauuccgaacugcucucucugaucaacgacaugcccauuaccaacgaucaaaagaaacuuaugagcaauaacgugcagaucgugagacagcaguccuacagcauuauguguaucauuaaggaggaaguccuggcuuaugugguucaacucccucuguacggcgugaucgacacacccugcuggaaacugcauacgucuccucucuguaccacaaauaccaaggagggguccaacaucugccugacacggaccgaucgcggaugguacugugacaaugccggcagcgucucuuucuuuccccaggcggaaacgugcaaggugcagagcaacagaguuuucugugauacaaugaacuccagaacccugccuucugaggugaaucucugcaaugucgacauuuuuaacccgaaauaugauugcaagaucaugaccagcaaaacagacguguccagcucugucauuaccucccugggggccaucgugagcuguuacggaaagacaaaaugcacggcuucuaauaagaaccggggcauuaucaagaccuucuccaaugggugugauuauguuagcaacaaaggaguggacacagucuccgugggcaauacccuuuacuauguuaacaagcaagagggcaaaucucuguacgugaagggggaacccaucauuaacuuuuaugacccucucgucuuccccagcgaugaguuugacgccuccaucucucaggugaaugagaaaauuaaccagagccuggcuuucauccgcaaguccgaugaacugcuccacaaugugaacgccggaaagagcacaaccaauauuaugaucacgaccauuaucaucguuauuaucgucauucugcuuucucugaucgccgugggccuccugcuguacugcaaagcuagaugaggacuaguaauaaggaaacuguaugaaugucugugggcaggaagugaagagauccuucuguaaagguuuuuggaauuaugucugcugaauaauaaacuuuuuugaaauaauaaaucugguagaaaaaugagaucuaaaaaaaaaaaaaaaaaaaaaaaaaaaaaaaaaaaaaaaaaaaaaaaaaaaaaaaaaaaaaaaaugcaucccccccccccccccccccccccccccccccaaaggcucuuuucagagccaccagaauu

SEQ ID NO: 4362 - RNA, 1898 nt, Artificial Sequence
  mRNA product Design d-2 comprising derived and/or modified sequence from HRSV(A2)__F-del_DSCav1_mut0 (opt6)
gggagagcggcucggccauuuugucccagucaguccggaggcugcggcugcagaaguaccgccugcggaguaacugcaaagaagcuuaccauggaauuacucauccucaaagcaaacgcaauaacaacaauacuaacagcagucacuuucugcuucgcauccggacaaaauaucacagaagaauuuuaccaauccaccugcucugcugucuccaaaggauaccuaucugcccucagaaccgguugguauacaucugucauaaccauagaacuaucaaacauuaaagaaaacaaauguaacggaacagacgcaaaagucaaacuuauaaaacaagaauuagacaaauacaaaaacgcagucacagaauuacaacuacuaaugcaaucaaccccagcaaccggaucaggauccgcaauagcuucaggaguagcaguauguaaaguucuacacuuagaaggagaagucaacaaaauuaaauccgcacuauuaucaaccaacaaagcagucguaucuuuaucaaacggaguaucuguacuuacauucaaaguacuagaccuaaaaaauuacauugauaaacaauuacuaccaauacuaaacaaacaaucauguuccaucucuaacauagaaacaguaauagaauuucaacaaaaaaauaacagauuacuugaaaucacccgagaauuuucaguaaacgcaggaguaaccacacccguaucuacauacaugcuaacaaacucugaacuucugagccuaauaaaugacaugccaauaaccaacgaccaaaaaaaacuaauguccaacaacguacaaauaguacgacaacaaucuuacucaaucaugugcauaaucaaagaagaaguacuagcuuauguaguccaacuuccacucuacggaguaauagacacccccugcuggaaacuacacacaucaccacuaugcacaacaaacacaaaagaaggcucaaacauaugccuaacaagaacugacagaggaugguauugugacaaugcaggcucugucucauucuuuccacaagccgaaacaugcaaaguucaaucaaaccgaguuuucugugacacaaugaacucuagaacucucccaucagaagucaacuuaugcaacguugacauauucaacccaaaauaugacuguaaaauaaugacuuccaaaacugauguaucauccuccgucauaacaucccuaggagcuauuguaucauguuacgggaaaaccaaaugcacagccucaaacaaaaaccgcgguaucauaaaaacauuuucaaacggaugugauuacguaagcaauaaaggaguagacaccguaucaguaggaaauacacuauacuauguaaauaaacaagaaggaaaaucacuauaugucaaaggagaaccaaucauaaauuucuaugacccacuuguauucccauccgaugaauuugacgcaagcauuucacaggucaacgaaaaaauaaaccaaucacuagccuucaucagaaaaucagacgaacuacuacauaacguaaacgccggaaaaucaacaaccaacauaaugauaacaacaaucauaauaguuaucauaguaauacuacuaucucuaauagcugucggacucuuacuauauugcaaagcccgauaaggacuaguaauaaggaaacuguaugaaugucugugggcaggaagugaagagauccuucuguaaagguuuuuggaauuaugucugcugaauaauaaacuuuuuugaaauaauaaaucugguagaaaaaugagaucuaaaaaaaaaaaaaaaaaaaaaaaaaaaaaaaaaaaaaaaaaaaaaaaaaaaaaaaaaaaaaaaaugcaucccccccccccccccccccccccccccccccaaaggcucuuuucagagccaccagaauu

SEQ ID NO: 4363 - RNA, 1898 nt, Artificial Sequence
  mRNA product Design d-2 comprising derived and/or modified sequence from HRSV(A2)__F-del_DSCav1_mut0 (opt11)
gggagagcggcucggccauuuugucccagucaguccggaggcugcggcugcagaaguaccgccugcggaguaacugcaaagaagcuuaccauggaacuacuaauccugaaagccaacgccauaaccacaauccuuaccgcagucaccuucugcuucgccuccggucaaaacaucacagaagaguucuaccaauccaccuguuccgcagucagcaaaggcuaccucuccgcacuccgaaccggaugguacaccagcgucaucaccaucgaacuauccaacauaaaggaaaauaagugcaaugguacagaugccaaggucaaacucauaaagcaagaacucgacaaauacaaaaacgccgucaccgaacuacaacuacuaaugcaaucuacccccgcaacaggcucagguuccgccauagccuccggcgucgccguuugcaaaguccuccaccucgaaggcgaaguaaacaaaaucaaauccgcccuacucucaaccaacaaagcagucgucucccucucaaacggagucucgguccucaccuucaaaguccucgaccucaaaaacuauauagacaaacaacuccuacccauacucaacaaacaguccugcagcauauccaacaucgaaaccgugaucgaguuccaacagaaaaacaacagacuccucgaaaucacucgagaguucuccguaaacgccggcgucacaaccccagucucaacauacaugcucaccaacagcgaacuccuaucacuaaucaacgacaugccuaucacaaaugaucagaagaaacuaaugagcaacaacguccaaaucguccgccaacaaucauacuccaucaugugcaucauaaaagaagaaguccuagccuacgugguccagcuaccccucuacggcguaauugacaccccuugcuggaaacuacacacuucaccccucugcacaaccaacaccaaagaagguucaaacaucugccucacacgaacagaccgcggcugguacugcgacaacgccggauccguauccuucuucccccaagcagaaaccugcaaaguucaauccaaccggguauucugcgacaccaugaacucaagaacccuucccuccgaaguaaaucuaugcaacgucgacauauucaacccaaaauacgacugcaaaaucaugaccuccaaaaccgaugucuccagcagcgucaucaccagccucggcgccaucgucuccugcuacggcaaaacaaaauguacagcauccaacaaaaaccgaggcauaaucaaaaccuucuccaacgggugcgauuacgucagcaacaaaggcgucgacaccgucuccgugggcaacacccuauacuacgucaacaaacaagaaggcaaaucacuguacguaaagggcgaacccaucaucaacuucuaugacccucugguguucccauccgaugaauuugacgcauccauaucucaggucaacgaaaagaucaaccaaucccucgccuucauacgcaaauccgacgaacuccuacacaacgucaacgcugguaaaagcaccaccaacaucaugaucaccacaaucaucaucgucauaaucguuauccuacucucccuuauagcagucggacuccuccucuacugcaaagcccgcuaaggacuaguaauaaggaaacuguaugaaugucugugggcaggaagugaagagauccuucuguaaagguuuuuggaauuaugucugcugaauaauaaacuuuuuugaaauaauaaaucugguagaaaaaugagaucuaaaaaaaaaaaaaaaaaaaaaaaaaaaaaaaaaaaaaaaaaaaaaaaaaaaaaaaaaaaaaaaaugcaucccccccccccccccccccccccccccccccaaaggcucuuuucagagccaccagaauu

SEQ ID NO: 4364 - RNA, 2214 nt, Artificial Sequence
  mRNA product Design d-3 comprising derived and/or modified sequence from HRSV(A2)__F-del_DSCav1_mut0 (opt1)
gggagagggcgcuuggcuugcaaggacccugagcugcggcauugaagcacacccaacccaacucgacugaagucagccucacugaaccggaucugagaaucuucucucucugggcuugccagggcucuccgaaccuagcuagcauccucuucaauuccaacuagaaagcuuaccauggagcugcucauccugaaggccaacgccaucaccaccauccugacggcggugaccuucugcuucgccagcggccagaacaucaccgaggaguucuaccaguccacgugcagcgccgucuccaagggguaccucagcgcccugcggaccggcugguacaccuccgugaucaccaucgagcugagcaacaucaaggagaacaagugcaacgggaccgacgccaaggugaagcucaucaagcaggagcuggacaaguacaagaacgcggucacggagcugcagcuccugaugcaguccaccccggcaaccggcuccggcuccgccaucgcgagcggcgucgccgugugcaaggugcugcaccucgagggggaggucaacaagaucaagagcgcccugcuguccaccaacaaggccguggugagccucuccaacggcgucagcgugcugaccuucaaggugcuggaccucaagaacuacaucgacaagcagcugcugcccauccugaacaagcagagcugcuccaucagcaacaucgagacggugaucgaguuccagcagaagaacaaccggcuccuggagaucacccgcgaguucagcgugaacgccggggucaccacccccguguccacguacaugcugaccaacagcgagcuccugucccugaucaacgacaugccgaucaccaacgaccagaagaagcucaugagcaacaacgugcagaucguccggcagcaguccuacagcaucaugugcaucaucaaggaggaggugcuggcguacgugguccagcugccccucuacggcgugaucgacacccccugcuggaagcugcacacgagcccccugugcaccaccaacaccaaggagggguccaacaucugccucacgcgcaccgaccggggcugguacugcgacaacgccggcagcgucuccuucuucccgcaggccgagaccugcaaggugcagagcaaccgcguguucugcgacaccaugaacucccggacgcugcccagcgagguaaaccucugcaacgucgacaucuucaaccccaaguacgacugcaagaucaugaccuccaagaccgacgugagcuccagcgugaucaccucccugggggccaucgucagcugcuacggcaagacgaagugcaccgccagcaacaagaaccgggggaucaucaagaccuucuccaacggcugcgacuacgugagcaacaagggcguggacaccguguccgucgggaacacccuguacuacgugaacaagcaggagggcaagagccucuacgugaagggggagcccaucaucaacuucuacgacccgcuggucuuccccuccgacgaguucgacgcgagcaucucccaggugaacgagaagaucaaccagagccuggccuucauccgcaaguccgacgagcugcuccacaacgugaacgccggcaagagcacgaccaacaucaugaucaccaccaucaucaucgucaucaucgugauccugcugucccucaucgccguggggcugcugcucuacugcaaggcccggugaggacuagugaagggaacacccaaauuuaauucagccuuaagcacaauuaauuaagagugaaacguaauuguacaagcaguuggucacccaccauagggcaugaucaacaccgcaaccuuuccuuuuucccccagugauucugaaaaaccccucuucccuucagcuugcuuagauguuccaaauuuaguaagcuuaaggcggccuacagaagaaaaagaaaaaaaaggccacaaaaguucccucucacuuucaguaaauaaaauaaaagcagcaacagaaauaaagaaauaaaugaaauucaaaaugaaauaaauauuguguugugcagcauuaaaaaaucaauaaaaauuaaaaaugagcaagaucuaaaaaaaaaaaaaaaaaaaaaaaaaaaaaaaaaaaaaaaaaaaaaaaaaaaaaaaaaaaaaaaaugcaucccccccccccccccccccccccccccccccaaaggcucuuuucagagccaccagaauu

SEQ ID NO: 4365 - RNA, 2214 nt, Artificial Sequence
  mRNA product Design d-3 comprising derived and/or modified sequence from HRSV(A2)__F-del_DSCav1_mut0 (opt1)
gggagagggcgcuuggcuugcaaggacccugagcugcggcauugaagcacacccaacccaacucgacugaagucagccucacugaaccggaucugagaaucuucucucucugggcuugccagggcucuccgaaccuagcuagcauccucuucaauuccaacuagaaagcuuaccauggagcugcucauccugaaggccaacgccaucaccaccauccugacggcggugaccuucugcuucgccagcggccagaacaucaccgaggaguucuaccaguccacgugcagcgccgucuccaagggguaccucagcgcccugcgcaccggcugguacaccuccgugaucaccaucgagcugagcaacaucaaggagaacaagugcaacgggaccgacgccaaggugaagcucaucaagcaggagcuggacaaguacaagaacgcggucacggagcugcagcuccugaugcaguccacccccgccaccggcagcggguccgccaucgccagcggcguggcggugugcaagguccugcaccucgagggcgaggugaacaagaucaaguccgcccugcugagcaccaacaaggccguggucucccucagcaacgggguguccgugcugacguucaagguccuggaccucaagaacuacaucgacaagcagcugcugccgauccucaacaagcagagcugcuccaucagcaacaucgagaccgugaucgaguuccagcagaagaacaaccggcugcuggagaucacccgcgaguucuccgugaacgccggcgucaccacgcccgugagcaccuacaugcucaccaacagcgagcugcugucccucaucaacgacaugcccaucaccaacgaccagaagaagcugaugagcaacaacgugcagaucguccggcagcaguccuacagcaucaugugcaucaucaaggaggaggugcuggccuacgugguccagcucccccuguacggggugaucgacacgccgugcuggaagcugcacaccagcccccucugcaccaccaacacgaaggagggcuccaacaucugccugacccgcaccgaccgggggugguacugcgacaacgcgggcuccgugagcuucuucccccaggccgagaccugcaagguccaguccaaccgcguguucugcgacacgaugaacagccggacccuccccuccgaggucaaccugugcaacguggacaucuucaacccgaaguacgacugcaagaucaugaccagcaagaccgacguguccagcuccgucaucacgagccugggcgccaucguguccugcuacgggaagaccaagugcaccgccagcaacaagaaccggggcaucaucaagaccuucuccaacgggugcgacuacgugagcaacaagggcgucgacacggugagcgugggcaacacccucuacuacgucaacaagcaggaggggaagucccuguacgugaagggcgagcccaucaucaacuucuacgacccccugguguuccccagcgacgaguucgacgccuccaucagccaggucaacgagaagaucaaccagucccucgcguucauccgcaagagcgacgagcugcugcacaacgugaacgccgggaaguccaccaccaacaucaugaucaccacgaucaucaucgugaucaucgucauccuccugagccugaucgccgugggccuccugcuguacugcaaggcccggugaggacuagugaagggaacacccaaauuuaauucagccuuaagcacaauuaauuaagagugaaacguaauuguacaagcaguuggucacccaccauagggcaugaucaacaccgcaaccuuuccuuuuucccccagugauucugaaaaaccccucuucccuucagcuugcuuagauguuccaaauuuaguaagcuuaaggcggccuacagaagaaaaagaaaaaaaaggccacaaaaguucccucucacuuucaguaaauaaaauaaaagcagcaacagaaauaaagaaauaaaugaaauucaaaaugaaauaaauauuguguugugcagcauuaaaaaaucaauaaaaauuaaaaaugagcaagaucuaaaaaaaaaaaaaaaaaaaaaaaaaaaaaaaaaaaaaaaaaaaaaaaaaaaaaaaaaaaaaaaaugcaucccccccccccccccccccccccccccccccaaaggcucuuuucagagccaccagaauu

SEQ ID NO: 4366 - RNA, 2214 nt, Artificial Sequence
  mRNA product Design d-3 comprising derived and/or modified sequence from HRSV(A2)__F-del_DSCav1_mut0 (opt2)
gggagagggcgcuuggcuugcaaggacccugagcugcggcauugaagcacacccaacccaacucgacugaagucagccucacugaaccggaucugagaaucuucucucucugggcuugccagggcucuccgaaccuagcuagcauccucuucaauuccaacuagaaagcuuaccauggagcuccucauccucaaggccaacgccaucaccaccauccucaccgccgucaccuucugcuucgccuccggccagaacaucaccgaggaguucuaccaguccaccugcuccgccgucuccaagggcuaccucuccgcccuccgcaccggcugguacaccuccgucaucaccaucgagcucuccaacaucaaggagaacaagugcaacggcaccgacgccaaggucaagcucaucaagcaggagcucgacaaguacaagaacgccgucaccgagcuccagcuccucaugcaguccacccccgccaccggcuccggcuccgccaucgccuccggcgucgccgucugcaagguccuccaccucgagggcgaggucaacaagaucaaguccgcccuccucuccaccaacaaggccgucgucucccucuccaacggcgucuccguccucaccuucaagguccucgaccucaagaacuacaucgacaagcagcuccuccccauccucaacaagcaguccugcuccaucuccaacaucgagaccgucaucgaguuccagcagaagaacaaccgccuccucgagaucacccgcgaguucuccgucaacgccggcgucaccacccccgucuccaccuacaugcucaccaacuccgagcuccucucccucaucaacgacaugcccaucaccaacgaccagaagaagcucauguccaacaacguccagaucguccgccagcaguccuacuccaucaugugcaucaucaaggaggagguccucgccuacgucguccagcucccccucuacggcgucaucgacacccccugcuggaagcuccacaccuccccccucugcaccaccaacaccaaggagggcuccaacaucugccucacccgcaccgaccgcggcugguacugcgacaacgccggcuccgucuccuucuucccccaggccgagaccugcaagguccaguccaaccgcgucuucugcgacaccaugaacucccgcacccuccccuccgaggucaaccucugcaacgucgacaucuucaaccccaaguacgacugcaagaucaugaccuccaagaccgacgucuccuccuccgucaucaccucccucggcgccaucgucuccugcuacggcaagaccaagugcaccgccuccaacaagaaccgcggcaucaucaagaccuucuccaacggcugcgacuacgucuccaacaagggcgucgacaccgucuccgucggcaacacccucuacuacgucaacaagcaggagggcaagucccucuacgucaagggcgagcccaucaucaacuucuacgacccccucgucuuccccuccgacgaguucgacgccuccaucucccaggucaacgagaagaucaaccagucccucgccuucauccgcaaguccgacgagcuccuccacaacgucaacgccggcaaguccaccaccaacaucaugaucaccaccaucaucaucgucaucaucgucauccuccucucccucaucgccgucggccuccuccucuacugcaaggcccgcugaggacuagugaagggaacacccaaauuuaauucagccuuaagcacaauuaauuaagagugaaacguaauuguacaagcaguuggucacccaccauagggcaugaucaacaccgcaaccuuuccuuuuucccccagugauucugaaaaaccccucuucccuucagcuugcuuagauguuccaaauuuaguaagcuuaaggcggccuacagaagaaaaagaaaaaaaaggccacaaaaguucccucucacuuucaguaaauaaaauaaaagcagcaacagaaauaaagaaauaaaugaaauucaaaaugaaauaaauauuguguugugcagcauuaaaaaaucaauaaaaauuaaaaaugagcaagaucuaaaaaaaaaaaaaaaaaaaaaaaaaaaaaaaaaaaaaaaaaaaaaaaaaaaaaaaaaaaaaaaaugcaucccccccccccccccccccccccccccccccaaaggcucuuuucagagccaccagaauu

SEQ ID NO: 4367 - RNA, 2214 nt, Artificial Sequence
  mRNA product Design d-3 comprising derived and/or modified sequence from HRSV(A2)__F-del_DSCav1_mut0 (opt3)
gggagagggcgcuuggcuugcaaggacccugagcugcggcauugaagcacacccaacccaacucgacugaagucagccucacugaaccggaucugagaaucuucucucucugggcuugccagggcucuccgaaccuagcuagcauccucuucaauuccaacuagaaagcuuaccauggagcugcucauccuuaaggccaacgcuauuaccacaauacugacugcagugacguucugcuuugccagcggccagaauaucaccgaagaguucuaccaauccacauguucugcggucucaaaaggguauuugagugcuuuaagaacuggaugguacaccagcguuauuacaaucgaacuguccaacauuaaggagaauaaaugcaacgguaccgacgccaaggugaaacuaaucaagcaggaacucgauaaguauaaaaaugcaguaacugagcugcagcuucugaugcagucuacacccgccaccggcucggggucagcuauagcaagcggaguggccgucuguaagguguugcaccucgagggcgaaguuaacaaaaucaagagugcucugcuguccacgaauaaagccguggucucucucagcaacgguguguccguauuaacuuuuaagguucuggaccuuaagaauuacauugauaaacaauugcugccuauccuaaacaagcagucaugcaguauuagcaauaucgagaccgugauagaguuccagcagaaaaacaauaggcuccuggaaauuacacgggaguuuucugucaacgcgggggugacuaccccaguguccacauauaugcuuaccaauucagaacuguugagccucaucaacgacaugccgauuacgaacgaucaaaagaaacugaugaguaauaacguccagaucguucgccagcagucuuacuccaucauguguauuauaaaggaggaaguguuagcauauguagugcaacugccccucuacggagucaucgacacuccuugcuggaaacuucauacaagcccacuguguaccacuaauacaaaggagggcucgaacauuugcuugacccgaacggaucguggcugguacugugacaaugccgggucuguguccuucuuuccccaggcugaaaccugcaagguucagucaaacagaguguucugugauacaaugaauaguagaacucugccuagcgaggucaaccucugcaauguggacaucuuuaacccaaaauaugauugcaagauaaugaccuccaaaacagacguaucuagcucaguuauuaccagucugggagccaucguguccuguuacgguaagacuaaaugcacagcaagcaauaagaacaggggcaucauuaagaccuucucuaaugggugugauuaugucucaaacaaaggaguggacacugucagugugggcaauacgcuuuacuauguuaacaagcaagaggguaaaagccuguacgugaagggggaacccaucauuaacuuuuaugacccuuugguauucccauccgaugaguuugacgcuucuauaucgcaggucaaugagaaaaucaaccagagccucgccuucauucggaaguccgaugaacuguuacacaaugugaacgcgggaaagucaacaaccaauaucaugaucacuaccauuauaaucguuauuaucgugauucugcuaagucucaucgccgucggccugcuuuuguacugcaaagcacgcugaggacuagugaagggaacacccaaauuuaauucagccuuaagcacaauuaauuaagagugaaacguaauuguacaagcaguuggucacccaccauagggcaugaucaacaccgcaaccuuuccuuuuucccccagugauucugaaaaaccccucuucccuucagcuugcuuagauguuccaaauuuaguaagcuuaaggcggccuacagaagaaaaagaaaaaaaaggccacaaaaguucccucucacuuucaguaaauaaaauaaaagcagcaacagaaauaaagaaauaaaugaaauucaaaaugaaauaaauauuguguugugcagcauuaaaaaaucaauaaaaauuaaaaaugagcaagaucuaaaaaaaaaaaaaaaaaaaaaaaaaaaaaaaaaaaaaaaaaaaaaaaaaaaaaaaaaaaaaaaaugcaucccccccccccccccccccccccccccccccaaaggcucuuuucagagccaccagaauu

SEQ ID NO: 4368 - RNA, 2214 nt, Artificial Sequence
  mRNA product Design d-3 comprising derived and/or modified sequence from HRSV(A2)__F-del_DSCav1_mut0 (opt4)
gggagagggcgcuuggcuugcaaggacccugagcugcggcauugaagcacacccaacccaacucgacugaagucagccucacugaaccggaucugagaaucuucucucucugggcuugccagggcucuccgaaccuagcuagcauccucuucaauuccaacuagaaagcuuaccauggagcugcugauccugaaggccaacgccaucaccaccauccugaccgccgugaccuucugcuucgccagcggccagaacaucaccgaggaguucuaccagagcaccugcagcgccgugagcaagggcuaccugagcgcccugagaaccggcugguacaccagcgugaucaccaucgagcugagcaacaucaaggagaacaagugcaacggcaccgacgccaaggugaagcugaucaagcaggagcuggacaaguacaagaacgccgugaccgagcugcagcugcugaugcagagcacccccgccaccggcagcggcagcgccaucgccagcggcguggccgugugcaaggugcugcaccuggagggcgaggugaacaagaucaagagcgcccugcugagcaccaacaaggccguggugagccugagcaacggcgugagcgugcugaccuucaaggugcuggaccugaagaacuacaucgacaagcagcugcugcccauccugaacaagcagagcugcagcaucagcaacaucgagaccgugaucgaguuccagcagaagaacaacagacugcuggagaucaccagagaguucagcgugaacgccggcgugaccacccccgugagcaccuacaugcugaccaacagcgagcugcugagccugaucaacgacaugcccaucaccaacgaccagaagaagcugaugagcaacaacgugcagaucgugagacagcagagcuacagcaucaugugcaucaucaaggaggaggugcuggccuacguggugcagcugccccuguacggcgugaucgacacccccugcuggaagcugcacaccagcccccugugcaccaccaacaccaaggagggcagcaacaucugccugaccagaaccgacagaggcugguacugcgacaacgccggcagcgugagcuucuucccccaggccgagaccugcaaggugcagagcaacagaguguucugcgacaccaugaacagcagaacccugcccagcgaggugaaccugugcaacguggacaucuucaaccccaaguacgacugcaagaucaugaccagcaagaccgacgugagcagcagcgugaucaccagccugggcgccaucgugagcugcuacggcaagaccaagugcaccgccagcaacaagaacagaggcaucaucaagaccuucagcaacggcugcgacuacgugagcaacaagggcguggacaccgugagcgugggcaacacccuguacuacgugaacaagcaggagggcaagagccuguacgugaagggcgagcccaucaucaacuucuacgacccccugguguuccccagcgacgaguucgacgccagcaucagccaggugaacgagaagaucaaccagagccuggccuucaucagaaagagcgacgagcugcugcacaacgugaacgccggcaagagcaccaccaacaucaugaucaccaccaucaucaucgugaucaucgugauccugcugagccugaucgccgugggccugcugcuguacugcaaggccagaugaggacuagugaagggaacacccaaauuuaauucagccuuaagcacaauuaauuaagagugaaacguaauuguacaagcaguuggucacccaccauagggcaugaucaacaccgcaaccuuuccuuuuucccccagugauucugaaaaaccccucuucccuucagcuugcuuagauguuccaaauuuaguaagcuuaaggcggccuacagaagaaaaagaaaaaaaaggccacaaaaguucccucucacuuucaguaaauaaaauaaaagcagcaacagaaauaaagaaauaaaugaaauucaaaaugaaauaaauauuguguugugcagcauuaaaaaaucaauaaaaauuaaaaaugagcaagaucuaaaaaaaaaaaaaaaaaaaaaaaaaaaaaaaaaaaaaaaaaaaaaaaaaaaaaaaaaaaaaaaaugcaucccccccccccccccccccccccccccccccaaaggcucuuuucagagccaccagaauu

SEQ ID NO: 4369 - RNA, 2214 nt, Artificial Sequence
  mRNA product Design d-3 comprising derived and/or modified sequence from HRSV(A2)__F-del_DSCav1_mut0 (opt5)
gggagagggcgcuuggcuugcaaggacccugagcugcggcauugaagcacacccaacccaacucgacugaagucagccucacugaaccggaucugagaaucuucucucucugggcuugccagggcucuccgaaccuagcuagcauccucuucaauuccaacuagaaagcuuaccauggagcugcucauccugaaggccaacgcuauuaccacaauccuuacggccgugaccuucugcuuugcgagcggccagaauauuacagaagaguucuaccaauccaccuguucugcugucagcaaaggguaucuguccgcccucagaacaggaugguacaccucuguuaucacaauugaacugagcaacaucaaggagaauaaaugcaacggcaccgacgccaaggugaaacuuaucaagcaggaacuggauaaguauaaaaaugcugugacggagcuccagcugcugaugcaguccacccccgccacagggucuggaagcgcuauugccuccggcgucgcgguguguaagguucuccaccuggagggggaagugaacaaaaucaagagcgcccuucugucuaccaauaaagcugucgugucccucagcaacggaguuucugugcugacauuuaagguccuugaccugaagaauuacauugauaaacaacuccugccuauccugaacaagcaguccugcagcauuucuaauaucgagaccgugauugaguuccagcagaaaaacaaucggcuccuggaaaucacgcgcgaguuuuccgugaacgccggcgucacaaccccgguuagcacauauaugcuuaccaauuccgaacugcucucucugaucaacgacaugcccauuaccaacgaucaaaagaaacuuaugagcaauaacgugcagaucgugagacagcaguccuacagcauuauguguaucauuaaggaggaaguccuggcuuaugugguucaacucccucuguacggcgugaucgacacacccugcuggaaacugcauacgucuccucucuguaccacaaauaccaaggagggguccaacaucugccugacacggaccgaucgcggaugguacugugacaaugccggcagcgucucuuucuuuccccaggcggaaacgugcaaggugcagagcaacagaguuuucugugauacaaugaacuccagaacccugccuucugaggugaaucucugcaaugucgacauuuuuaacccgaaauaugauugcaagaucaugaccagcaaaacagacguguccagcucugucauuaccucccugggggccaucgugagcuguuacggaaagacaaaaugcacggcuucuaauaagaaccggggcauuaucaagaccuucuccaaugggugugauuauguuagcaacaaaggaguggacacagucuccgugggcaauacccuuuacuauguuaacaagcaagagggcaaaucucuguacgugaagggggaacccaucauuaacuuuuaugacccucucgucuuccccagcgaugaguuugacgccuccaucucucaggugaaugagaaaauuaaccagagccuggcuuucauccgcaaguccgaugaacugcuccacaaugugaacgccggaaagagcacaaccaauauuaugaucacgaccauuaucaucguuauuaucgucauucugcuuucucugaucgccgugggccuccugcuguacugcaaagcuagaugaggacuagugaagggaacacccaaauuuaauucagccuuaagcacaauuaauuaagagugaaacguaauuguacaagcaguuggucacccaccauagggcaugaucaacaccgcaaccuuuccuuuuucccccagugauucugaaaaaccccucuucccuucagcuugcuuagauguuccaaauuuaguaagcuuaaggcggccuacagaagaaaaagaaaaaaaaggccacaaaaguucccucucacuuucaguaaauaaaauaaaagcagcaacagaaauaaagaaauaaaugaaauucaaaaugaaauaaauauuguguugugcagcauuaaaaaaucaauaaaaauuaaaaaugagcaagaucuaaaaaaaaaaaaaaaaaaaaaaaaaaaaaaaaaaaaaaaaaaaaaaaaaaaaaaaaaaaaaaaaugcaucccccccccccccccccccccccccccccccaaaggcucuuuucagagccaccagaauu

SEQ ID NO: 4370 - RNA, 2214 nt, Artificial Sequence
  mRNA product Design d-3 comprising derived and/or modified sequence from HRSV(A2)__F-del_DSCav1_mut0 (opt6)
gggagagggcgcuuggcuugcaaggacccugagcugcggcauugaagcacacccaacccaacucgacugaagucagccucacugaaccggaucugagaaucuucucucucugggcuugccagggcucuccgaaccuagcuagcauccucuucaauuccaacuagaaagcuuaccauggaauuacucauccucaaagcaaacgcaauaacaacaauacuaacagcagucacuuucugcuucgcauccggacaaaauaucacagaagaauuuuaccaauccaccugcucugcugucuccaaaggauaccuaucugcccucagaaccgguugguauacaucugucauaaccauagaacuaucaaacauuaaagaaaacaaauguaacggaacagacgcaaaagucaaacuuauaaaacaagaauuagacaaauacaaaaacgcagucacagaauuacaacuacuaaugcaaucaaccccagcaaccggaucaggauccgcaauagcuucaggaguagcaguauguaaaguucuacacuuagaaggagaagucaacaaaauuaaauccgcacuauuaucaaccaacaaagcagucguaucuuuaucaaacggaguaucuguacuuacauucaaaguacuagaccuaaaaaauuacauugauaaacaauuacuaccaauacuaaacaaacaaucauguuccaucucuaacauagaaacaguaauagaauuucaacaaaaaaauaacagauuacuugaaaucacccgagaauuuucaguaaacgcaggaguaaccacacccguaucuacauacaugcuaacaaacucugaacuucugagccuaauaaaugacaugccaauaaccaacgaccaaaaaaaacuaauguccaacaacguacaaauaguacgacaacaaucuuacucaaucaugugcauaaucaaagaagaaguacuagcuuauguaguccaacuuccacucuacggaguaauagacacccccugcuggaaacuacacacaucaccacuaugcacaacaaacacaaaagaaggcucaaacauaugccuaacaagaacugacagaggaugguauugugacaaugcaggcucugucucauucuuuccacaagccgaaacaugcaaaguucaaucaaaccgaguuuucugugacacaaugaacucuagaacucucccaucagaagucaacuuaugcaacguugacauauucaacccaaaauaugacuguaaaauaaugacuuccaaaacugauguaucauccuccgucauaacaucccuaggagcuauuguaucauguuacgggaaaaccaaaugcacagccucaaacaaaaaccgcgguaucauaaaaacauuuucaaacggaugugauuacguaagcaauaaaggaguagacaccguaucaguaggaaauacacuauacuauguaaauaaacaagaaggaaaaucacuauaugucaaaggagaaccaaucauaaauuucuaugacccacuuguauucccauccgaugaauuugacgcaagcauuucacaggucaacgaaaaaauaaaccaaucacuagccuucaucagaaaaucagacgaacuacuacauaacguaaacgccggaaaaucaacaaccaacauaaugauaacaacaaucauaauaguuaucauaguaauacuacuaucucuaauagcugucggacucuuacuauauugcaaagcccgauaaggacuagugaagggaacacccaaauuuaauucagccuuaagcacaauuaauuaagagugaaacguaauuguacaagcaguuggucacccaccauagggcaugaucaacaccgcaaccuuuccuuuuucccccagugauucugaaaaaccccucuucccuucagcuugcuuagauguuccaaauuuaguaagcuuaaggcggccuacagaagaaaaagaaaaaaaaggccacaaaaguucccucucacuuucaguaaauaaaauaaaagcagcaacagaaauaaagaaauaaaugaaauucaaaaugaaauaaauauuguguugugcagcauuaaaaaaucaauaaaaauuaaaaaugagcaagaucuaaaaaaaaaaaaaaaaaaaaaaaaaaaaaaaaaaaaaaaaaaaaaaaaaaaaaaaaaaaaaaaaugcaucccccccccccccccccccccccccccccccaaaggcucuuuucagagccaccagaauu

SEQ ID NO: 4371 - RNA, 2214 nt, Artificial Sequence
  mRNA product Design d-3 comprising derived and/or modified sequence from HRSV(A2)__F-del_DSCav1_mut0 (opt11)
gggagagggcgcuuggcuugcaaggacccugagcugcggcauugaagcacacccaacccaacucgacugaagucagccucacugaaccggaucugagaaucuucucucucugggcuugccagggcucuccgaaccuagcuagcauccucuucaauuccaacuagaaagcuuaccauggaacuacuaauccugaaagccaacgccauaaccacaauccuuaccgcagucaccuucugcuucgccuccggucaaaacaucacagaagaguucuaccaauccaccuguuccgcagucagcaaaggcuaccucuccgcacuccgaaccggaugguacaccagcgucaucaccaucgaacuauccaacauaaaggaaaauaagugcaaugguacagaugccaaggucaaacucauaaagcaagaacucgacaaauacaaaaacgccgucaccgaacuacaacuacuaaugcaaucuacccccgcaacaggcucagguuccgccauagccuccggcgucgccguuugcaaaguccuccaccucgaaggcgaaguaaacaaaaucaaauccgcccuacucucaaccaacaaagcagucgucucccucucaaacggagucucgguccucaccuucaaaguccucgaccucaaaaacuauauagacaaacaacuccuacccauacucaacaaacaguccugcagcauauccaacaucgaaaccgugaucgaguuccaacagaaaaacaacagacuccucgaaaucacucgagaguucuccguaaacgccggcgucacaaccccagucucaacauacaugcucaccaacagcgaacuccuaucacuaaucaacgacaugccuaucacaaaugaucagaagaaacuaaugagcaacaacguccaaaucguccgccaacaaucauacuccaucaugugcaucauaaaagaagaaguccuagccuacgugguccagcuaccccucuacggcguaauugacaccccuugcuggaaacuacacacuucaccccucugcacaaccaacaccaaagaagguucaaacaucugccucacacgaacagaccgcggcugguacugcgacaacgccggauccguauccuucuucccccaagcagaaaccugcaaaguucaauccaaccggguauucugcgacaccaugaacucaagaacccuucccuccgaaguaaaucuaugcaacgucgacauauucaacccaaaauacgacugcaaaaucaugaccuccaaaaccgaugucuccagcagcgucaucaccagccucggcgccaucgucuccugcuacggcaaaacaaaauguacagcauccaacaaaaaccgaggcauaaucaaaaccuucuccaacgggugcgauuacgucagcaacaaaggcgucgacaccgucuccgugggcaacacccuauacuacgucaacaaacaagaaggcaaaucacuguacguaaagggcgaacccaucaucaacuucuaugacccucugguguucccauccgaugaauuugacgcauccauaucucaggucaacgaaaagaucaaccaaucccucgccuucauacgcaaauccgacgaacuccuacacaacgucaacgcugguaaaagcaccaccaacaucaugaucaccacaaucaucaucgucauaaucguuauccuacucucccuuauagcagucggacuccuccucuacugcaaagcccgcuaaggacuagugaagggaacacccaaauuuaauucagccuuaagcacaauuaauuaagagugaaacguaauuguacaagcaguuggucacccaccauagggcaugaucaacaccgcaaccuuuccuuuuucccccagugauucugaaaaaccccucuucccuucagcuugcuuagauguuccaaauuuaguaagcuuaaggcggccuacagaagaaaaagaaaaaaaaggccacaaaaguucccucucacuuucaguaaauaaaauaaaagcagcaacagaaauaaagaaauaaaugaaauucaaaaugaaauaaauauuguguugugcagcauuaaaaaaucaauaaaaauuaaaaaugagcaagaucuaaaaaaaaaaaaaaaaaaaaaaaaaaaaaaaaaaaaaaaaaaaaaaaaaaaaaaaaaaaaaaaaugcaucccccccccccccccccccccccccccccccaaaggcucuuuucagagccaccagaauu

SEQ ID NO: 4372 - RNA, 1897 nt, Artificial Sequence
  mRNA product Design d-4 comprising derived and/or modified sequence from HRSV(A2)__F-del_DSCav1_mut0 (opt1)
gggagagucccgcagucggcguccagcggcucugcuuguucgugugugugucguugcaggccuuauucaagcuuaccauggagcugcucauccugaaggccaacgccaucaccaccauccugacggcggugaccuucugcuucgccagcggccagaacaucaccgaggaguucuaccaguccacgugcagcgccgucuccaagggguaccucagcgcccugcggaccggcugguacaccuccgugaucaccaucgagcugagcaacaucaaggagaacaagugcaacgggaccgacgccaaggugaagcucaucaagcaggagcuggacaaguacaagaacgcggucacggagcugcagcuccugaugcaguccaccccggcaaccggcuccggcuccgccaucgcgagcggcgucgccgugugcaaggugcugcaccucgagggggaggucaacaagaucaagagcgcccugcuguccaccaacaaggccguggugagccucuccaacggcgucagcgugcugaccuucaaggugcuggaccucaagaacuacaucgacaagcagcugcugcccauccugaacaagcagagcugcuccaucagcaacaucgagacggugaucgaguuccagcagaagaacaaccggcuccuggagaucacccgcgaguucagcgugaacgccggggucaccacccccguguccacguacaugcugaccaacagcgagcuccugucccugaucaacgacaugccgaucaccaacgaccagaagaagcucaugagcaacaacgugcagaucguccggcagcaguccuacagcaucaugugcaucaucaaggaggaggugcuggcguacgugguccagcugccccucuacggcgugaucgacacccccugcuggaagcugcacacgagcccccugugcaccaccaacaccaaggagggguccaacaucugccucacgcgcaccgaccggggcugguacugcgacaacgccggcagcgucuccuucuucccgcaggccgagaccugcaaggugcagagcaaccgcguguucugcgacaccaugaacucccggacgcugcccagcgagguaaaccucugcaacgucgacaucuucaaccccaaguacgacugcaagaucaugaccuccaagaccgacgugagcuccagcgugaucaccucccugggggccaucgucagcugcuacggcaagacgaagugcaccgccagcaacaagaaccgggggaucaucaagaccuucuccaacggcugcgacuacgugagcaacaagggcguggacaccguguccgucgggaacacccuguacuacgugaacaagcaggagggcaagagccucuacgugaagggggagcccaucaucaacuucuacgacccgcuggucuuccccuccgacgaguucgacgcgagcaucucccaggugaacgagaagaucaaccagagccuggccuucauccgcaaguccgacgagcugcuccacaacgugaacgccggcaagagcacgaccaacaucaugaucaccaccaucaucaucgucaucaucgugauccugcugucccucaucgccguggggcugcugcucuacugcaaggcccggugaggacuaguggaagcauuuuccuggcugauuaaaagaaauuacucagcuauggucaucuguuccuguuagaaggcuaugcagcauauuauauacuaugcgcauguuaugaaaugcauaauaaaaaauuuuaaaaaaucuaaaagaucuaaaaaaaaaaaaaaaaaaaaaaaaaaaaaaaaaaaaaaaaaaaaaaaaaaaaaaaaaaaaaaaaugcaucccccccccccccccccccccccccccccccaaaggcucuuuucagagccaccagaauu

SEQ ID NO: 4373 - RNA, 1897 nt, Artificial Sequence
  mRNA product Design d-4 comprising derived and/or modified sequence from HRSV(A2)__F-del_DSCav1_mut0 (opt1)
gggagagucccgcagucggcguccagcggcucugcuuguucgugugugugucguugcaggccuuauucaagcuuaccauggagcugcucauccugaaggccaacgccaucaccaccauccugacggcggugaccuucugcuucgccagcggccagaacaucaccgaggaguucuaccaguccacgugcagcgccgucuccaagggguaccucagcgcccugcgcaccggcugguacaccuccgugaucaccaucgagcugagcaacaucaaggagaacaagugcaacgggaccgacgccaaggugaagcucaucaagcaggagcuggacaaguacaagaacgcggucacggagcugcagcuccugaugcaguccacccccgccaccggcagcggguccgccaucgccagcggcguggcggugugcaagguccugcaccucgagggcgaggugaacaagaucaaguccgcccugcugagcaccaacaaggccguggucucccucagcaacgggguguccgugcugacguucaagguccuggaccucaagaacuacaucgacaagcagcugcugccgauccucaacaagcagagcugcuccaucagcaacaucgagaccgugaucgaguuccagcagaagaacaaccggcugcuggagaucacccgcgaguucuccgugaacgccggcgucaccacgcccgugagcaccuacaugcucaccaacagcgagcugcugucccucaucaacgacaugcccaucaccaacgaccagaagaagcugaugagcaacaacgugcagaucguccggcagcaguccuacagcaucaugugcaucaucaaggaggaggugcuggccuacgugguccagcucccccuguacggggugaucgacacgccgugcuggaagcugcacaccagcccccucugcaccaccaacacgaaggagggcuccaacaucugccugacccgcaccgaccgggggugguacugcgacaacgcgggcuccgugagcuucuucccccaggccgagaccugcaagguccaguccaaccgcguguucugcgacacgaugaacagccggacccuccccuccgaggucaaccugugcaacguggacaucuucaacccgaaguacgacugcaagaucaugaccagcaagaccgacguguccagcuccgucaucacgagccugggcgccaucguguccugcuacgggaagaccaagugcaccgccagcaacaagaaccggggcaucaucaagaccuucuccaacgggugcgacuacgugagcaacaagggcgucgacacggugagcgugggcaacacccucuacuacgucaacaagcaggaggggaagucccuguacgugaagggcgagcccaucaucaacuucuacgacccccugguguuccccagcgacgaguucgacgccuccaucagccaggucaacgagaagaucaaccagucccucgcguucauccgcaagagcgacgagcugcugcacaacgugaacgccgggaaguccaccaccaacaucaugaucaccacgaucaucaucgugaucaucgucauccuccugagccugaucgccgugggccuccugcuguacugcaaggcccggugaggacuaguggaagcauuuuccuggcugauuaaaagaaauuacucagcuauggucaucuguuccuguuagaaggcuaugcagcauauuauauacuaugcgcauguuaugaaaugcauaauaaaaaauuuuaaaaaaucuaaaagaucuaaaaaaaaaaaaaaaaaaaaaaaaaaaaaaaaaaaaaaaaaaaaaaaaaaaaaaaaaaaaaaaaugcaucccccccccccccccccccccccccccccccaaaggcucuuuucagagccaccagaauu

SEQ ID NO: 4374 - RNA, 1897 nt, Artificial Sequence
  mRNA product Design d-4 comprising derived and/or modified sequence from HRSV(A2)__F-del_DSCav1_mut0 (opt2)
gggagagucccgcagucggcguccagcggcucugcuuguucgugugugugucguugcaggccuuauucaagcuuaccauggagcuccucauccucaaggccaacgccaucaccaccauccucaccgccgucaccuucugcuucgccuccggccagaacaucaccgaggaguucuaccaguccaccugcuccgccgucuccaagggcuaccucuccgcccuccgcaccggcugguacaccuccgucaucaccaucgagcucuccaacaucaaggagaacaagugcaacggcaccgacgccaaggucaagcucaucaagcaggagcucgacaaguacaagaacgccgucaccgagcuccagcuccucaugcaguccacccccgccaccggcuccggcuccgccaucgccuccggcgucgccgucugcaagguccuccaccucgagggcgaggucaacaagaucaaguccgcccuccucuccaccaacaaggccgucgucucccucuccaacggcgucuccguccucaccuucaagguccucgaccucaagaacuacaucgacaagcagcuccuccccauccucaacaagcaguccugcuccaucuccaacaucgagaccgucaucgaguuccagcagaagaacaaccgccuccucgagaucacccgcgaguucuccgucaacgccggcgucaccacccccgucuccaccuacaugcucaccaacuccgagcuccucucccucaucaacgacaugcccaucaccaacgaccagaagaagcucauguccaacaacguccagaucguccgccagcaguccuacuccaucaugugcaucaucaaggaggagguccucgccuacgucguccagcucccccucuacggcgucaucgacacccccugcuggaagcuccacaccuccccccucugcaccaccaacaccaaggagggcuccaacaucugccucacccgcaccgaccgcggcugguacugcgacaacgccggcuccgucuccuucuucccccaggccgagaccugcaagguccaguccaaccgcgucuucugcgacaccaugaacucccgcacccuccccuccgaggucaaccucugcaacgucgacaucuucaaccccaaguacgacugcaagaucaugaccuccaagaccgacgucuccuccuccgucaucaccucccucggcgccaucgucuccugcuacggcaagaccaagugcaccgccuccaacaagaaccgcggcaucaucaagaccuucuccaacggcugcgacuacgucuccaacaagggcgucgacaccgucuccgucggcaacacccucuacuacgucaacaagcaggagggcaagucccucuacgucaagggcgagcccaucaucaacuucuacgacccccucgucuuccccuccgacgaguucgacgccuccaucucccaggucaacgagaagaucaaccagucccucgccuucauccgcaaguccgacgagcuccuccacaacgucaacgccggcaaguccaccaccaacaucaugaucaccaccaucaucaucgucaucaucgucauccuccucucccucaucgccgucggccuccuccucuacugcaaggcccgcugaggacuaguggaagcauuuuccuggcugauuaaaagaaauuacucagcuauggucaucuguuccuguuagaaggcuaugcagcauauuauauacuaugcgcauguuaugaaaugcauaauaaaaaauuuuaaaaaaucuaaaagaucuaaaaaaaaaaaaaaaaaaaaaaaaaaaaaaaaaaaaaaaaaaaaaaaaaaaaaaaaaaaaaaaaugcaucccccccccccccccccccccccccccccccaaaggcucuuuucagagccaccagaauu

SEQ ID NO: 4375 - RNA, 1897 nt, Artificial Sequence
  mRNA product Design d-4 comprising derived and/or modified sequence from HRSV(A2)__F-del_DSCav1_mut0 (opt3)
gggagagucccgcagucggcguccagcggcucugcuuguucgugugugugucguugcaggccuuauucaagcuuaccauggagcugcucauccuuaaggccaacgcuauuaccacaauacugacugcagugacguucugcuuugccagcggccagaauaucaccgaagaguucuaccaauccacauguucugcggucucaaaaggguauuugagugcuuuaagaacuggaugguacaccagcguuauuacaaucgaacuguccaacauuaaggagaauaaaugcaacgguaccgacgccaaggugaaacuaaucaagcaggaacucgauaaguauaaaaaugcaguaacugagcugcagcuucugaugcagucuacacccgccaccggcucggggucagcuauagcaagcggaguggccgucuguaagguguugcaccucgagggcgaaguuaacaaaaucaagagugcucugcuguccacgaauaaagccguggucucucucagcaacgguguguccguauuaacuuuuaagguucuggaccuuaagaauuacauugauaaacaauugcugccuauccuaaacaagcagucaugcaguauuagcaauaucgagaccgugauagaguuccagcagaaaaacaauaggcuccuggaaauuacacgggaguuuucugucaacgcgggggugacuaccccaguguccacauauaugcuuaccaauucagaacuguugagccucaucaacgacaugccgauuacgaacgaucaaaagaaacugaugaguaauaacguccagaucguucgccagcagucuuacuccaucauguguauuauaaaggaggaaguguuagcauauguagugcaacugccccucuacggagucaucgacacuccuugcuggaaacuucauacaagcccacuguguaccacuaauacaaaggagggcucgaacauuugcuugacccgaacggaucguggcugguacugugacaaugccgggucuguguccuucuuuccccaggcugaaaccugcaagguucagucaaacagaguguucugugauacaaugaauaguagaacucugccuagcgaggucaaccucugcaauguggacaucuuuaacccaaaauaugauugcaagauaaugaccuccaaaacagacguaucuagcucaguuauuaccagucugggagccaucguguccuguuacgguaagacuaaaugcacagcaagcaauaagaacaggggcaucauuaagaccuucucuaaugggugugauuaugucucaaacaaaggaguggacacugucagugugggcaauacgcuuuacuauguuaacaagcaagaggguaaaagccuguacgugaagggggaacccaucauuaacuuuuaugacccuuugguauucccauccgaugaguuugacgcuucuauaucgcaggucaaugagaaaaucaaccagagccucgccuucauucggaaguccgaugaacuguuacacaaugugaacgcgggaaagucaacaaccaauaucaugaucacuaccauuauaaucguuauuaucgugauucugcuaagucucaucgccgucggccugcuuuuguacugcaaagcacgcugaggacuaguggaagcauuuuccuggcugauuaaaagaaauuacucagcuauggucaucuguuccuguuagaaggcuaugcagcauauuauauacuaugcgcauguuaugaaaugcauaauaaaaaauuuuaaaaaaucuaaaagaucuaaaaaaaaaaaaaaaaaaaaaaaaaaaaaaaaaaaaaaaaaaaaaaaaaaaaaaaaaaaaaaaaugcaucccccccccccccccccccccccccccccccaaaggcucuuuucagagccaccagaauu

SEQ ID NO: 4376 - RNA, 1897 nt, Artificial Sequence
  mRNA product Design d-4 comprising derived and/or modified sequence from HRSV(A2)__F-del_DSCav1_mut0 (opt4)
gggagagucccgcagucggcguccagcggcucugcuuguucgugugugugucguugcaggccuuauucaagcuuaccauggagcugcugauccugaaggccaacgccaucaccaccauccugaccgccgugaccuucugcuucgccagcggccagaacaucaccgaggaguucuaccagagcaccugcagcgccgugagcaagggcuaccugagcgcccugagaaccggcugguacaccagcgugaucaccaucgagcugagcaacaucaaggagaacaagugcaacggcaccgacgccaaggugaagcugaucaagcaggagcuggacaaguacaagaacgccgugaccgagcugcagcugcugaugcagagcacccccgccaccggcagcggcagcgccaucgccagcggcguggccgugugcaaggugcugcaccuggagggcgaggugaacaagaucaagagcgcccugcugagcaccaacaaggccguggugagccugagcaacggcgugagcgugcugaccuucaaggugcuggaccugaagaacuacaucgacaagcagcugcugcccauccugaacaagcagagcugcagcaucagcaacaucgagaccgugaucgaguuccagcagaagaacaacagacugcuggagaucaccagagaguucagcgugaacgccggcgugaccacccccgugagcaccuacaugcugaccaacagcgagcugcugagccugaucaacgacaugcccaucaccaacgaccagaagaagcugaugagcaacaacgugcagaucgugagacagcagagcuacagcaucaugugcaucaucaaggaggaggugcuggccuacguggugcagcugccccuguacggcgugaucgacacccccugcuggaagcugcacaccagcccccugugcaccaccaacaccaaggagggcagcaacaucugccugaccagaaccgacagaggcugguacugcgacaacgccggcagcgugagcuucuucccccaggccgagaccugcaaggugcagagcaacagaguguucugcgacaccaugaacagcagaacccugcccagcgaggugaaccugugcaacguggacaucuucaaccccaaguacgacugcaagaucaugaccagcaagaccgacgugagcagcagcgugaucaccagccugggcgccaucgugagcugcuacggcaagaccaagugcaccgccagcaacaagaacagaggcaucaucaagaccuucagcaacggcugcgacuacgugagcaacaagggcguggacaccgugagcgugggcaacacccuguacuacgugaacaagcaggagggcaagagccuguacgugaagggcgagcccaucaucaacuucuacgacccccugguguuccccagcgacgaguucgacgccagcaucagccaggugaacgagaagaucaaccagagccuggccuucaucagaaagagcgacgagcugcugcacaacgugaacgccggcaagagcaccaccaacaucaugaucaccaccaucaucaucgugaucaucgugauccugcugagccugaucgccgugggccugcugcuguacugcaaggccagaugaggacuaguggaagcauuuuccuggcugauuaaaagaaauuacucagcuauggucaucuguuccuguuagaaggcuaugcagcauauuauauacuaugcgcauguuaugaaaugcauaauaaaaaauuuuaaaaaaucuaaaagaucuaaaaaaaaaaaaaaaaaaaaaaaaaaaaaaaaaaaaaaaaaaaaaaaaaaaaaaaaaaaaaaaaugcaucccccccccccccccccccccccccccccccaaaggcucuuuucagagccaccagaauu

SEQ ID NO: 4377 - RNA, 1897 nt, Artificial Sequence
  mRNA product Design d-4 comprising derived and/or modified sequence from HRSV(A2)__F-del_DSCav1_mut0 (opt5)
gggagagucccgcagucggcguccagcggcucugcuuguucgugugugugucguugcaggccuuauucaagcuuaccauggagcugcucauccugaaggccaacgcuauuaccacaauccuuacggccgugaccuucugcuuugcgagcggccagaauauuacagaagaguucuaccaauccaccuguucugcugucagcaaaggguaucuguccgcccucagaacaggaugguacaccucuguuaucacaauugaacugagcaacaucaaggagaauaaaugcaacggcaccgacgccaaggugaaacuuaucaagcaggaacuggauaaguauaaaaaugcugugacggagcuccagcugcugaugcaguccacccccgccacagggucuggaagcgcuauugccuccggcgucgcgguguguaagguucuccaccuggagggggaagugaacaaaaucaagagcgcccuucugucuaccaauaaagcugucgugucccucagcaacggaguuucugugcugacauuuaagguccuugaccugaagaauuacauugauaaacaacuccugccuauccugaacaagcaguccugcagcauuucuaauaucgagaccgugauugaguuccagcagaaaaacaaucggcuccuggaaaucacgcgcgaguuuuccgugaacgccggcgucacaaccccgguuagcacauauaugcuuaccaauuccgaacugcucucucugaucaacgacaugcccauuaccaacgaucaaaagaaacuuaugagcaauaacgugcagaucgugagacagcaguccuacagcauuauguguaucauuaaggaggaaguccuggcuuaugugguucaacucccucuguacggcgugaucgacacacccugcuggaaacugcauacgucuccucucuguaccacaaauaccaaggagggguccaacaucugccugacacggaccgaucgcggaugguacugugacaaugccggcagcgucucuuucuuuccccaggcggaaacgugcaaggugcagagcaacagaguuuucugugauacaaugaacuccagaacccugccuucugaggugaaucucugcaaugucgacauuuuuaacccgaaauaugauugcaagaucaugaccagcaaaacagacguguccagcucugucauuaccucccugggggccaucgugagcuguuacggaaagacaaaaugcacggcuucuaauaagaaccggggcauuaucaagaccuucuccaaugggugugauuauguuagcaacaaaggaguggacacagucuccgugggcaauacccuuuacuauguuaacaagcaagagggcaaaucucuguacgugaagggggaacccaucauuaacuuuuaugacccucucgucuuccccagcgaugaguuugacgccuccaucucucaggugaaugagaaaauuaaccagagccuggcuuucauccgcaaguccgaugaacugcuccacaaugugaacgccggaaagagcacaaccaauauuaugaucacgaccauuaucaucguuauuaucgucauucugcuuucucugaucgccgugggccuccugcuguacugcaaagcuagaugaggacuaguggaagcauuuuccuggcugauuaaaagaaauuacucagcuauggucaucuguuccuguuagaaggcuaugcagcauauuauauacuaugcgcauguuaugaaaugcauaauaaaaaauuuuaaaaaaucuaaaagaucuaaaaaaaaaaaaaaaaaaaaaaaaaaaaaaaaaaaaaaaaaaaaaaaaaaaaaaaaaaaaaaaaugcaucccccccccccccccccccccccccccccccaaaggcucuuuucagagccaccagaauu

SEQ ID NO: 4378 - RNA, 1897 nt, Artificial Sequence
  mRNA product Design d-4 comprising derived and/or modified sequence from HRSV(A2)__F-del_DSCav1_mut0 (opt6)
gggagagucccgcagucggcguccagcggcucugcuuguucgugugugugucguugcaggccuuauucaagcuuaccauggaauuacucauccucaaagcaaacgcaauaacaacaauacuaacagcagucacuuucugcuucgcauccggacaaaauaucacagaagaauuuuaccaauccaccugcucugcugucuccaaaggauaccuaucugcccucagaaccgguugguauacaucugucauaaccauagaacuaucaaacauuaaagaaaacaaauguaacggaacagacgcaaaagucaaacuuauaaaacaagaauuagacaaauacaaaaacgcagucacagaauuacaacuacuaaugcaaucaaccccagcaaccggaucaggauccgcaauagcuucaggaguagcaguauguaaaguucuacacuuagaaggagaagucaacaaaauuaaauccgcacuauuaucaaccaacaaagcagucguaucuuuaucaaacggaguaucuguacuuacauucaaaguacuagaccuaaaaaauuacauugauaaacaauuacuaccaauacuaaacaaacaaucauguuccaucucuaacauagaaacaguaauagaauuucaacaaaaaaauaacagauuacuugaaaucacccgagaauuuucaguaaacgcaggaguaaccacacccguaucuacauacaugcuaacaaacucugaacuucugagccuaauaaaugacaugccaauaaccaacgaccaaaaaaaacuaauguccaacaacguacaaauaguacgacaacaaucuuacucaaucaugugcauaaucaaagaagaaguacuagcuuauguaguccaacuuccacucuacggaguaauagacacccccugcuggaaacuacacacaucaccacuaugcacaacaaacacaaaagaaggcucaaacauaugccuaacaagaacugacagaggaugguauugugacaaugcaggcucugucucauucuuuccacaagccgaaacaugcaaaguucaaucaaaccgaguuuucugugacacaaugaacucuagaacucucccaucagaagucaacuuaugcaacguugacauauucaacccaaaauaugacuguaaaauaaugacuuccaaaacugauguaucauccuccgucauaacaucccuaggagcuauuguaucauguuacgggaaaaccaaaugcacagccucaaacaaaaaccgcgguaucauaaaaacauuuucaaacggaugugauuacguaagcaauaaaggaguagacaccguaucaguaggaaauacacuauacuauguaaauaaacaagaaggaaaaucacuauaugucaaaggagaaccaaucauaaauuucuaugacccacuuguauucccauccgaugaauuugacgcaagcauuucacaggucaacgaaaaaauaaaccaaucacuagccuucaucagaaaaucagacgaacuacuacauaacguaaacgccggaaaaucaacaaccaacauaaugauaacaacaaucauaauaguuaucauaguaauacuacuaucucuaauagcugucggacucuuacuauauugcaaagcccgauaaggacuaguggaagcauuuuccuggcugauuaaaagaaauuacucagcuauggucaucuguuccuguuagaaggcuaugcagcauauuauauacuaugcgcauguuaugaaaugcauaauaaaaaauuuuaaaaaaucuaaaagaucuaaaaaaaaaaaaaaaaaaaaaaaaaaaaaaaaaaaaaaaaaaaaaaaaaaaaaaaaaaaaaaaaugcaucccccccccccccccccccccccccccccccaaaggcucuuuucagagccaccagaauu

SEQ ID NO: 4379 - RNA, 1897 nt, Artificial Sequence
  mRNA product Design d-4 comprising derived and/or modified sequence from HRSV(A2)__F-del_DSCav1_mut0 (opt11)
gggagagucccgcagucggcguccagcggcucugcuuguucgugugugugucguugcaggccuuauucaagcuuaccauggaacuacuaauccugaaagccaacgccauaaccacaauccuuaccgcagucaccuucugcuucgccuccggucaaaacaucacagaagaguucuaccaauccaccuguuccgcagucagcaaaggcuaccucuccgcacuccgaaccggaugguacaccagcgucaucaccaucgaacuauccaacauaaaggaaaauaagugcaaugguacagaugccaaggucaaacucauaaagcaagaacucgacaaauacaaaaacgccgucaccgaacuacaacuacuaaugcaaucuacccccgcaacaggcucagguuccgccauagccuccggcgucgccguuugcaaaguccuccaccucgaaggcgaaguaaacaaaaucaaauccgcccuacucucaaccaacaaagcagucgucucccucucaaacggagucucgguccucaccuucaaaguccucgaccucaaaaacuauauagacaaacaacuccuacccauacucaacaaacaguccugcagcauauccaacaucgaaaccgugaucgaguuccaacagaaaaacaacagacuccucgaaaucacucgagaguucuccguaaacgccggcgucacaaccccagucucaacauacaugcucaccaacagcgaacuccuaucacuaaucaacgacaugccuaucacaaaugaucagaagaaacuaaugagcaacaacguccaaaucguccgccaacaaucauacuccaucaugugcaucauaaaagaagaaguccuagccuacgugguccagcuaccccucuacggcguaauugacaccccuugcuggaaacuacacacuucaccccucugcacaaccaacaccaaagaagguucaaacaucugccucacacgaacagaccgcggcugguacugcgacaacgccggauccguauccuucuucccccaagcagaaaccugcaaaguucaauccaaccggguauucugcgacaccaugaacucaagaacccuucccuccgaaguaaaucuaugcaacgucgacauauucaacccaaaauacgacugcaaaaucaugaccuccaaaaccgaugucuccagcagcgucaucaccagccucggcgccaucgucuccugcuacggcaaaacaaaauguacagcauccaacaaaaaccgaggcauaaucaaaaccuucuccaacgggugcgauuacgucagcaacaaaggcgucgacaccgucuccgugggcaacacccuauacuacgucaacaaacaagaaggcaaaucacuguacguaaagggcgaacccaucaucaacuucuaugacccucugguguucccauccgaugaauuugacgcauccauaucucaggucaacgaaaagaucaaccaaucccucgccuucauacgcaaauccgacgaacuccuacacaacgucaacgcugguaaaagcaccaccaacaucaugaucaccacaaucaucaucgucauaaucguuauccuacucucccuuauagcagucggacuccuccucuacugcaaagcccgcuaaggacuaguggaagcauuuuccuggcugauuaaaagaaauuacucagcuauggucaucuguuccuguuagaaggcuaugcagcauauuauauacuaugcgcauguuaugaaaugcauaauaaaaaauuuuaaaaaaucuaaaagaucuaaaaaaaaaaaaaaaaaaaaaaaaaaaaaaaaaaaaaaaaaaaaaaaaaaaaaaaaaaaaaaaaugcaucccccccccccccccccccccccccccccccaaaggcucuuuucagagccaccagaauu

SEQ ID NO: 4380 - RNA, 1994 nt, Artificial Sequence
  mRNA product Design d-5 comprising derived and/or modified sequence from HRSV(A2)__F-del_DSCav1_mut0 (opt1)
gggagagggcgcuuggcuugcaaggacccugagcugcggcauugaagcacacccaacccaacucgacugaagucagccucacugaaccggaucugagaaucuucucucucugggcuugccagggcucuccgaaccuagcuagcauccucuucaauuccaacuagaaagcuuaccauggagcugcucauccugaaggccaacgccaucaccaccauccugacggcggugaccuucugcuucgccagcggccagaacaucaccgaggaguucuaccaguccacgugcagcgccgucuccaagggguaccucagcgcccugcggaccggcugguacaccuccgugaucaccaucgagcugagcaacaucaaggagaacaagugcaacgggaccgacgccaaggugaagcucaucaagcaggagcuggacaaguacaagaacgcggucacggagcugcagcuccugaugcaguccaccccggcaaccggcuccggcuccgccaucgcgagcggcgucgccgugugcaaggugcugcaccucgagggggaggucaacaagaucaagagcgcccugcuguccaccaacaaggccguggugagccucuccaacggcgucagcgugcugaccuucaaggugcuggaccucaagaacuacaucgacaagcagcugcugcccauccugaacaagcagagcugcuccaucagcaacaucgagacggugaucgaguuccagcagaagaacaaccggcuccuggagaucacccgcgaguucagcgugaacgccggggucaccacccccguguccacguacaugcugaccaacagcgagcuccugucccugaucaacgacaugccgaucaccaacgaccagaagaagcucaugagcaacaacgugcagaucguccggcagcaguccuacagcaucaugugcaucaucaaggaggaggugcuggcguacgugguccagcugccccucuacggcgugaucgacacccccugcuggaagcugcacacgagcccccugugcaccaccaacaccaaggagggguccaacaucugccucacgcgcaccgaccggggcugguacugcgacaacgccggcagcgucuccuucuucccgcaggccgagaccugcaaggugcagagcaaccgcguguucugcgacaccaugaacucccggacgcugcccagcgagguaaaccucugcaacgucgacaucuucaaccccaaguacgacugcaagaucaugaccuccaagaccgacgugagcuccagcgugaucaccucccugggggccaucgucagcugcuacggcaagacgaagugcaccgccagcaacaagaaccgggggaucaucaagaccuucuccaacggcugcgacuacgugagcaacaagggcguggacaccguguccgucgggaacacccuguacuacgugaacaagcaggagggcaagagccucuacgugaagggggagcccaucaucaacuucuacgacccgcuggucuuccccuccgacgaguucgacgcgagcaucucccaggugaacgagaagaucaaccagagccuggccuucauccgcaaguccgacgagcugcuccacaacgugaacgccggcaagagcacgaccaacaucaugaucaccaccaucaucaucgucaucaucgugauccugcugucccucaucgccguggggcugcugcucuacugcaaggcccggugaggacuaguggaagcauuuuccuggcugauuaaaagaaauuacucagcuauggucaucuguuccuguuagaaggcuaugcagcauauuauauacuaugcgcauguuaugaaaugcauaauaaaaaauuuuaaaaaaucuaaaagaucuaaaaaaaaaaaaaaaaaaaaaaaaaaaaaaaaaaaaaaaaaaaaaaaaaaaaaaaaaaaaaaaaugcaucccccccccccccccccccccccccccccccaaaggcucuuuucagagccaccagaauu

SEQ ID NO: 4381 - RNA, 1994 nt, Artificial Sequence
  mRNA product Design d-5 comprising derived and/or modified sequence from HRSV(A2)__F-del_DSCav1_mut0 (opt1)
gggagagggcgcuuggcuugcaaggacccugagcugcggcauugaagcacacccaacccaacucgacugaagucagccucacugaaccggaucugagaaucuucucucucugggcuugccagggcucuccgaaccuagcuagcauccucuucaauuccaacuagaaagcuuaccauggagcugcucauccugaaggccaacgccaucaccaccauccugacggcggugaccuucugcuucgccagcggccagaacaucaccgaggaguucuaccaguccacgugcagcgccgucuccaagggguaccucagcgcccugcgcaccggcugguacaccuccgugaucaccaucgagcugagcaacaucaaggagaacaagugcaacgggaccgacgccaaggugaagcucaucaagcaggagcuggacaaguacaagaacgcggucacggagcugcagcuccugaugcaguccacccccgccaccggcagcggguccgccaucgccagcggcguggcggugugcaagguccugcaccucgagggcgaggugaacaagaucaaguccgcccugcugagcaccaacaaggccguggucucccucagcaacgggguguccgugcugacguucaagguccuggaccucaagaacuacaucgacaagcagcugcugccgauccucaacaagcagagcugcuccaucagcaacaucgagaccgugaucgaguuccagcagaagaacaaccggcugcuggagaucacccgcgaguucuccgugaacgccggcgucaccacgcccgugagcaccuacaugcucaccaacagcgagcugcugucccucaucaacgacaugcccaucaccaacgaccagaagaagcugaugagcaacaacgugcagaucguccggcagcaguccuacagcaucaugugcaucaucaaggaggaggugcuggccuacgugguccagcucccccuguacggggugaucgacacgccgugcuggaagcugcacaccagcccccucugcaccaccaacacgaaggagggcuccaacaucugccugacccgcaccgaccgggggugguacugcgacaacgcgggcuccgugagcuucuucccccaggccgagaccugcaagguccaguccaaccgcguguucugcgacacgaugaacagccggacccuccccuccgaggucaaccugugcaacguggacaucuucaacccgaaguacgacugcaagaucaugaccagcaagaccgacguguccagcuccgucaucacgagccugggcgccaucguguccugcuacgggaagaccaagugcaccgccagcaacaagaaccggggcaucaucaagaccuucuccaacgggugcgacuacgugagcaacaagggcgucgacacggugagcgugggcaacacccucuacuacgucaacaagcaggaggggaagucccuguacgugaagggcgagcccaucaucaacuucuacgacccccugguguuccccagcgacgaguucgacgccuccaucagccaggucaacgagaagaucaaccagucccucgcguucauccgcaagagcgacgagcugcugcacaacgugaacgccgggaaguccaccaccaacaucaugaucaccacgaucaucaucgugaucaucgucauccuccugagccugaucgccgugggccuccugcuguacugcaaggcccggugaggacuaguggaagcauuuuccuggcugauuaaaagaaauuacucagcuauggucaucuguuccuguuagaaggcuaugcagcauauuauauacuaugcgcauguuaugaaaugcauaauaaaaaauuuuaaaaaaucuaaaagaucuaaaaaaaaaaaaaaaaaaaaaaaaaaaaaaaaaaaaaaaaaaaaaaaaaaaaaaaaaaaaaaaaugcaucccccccccccccccccccccccccccccccaaaggcucuuuucagagccaccagaauu

SEQ ID NO: 4382 - RNA, 1994 nt, Artificial Sequence
  mRNA product Design d-5 comprising derived and/or modified sequence from HRSV(A2)__F-del_DSCav1_mut0 (opt2)
gggagagggcgcuuggcuugcaaggacccugagcugcggcauugaagcacacccaacccaacucgacugaagucagccucacugaaccggaucugagaaucuucucucucugggcuugccagggcucuccgaaccuagcuagcauccucuucaauuccaacuagaaagcuuaccauggagcuccucauccucaaggccaacgccaucaccaccauccucaccgccgucaccuucugcuucgccuccggccagaacaucaccgaggaguucuaccaguccaccugcuccgccgucuccaagggcuaccucuccgcccuccgcaccggcugguacaccuccgucaucaccaucgagcucuccaacaucaaggagaacaagugcaacggcaccgacgccaaggucaagcucaucaagcaggagcucgacaaguacaagaacgccgucaccgagcuccagcuccucaugcaguccacccccgccaccggcuccggcuccgccaucgccuccggcgucgccgucugcaagguccuccaccucgagggcgaggucaacaagaucaaguccgcccuccucuccaccaacaaggccgucgucucccucuccaacggcgucuccguccucaccuucaagguccucgaccucaagaacuacaucgacaagcagcuccuccccauccucaacaagcaguccugcuccaucuccaacaucgagaccgucaucgaguuccagcagaagaacaaccgccuccucgagaucacccgcgaguucuccgucaacgccggcgucaccacccccgucuccaccuacaugcucaccaacuccgagcuccucucccucaucaacgacaugcccaucaccaacgaccagaagaagcucauguccaacaacguccagaucguccgccagcaguccuacuccaucaugugcaucaucaaggaggagguccucgccuacgucguccagcucccccucuacggcgucaucgacacccccugcuggaagcuccacaccuccccccucugcaccaccaacaccaaggagggcuccaacaucugccucacccgcaccgaccgcggcugguacugcgacaacgccggcuccgucuccuucuucccccaggccgagaccugcaagguccaguccaaccgcgucuucugcgacaccaugaacucccgcacccuccccuccgaggucaaccucugcaacgucgacaucuucaaccccaaguacgacugcaagaucaugaccuccaagaccgacgucuccuccuccgucaucaccucccucggcgccaucgucuccugcuacggcaagaccaagugcaccgccuccaacaagaaccgcggcaucaucaagaccuucuccaacggcugcgacuacgucuccaacaagggcgucgacaccgucuccgucggcaacacccucuacuacgucaacaagcaggagggcaagucccucuacgucaagggcgagcccaucaucaacuucuacgacccccucgucuuccccuccgacgaguucgacgccuccaucucccaggucaacgagaagaucaaccagucccucgccuucauccgcaaguccgacgagcuccuccacaacgucaacgccggcaaguccaccaccaacaucaugaucaccaccaucaucaucgucaucaucgucauccuccucucccucaucgccgucggccuccuccucuacugcaaggcccgcugaggacuaguggaagcauuuuccuggcugauuaaaagaaauuacucagcuauggucaucuguuccuguuagaaggcuaugcagcauauuauauacuaugcgcauguuaugaaaugcauaauaaaaaauuuuaaaaaaucuaaaagaucuaaaaaaaaaaaaaaaaaaaaaaaaaaaaaaaaaaaaaaaaaaaaaaaaaaaaaaaaaaaaaaaaugcaucccccccccccccccccccccccccccccccaaaggcucuuuucagagccaccagaauu

SEQ ID NO: 4383 - RNA, 1994 nt, Artificial Sequence
  mRNA product Design d-5 comprising derived and/or modified sequence from HRSV(A2)__F-del_DSCav1_mut0 (opt3)
gggagagggcgcuuggcuugcaaggacccugagcugcggcauugaagcacacccaacccaacucgacugaagucagccucacugaaccggaucugagaaucuucucucucugggcuugccagggcucuccgaaccuagcuagcauccucuucaauuccaacuagaaagcuuaccauggagcugcucauccuuaaggccaacgcuauuaccacaauacugacugcagugacguucugcuuugccagcggccagaauaucaccgaagaguucuaccaauccacauguucugcggucucaaaaggguauuugagugcuuuaagaacuggaugguacaccagcguuauuacaaucgaacuguccaacauuaaggagaauaaaugcaacgguaccgacgccaaggugaaacuaaucaagcaggaacucgauaaguauaaaaaugcaguaacugagcugcagcuucugaugcagucuacacccgccaccggcucggggucagcuauagcaagcggaguggccgucuguaagguguugcaccucgagggcgaaguuaacaaaaucaagagugcucugcuguccacgaauaaagccguggucucucucagcaacgguguguccguauuaacuuuuaagguucuggaccuuaagaauuacauugauaaacaauugcugccuauccuaaacaagcagucaugcaguauuagcaauaucgagaccgugauagaguuccagcagaaaaacaauaggcuccuggaaauuacacgggaguuuucugucaacgcgggggugacuaccccaguguccacauauaugcuuaccaauucagaacuguugagccucaucaacgacaugccgauuacgaacgaucaaaagaaacugaugaguaauaacguccagaucguucgccagcagucuuacuccaucauguguauuauaaaggaggaaguguuagcauauguagugcaacugccccucuacggagucaucgacacuccuugcuggaaacuucauacaagcccacuguguaccacuaauacaaaggagggcucgaacauuugcuugacccgaacggaucguggcugguacugugacaaugccgggucuguguccuucuuuccccaggcugaaaccugcaagguucagucaaacagaguguucugugauacaaugaauaguagaacucugccuagcgaggucaaccucugcaauguggacaucuuuaacccaaaauaugauugcaagauaaugaccuccaaaacagacguaucuagcucaguuauuaccagucugggagccaucguguccuguuacgguaagacuaaaugcacagcaagcaauaagaacaggggcaucauuaagaccuucucuaaugggugugauuaugucucaaacaaaggaguggacacugucagugugggcaauacgcuuuacuauguuaacaagcaagaggguaaaagccuguacgugaagggggaacccaucauuaacuuuuaugacccuuugguauucccauccgaugaguuugacgcuucuauaucgcaggucaaugagaaaaucaaccagagccucgccuucauucggaaguccgaugaacuguuacacaaugugaacgcgggaaagucaacaaccaauaucaugaucacuaccauuauaaucguuauuaucgugauucugcuaagucucaucgccgucggccugcuuuuguacugcaaagcacgcugaggacuaguggaagcauuuuccuggcugauuaaaagaaauuacucagcuauggucaucuguuccuguuagaaggcuaugcagcauauuauauacuaugcgcauguuaugaaaugcauaauaaaaaauuuuaaaaaaucuaaaagaucuaaaaaaaaaaaaaaaaaaaaaaaaaaaaaaaaaaaaaaaaaaaaaaaaaaaaaaaaaaaaaaaaugcaucccccccccccccccccccccccccccccccaaaggcucuuuucagagccaccagaauu

SEQ ID NO: 4384 - RNA, 1994 nt, Artificial Sequence
  mRNA product Design d-5 comprising derived and/or modified sequence from HRSV(A2)__F-del_DSCav1_mut0 (opt4)
gggagagggcgcuuggcuugcaaggacccugagcugcggcauugaagcacacccaacccaacucgacugaagucagccucacugaaccggaucugagaaucuucucucucugggcuugccagggcucuccgaaccuagcuagcauccucuucaauuccaacuagaaagcuuaccauggagcugcugauccugaaggccaacgccaucaccaccauccugaccgccgugaccuucugcuucgccagcggccagaacaucaccgaggaguucuaccagagcaccugcagcgccgugagcaagggcuaccugagcgcccugagaaccggcugguacaccagcgugaucaccaucgagcugagcaacaucaaggagaacaagugcaacggcaccgacgccaaggugaagcugaucaagcaggagcuggacaaguacaagaacgccgugaccgagcugcagcugcugaugcagagcacccccgccaccggcagcggcagcgccaucgccagcggcguggccgugugcaaggugcugcaccuggagggcgaggugaacaagaucaagagcgcccugcugagcaccaacaaggccguggugagccugagcaacggcgugagcgugcugaccuucaaggugcuggaccugaagaacuacaucgacaagcagcugcugcccauccugaacaagcagagcugcagcaucagcaacaucgagaccgugaucgaguuccagcagaagaacaacagacugcuggagaucaccagagaguucagcgugaacgccggcgugaccacccccgugagcaccuacaugcugaccaacagcgagcugcugagccugaucaacgacaugcccaucaccaacgaccagaagaagcugaugagcaacaacgugcagaucgugagacagcagagcuacagcaucaugugcaucaucaaggaggaggugcuggccuacguggugcagcugccccuguacggcgugaucgacacccccugcuggaagcugcacaccagcccccugugcaccaccaacaccaaggagggcagcaacaucugccugaccagaaccgacagaggcugguacugcgacaacgccggcagcgugagcuucuucccccaggccgagaccugcaaggugcagagcaacagaguguucugcgacaccaugaacagcagaacccugcccagcgaggugaaccugugcaacguggacaucuucaaccccaaguacgacugcaagaucaugaccagcaagaccgacgugagcagcagcgugaucaccagccugggcgccaucgugagcugcuacggcaagaccaagugcaccgccagcaacaagaacagaggcaucaucaagaccuucagcaacggcugcgacuacgugagcaacaagggcguggacaccgugagcgugggcaacacccuguacuacgugaacaagcaggagggcaagagccuguacgugaagggcgagcccaucaucaacuucuacgacccccugguguuccccagcgacgaguucgacgccagcaucagccaggugaacgagaagaucaaccagagccuggccuucaucagaaagagcgacgagcugcugcacaacgugaacgccggcaagagcaccaccaacaucaugaucaccaccaucaucaucgugaucaucgugauccugcugagccugaucgccgugggccugcugcuguacugcaaggccagaugaggacuaguggaagcauuuuccuggcugauuaaaagaaauuacucagcuauggucaucuguuccuguuagaaggcuaugcagcauauuauauacuaugcgcauguuaugaaaugcauaauaaaaaauuuuaaaaaaucuaaaagaucuaaaaaaaaaaaaaaaaaaaaaaaaaaaaaaaaaaaaaaaaaaaaaaaaaaaaaaaaaaaaaaaaugcaucccccccccccccccccccccccccccccccaaaggcucuuuucagagccaccagaauu

SEQ ID NO: 4385 - RNA, 1994 nt, Artificial Sequence
  mRNA product Design d-5 comprising derived and/or modified sequence from HRSV(A2)__F-del_DSCav1_mut0 (opt5)
gggagagggcgcuuggcuugcaaggacccugagcugcggcauugaagcacacccaacccaacucgacugaagucagccucacugaaccggaucugagaaucuucucucucugggcuugccagggcucuccgaaccuagcuagcauccucuucaauuccaacuagaaagcuuaccauggagcugcucauccugaaggccaacgcuauuaccacaauccuuacggccgugaccuucugcuuugcgagcggccagaauauuacagaagaguucuaccaauccaccuguucugcugucagcaaaggguaucuguccgcccucagaacaggaugguacaccucuguuaucacaauugaacugagcaacaucaaggagaauaaaugcaacggcaccgacgccaaggugaaacuuaucaagcaggaacuggauaaguauaaaaaugcugugacggagcuccagcugcugaugcaguccacccccgccacagggucuggaagcgcuauugccuccggcgucgcgguguguaagguucuccaccuggagggggaagugaacaaaaucaagagcgcccuucugucuaccaauaaagcugucgugucccucagcaacggaguuucugugcugacauuuaagguccuugaccugaagaauuacauugauaaacaacuccugccuauccugaacaagcaguccugcagcauuucuaauaucgagaccgugauugaguuccagcagaaaaacaaucggcuccuggaaaucacgcgcgaguuuuccgugaacgccggcgucacaaccccgguuagcacauauaugcuuaccaauuccgaacugcucucucugaucaacgacaugcccauuaccaacgaucaaaagaaacuuaugagcaauaacgugcagaucgugagacagcaguccuacagcauuauguguaucauuaaggaggaaguccuggcuuaugugguucaacucccucuguacggcgugaucgacacacccugcuggaaacugcauacgucuccucucuguaccacaaauaccaaggagggguccaacaucugccugacacggaccgaucgcggaugguacugugacaaugccggcagcgucucuuucuuuccccaggcggaaacgugcaaggugcagagcaacagaguuuucugugauacaaugaacuccagaacccugccuucugaggugaaucucugcaaugucgacauuuuuaacccgaaauaugauugcaagaucaugaccagcaaaacagacguguccagcucugucauuaccucccugggggccaucgugagcuguuacggaaagacaaaaugcacggcuucuaauaagaaccggggcauuaucaagaccuucuccaaugggugugauuauguuagcaacaaaggaguggacacagucuccgugggcaauacccuuuacuauguuaacaagcaagagggcaaaucucuguacgugaagggggaacccaucauuaacuuuuaugacccucucgucuuccccagcgaugaguuugacgccuccaucucucaggugaaugagaaaauuaaccagagccuggcuuucauccgcaaguccgaugaacugcuccacaaugugaacgccggaaagagcacaaccaauauuaugaucacgaccauuaucaucguuauuaucgucauucugcuuucucugaucgccgugggccuccugcuguacugcaaagcuagaugaggacuaguggaagcauuuuccuggcugauuaaaagaaauuacucagcuauggucaucuguuccuguuagaaggcuaugcagcauauuauauacuaugcgcauguuaugaaaugcauaauaaaaaauuuuaaaaaaucuaaaagaucuaaaaaaaaaaaaaaaaaaaaaaaaaaaaaaaaaaaaaaaaaaaaaaaaaaaaaaaaaaaaaaaaugcaucccccccccccccccccccccccccccccccaaaggcucuuuucagagccaccagaauu

SEQ ID NO: 4386 - RNA, 1994 nt, Artificial Sequence
  mRNA product Design d-5 comprising derived and/or modified sequence from HRSV(A2)__F-del_DSCav1_mut0 (opt6)
gggagagggcgcuuggcuugcaaggacccugagcugcggcauugaagcacacccaacccaacucgacugaagucagccucacugaaccggaucugagaaucuucucucucugggcuugccagggcucuccgaaccuagcuagcauccucuucaauuccaacuagaaagcuuaccauggaauuacucauccucaaagcaaacgcaauaacaacaauacuaacagcagucacuuucugcuucgcauccggacaaaauaucacagaagaauuuuaccaauccaccugcucugcugucuccaaaggauaccuaucugcccucagaaccgguugguauacaucugucauaaccauagaacuaucaaacauuaaagaaaacaaauguaacggaacagacgcaaaagucaaacuuauaaaacaagaauuagacaaauacaaaaacgcagucacagaauuacaacuacuaaugcaaucaaccccagcaaccggaucaggauccgcaauagcuucaggaguagcaguauguaaaguucuacacuuagaaggagaagucaacaaaauuaaauccgcacuauuaucaaccaacaaagcagucguaucuuuaucaaacggaguaucuguacuuacauucaaaguacuagaccuaaaaaauuacauugauaaacaauuacuaccaauacuaaacaaacaaucauguuccaucucuaacauagaaacaguaauagaauuucaacaaaaaaauaacagauuacuugaaaucacccgagaauuuucaguaaacgcaggaguaaccacacccguaucuacauacaugcuaacaaacucugaacuucugagccuaauaaaugacaugccaauaaccaacgaccaaaaaaaacuaauguccaacaacguacaaauaguacgacaacaaucuuacucaaucaugugcauaaucaaagaagaaguacuagcuuauguaguccaacuuccacucuacggaguaauagacacccccugcuggaaacuacacacaucaccacuaugcacaacaaacacaaaagaaggcucaaacauaugccuaacaagaacugacagaggaugguauugugacaaugcaggcucugucucauucuuuccacaagccgaaacaugcaaaguucaaucaaaccgaguuuucugugacacaaugaacucuagaacucucccaucagaagucaacuuaugcaacguugacauauucaacccaaaauaugacuguaaaauaaugacuuccaaaacugauguaucauccuccgucauaacaucccuaggagcuauuguaucauguuacgggaaaaccaaaugcacagccucaaacaaaaaccgcgguaucauaaaaacauuuucaaacggaugugauuacguaagcaauaaaggaguagacaccguaucaguaggaaauacacuauacuauguaaauaaacaagaaggaaaaucacuauaugucaaaggagaaccaaucauaaauuucuaugacccacuuguauucccauccgaugaauuugacgcaagcauuucacaggucaacgaaaaaauaaaccaaucacuagccuucaucagaaaaucagacgaacuacuacauaacguaaacgccggaaaaucaacaaccaacauaaugauaacaacaaucauaauaguuaucauaguaauacuacuaucucuaauagcugucggacucuuacuauauugcaaagcccgauaaggacuaguggaagcauuuuccuggcugauuaaaagaaauuacucagcuauggucaucuguuccuguuagaaggcuaugcagcauauuauauacuaugcgcauguuaugaaaugcauaauaaaaaauuuuaaaaaaucuaaaagaucuaaaaaaaaaaaaaaaaaaaaaaaaaaaaaaaaaaaaaaaaaaaaaaaaaaaaaaaaaaaaaaaaugcaucccccccccccccccccccccccccccccccaaaggcucuuuucagagccaccagaauu

SEQ ID NO: 4387 - RNA, 1994 nt, Artificial Sequence
  mRNA product Design d-5 comprising derived and/or modified sequence from HRSV(A2)__F-del_DSCav1_mut0 (opt11)
gggagagggcgcuuggcuugcaaggacccugagcugcggcauugaagcacacccaacccaacucgacugaagucagccucacugaaccggaucugagaaucuucucucucugggcuugccagggcucuccgaaccuagcuagcauccucuucaauuccaacuagaaagcuuaccauggaacuacuaauccugaaagccaacgccauaaccacaauccuuaccgcagucaccuucugcuucgccuccggucaaaacaucacagaagaguucuaccaauccaccuguuccgcagucagcaaaggcuaccucuccgcacuccgaaccggaugguacaccagcgucaucaccaucgaacuauccaacauaaaggaaaauaagugcaaugguacagaugccaaggucaaacucauaaagcaagaacucgacaaauacaaaaacgccgucaccgaacuacaacuacuaaugcaaucuacccccgcaacaggcucagguuccgccauagccuccggcgucgccguuugcaaaguccuccaccucgaaggcgaaguaaacaaaaucaaauccgcccuacucucaaccaacaaagcagucgucucccucucaaacggagucucgguccucaccuucaaaguccucgaccucaaaaacuauauagacaaacaacuccuacccauacucaacaaacaguccugcagcauauccaacaucgaaaccgugaucgaguuccaacagaaaaacaacagacuccucgaaaucacucgagaguucuccguaaacgccggcgucacaaccccagucucaacauacaugcucaccaacagcgaacuccuaucacuaaucaacgacaugccuaucacaaaugaucagaagaaacuaaugagcaacaacguccaaaucguccgccaacaaucauacuccaucaugugcaucauaaaagaagaaguccuagccuacgugguccagcuaccccucuacggcguaauugacaccccuugcuggaaacuacacacuucaccccucugcacaaccaacaccaaagaagguucaaacaucugccucacacgaacagaccgcggcugguacugcgacaacgccggauccguauccuucuucccccaagcagaaaccugcaaaguucaauccaaccggguauucugcgacaccaugaacucaagaacccuucccuccgaaguaaaucuaugcaacgucgacauauucaacccaaaauacgacugcaaaaucaugaccuccaaaaccgaugucuccagcagcgucaucaccagccucggcgccaucgucuccugcuacggcaaaacaaaauguacagcauccaacaaaaaccgaggcauaaucaaaaccuucuccaacgggugcgauuacgucagcaacaaaggcgucgacaccgucuccgugggcaacacccuauacuacgucaacaaacaagaaggcaaaucacuguacguaaagggcgaacccaucaucaacuucuaugacccucugguguucccauccgaugaauuugacgcauccauaucucaggucaacgaaaagaucaaccaaucccucgccuucauacgcaaauccgacgaacuccuacacaacgucaacgcugguaaaagcaccaccaacaucaugaucaccacaaucaucaucgucauaaucguuauccuacucucccuuauagcagucggacuccuccucuacugcaaagcccgcuaaggacuaguggaagcauuuuccuggcugauuaaaagaaauuacucagcuauggucaucuguuccuguuagaaggcuaugcagcauauuauauacuaugcgcauguuaugaaaugcauaauaaaaaauuuuaaaaaaucuaaaagaucuaaaaaaaaaaaaaaaaaaaaaaaaaaaaaaaaaaaaaaaaaaaaaaaaaaaaaaaaaaaaaaaaugcaucccccccccccccccccccccccccccccccaaaggcucuuuucagagccaccagaauu

SEQ ID NO: 4388 - RNA, 1874 nt, Artificial Sequence
  mRNA product Design e-1 comprising derived and/or modified sequence from HRSV(A2)__F-del_DSCav1_mut0 (opt1)
gggagaauauaagcguuggcggagcgucgguuguagcacucugcgcgcccgcucuucugcugcuguuugucuacuuccuccugcuuccccgccgccgccgccgccaucaagcuuaccauggagcugcucauccugaaggccaacgccaucaccaccauccugacggcggugaccuucugcuucgccagcggccagaacaucaccgaggaguucuaccaguccacgugcagcgccgucuccaagggguaccucagcgcccugcggaccggcugguacaccuccgugaucaccaucgagcugagcaacaucaaggagaacaagugcaacgggaccgacgccaaggugaagcucaucaagcaggagcuggacaaguacaagaacgcggucacggagcugcagcuccugaugcaguccaccccggcaaccggcuccggcuccgccaucgcgagcggcgucgccgugugcaaggugcugcaccucgagggggaggucaacaagaucaagagcgcccugcuguccaccaacaaggccguggugagccucuccaacggcgucagcgugcugaccuucaaggugcuggaccucaagaacuacaucgacaagcagcugcugcccauccugaacaagcagagcugcuccaucagcaacaucgagacggugaucgaguuccagcagaagaacaaccggcuccuggagaucacccgcgaguucagcgugaacgccggggucaccacccccguguccacguacaugcugaccaacagcgagcuccugucccugaucaacgacaugccgaucaccaacgaccagaagaagcucaugagcaacaacgugcagaucguccggcagcaguccuacagcaucaugugcaucaucaaggaggaggugcuggcguacgugguccagcugccccucuacggcgugaucgacacccccugcuggaagcugcacacgagcccccugugcaccaccaacaccaaggagggguccaacaucugccucacgcgcaccgaccggggcugguacugcgacaacgccggcagcgucuccuucuucccgcaggccgagaccugcaaggugcagagcaaccgcguguucugcgacaccaugaacucccggacgcugcccagcgagguaaaccucugcaacgucgacaucuucaaccccaaguacgacugcaagaucaugaccuccaagaccgacgugagcuccagcgugaucaccucccugggggccaucgucagcugcuacggcaagacgaagugcaccgccagcaacaagaaccgggggaucaucaagaccuucuccaacggcugcgacuacgugagcaacaagggcguggacaccguguccgucgggaacacccuguacuacgugaacaagcaggagggcaagagccucuacgugaagggggagcccaucaucaacuucuacgacccgcuggucuuccccuccgacgaguucgacgcgagcaucucccaggugaacgagaagaucaaccagagccuggccuucauccgcaaguccgacgagcugcuccacaacgugaacgccggcaagagcacgaccaacaucaugaucaccaccaucaucaucgucaucaucgugauccugcugucccucaucgccguggggcugcugcucuacugcaaggcccggugaggacuaguguccaccugucccuccugggcugcuggauugucucguuuuccugccaaauaaacaggaucagcgcuuuacagaucuaaaaaaaaaaaaaaaaaaaaaaaaaaaaaaaaaaaaaaaaaaaaaaaaaaaaaaaaaaaaaaaaugcaucccccccccccccccccccccccccccccccaaaggcucuuuucagagccaccagaauu

SEQ ID NO: 4389 - RNA, 1874 nt, Artificial Sequence
  mRNA product Design e-1 comprising derived and/or modified sequence from HRSV(A2)__F-del_DSCav1_mut0 (opt1)
gggagaauauaagcguuggcggagcgucgguuguagcacucugcgcgcccgcucuucugcugcuguuugucuacuuccuccugcuuccccgccgccgccgccgccaucaagcuuaccauggagcugcucauccugaaggccaacgccaucaccaccauccugacggcggugaccuucugcuucgccagcggccagaacaucaccgaggaguucuaccaguccacgugcagcgccgucuccaagggguaccucagcgcccugcgcaccggcugguacaccuccgugaucaccaucgagcugagcaacaucaaggagaacaagugcaacgggaccgacgccaaggugaagcucaucaagcaggagcuggacaaguacaagaacgcggucacggagcugcagcuccugaugcaguccacccccgccaccggcagcggguccgccaucgccagcggcguggcggugugcaagguccugcaccucgagggcgaggugaacaagaucaaguccgcccugcugagcaccaacaaggccguggucucccucagcaacgggguguccgugcugacguucaagguccuggaccucaagaacuacaucgacaagcagcugcugccgauccucaacaagcagagcugcuccaucagcaacaucgagaccgugaucgaguuccagcagaagaacaaccggcugcuggagaucacccgcgaguucuccgugaacgccggcgucaccacgcccgugagcaccuacaugcucaccaacagcgagcugcugucccucaucaacgacaugcccaucaccaacgaccagaagaagcugaugagcaacaacgugcagaucguccggcagcaguccuacagcaucaugugcaucaucaaggaggaggugcuggccuacgugguccagcucccccuguacggggugaucgacacgccgugcuggaagcugcacaccagcccccucugcaccaccaacacgaaggagggcuccaacaucugccugacccgcaccgaccgggggugguacugcgacaacgcgggcuccgugagcuucuucccccaggccgagaccugcaagguccaguccaaccgcguguucugcgacacgaugaacagccggacccuccccuccgaggucaaccugugcaacguggacaucuucaacccgaaguacgacugcaagaucaugaccagcaagaccgacguguccagcuccgucaucacgagccugggcgccaucguguccugcuacgggaagaccaagugcaccgccagcaacaagaaccggggcaucaucaagaccuucuccaacgggugcgacuacgugagcaacaagggcgucgacacggugagcgugggcaacacccucuacuacgucaacaagcaggaggggaagucccuguacgugaagggcgagcccaucaucaacuucuacgacccccugguguuccccagcgacgaguucgacgccuccaucagccaggucaacgagaagaucaaccagucccucgcguucauccgcaagagcgacgagcugcugcacaacgugaacgccgggaaguccaccaccaacaucaugaucaccacgaucaucaucgugaucaucgucauccuccugagccugaucgccgugggccuccugcuguacugcaaggcccggugaggacuaguguccaccugucccuccugggcugcuggauugucucguuuuccugccaaauaaacaggaucagcgcuuuacagaucuaaaaaaaaaaaaaaaaaaaaaaaaaaaaaaaaaaaaaaaaaaaaaaaaaaaaaaaaaaaaaaaaugcaucccccccccccccccccccccccccccccccaaaggcucuuuucagagccaccagaauu

SEQ ID NO: 4390 - RNA, 1874 nt, Artificial Sequence
  mRNA product Design e-1 comprising derived and/or modified sequence from HRSV(A2)__F-del_DSCav1_mut0 (opt2)
gggagaauauaagcguuggcggagcgucgguuguagcacucugcgcgcccgcucuucugcugcuguuugucuacuuccuccugcuuccccgccgccgccgccgccaucaagcuuaccauggagcuccucauccucaaggccaacgccaucaccaccauccucaccgccgucaccuucugcuucgccuccggccagaacaucaccgaggaguucuaccaguccaccugcuccgccgucuccaagggcuaccucuccgcccuccgcaccggcugguacaccuccgucaucaccaucgagcucuccaacaucaaggagaacaagugcaacggcaccgacgccaaggucaagcucaucaagcaggagcucgacaaguacaagaacgccgucaccgagcuccagcuccucaugcaguccacccccgccaccggcuccggcuccgccaucgccuccggcgucgccgucugcaagguccuccaccucgagggcgaggucaacaagaucaaguccgcccuccucuccaccaacaaggccgucgucucccucuccaacggcgucuccguccucaccuucaagguccucgaccucaagaacuacaucgacaagcagcuccuccccauccucaacaagcaguccugcuccaucuccaacaucgagaccgucaucgaguuccagcagaagaacaaccgccuccucgagaucacccgcgaguucuccgucaacgccggcgucaccacccccgucuccaccuacaugcucaccaacuccgagcuccucucccucaucaacgacaugcccaucaccaacgaccagaagaagcucauguccaacaacguccagaucguccgccagcaguccuacuccaucaugugcaucaucaaggaggagguccucgccuacgucguccagcucccccucuacggcgucaucgacacccccugcuggaagcuccacaccuccccccucugcaccaccaacaccaaggagggcuccaacaucugccucacccgcaccgaccgcggcugguacugcgacaacgccggcuccgucuccuucuucccccaggccgagaccugcaagguccaguccaaccgcgucuucugcgacaccaugaacucccgcacccuccccuccgaggucaaccucugcaacgucgacaucuucaaccccaaguacgacugcaagaucaugaccuccaagaccgacgucuccuccuccgucaucaccucccucggcgccaucgucuccugcuacggcaagaccaagugcaccgccuccaacaagaaccgcggcaucaucaagaccuucuccaacggcugcgacuacgucuccaacaagggcgucgacaccgucuccgucggcaacacccucuacuacgucaacaagcaggagggcaagucccucuacgucaagggcgagcccaucaucaacuucuacgacccccucgucuuccccuccgacgaguucgacgccuccaucucccaggucaacgagaagaucaaccagucccucgccuucauccgcaaguccgacgagcuccuccacaacgucaacgccggcaaguccaccaccaacaucaugaucaccaccaucaucaucgucaucaucgucauccuccucucccucaucgccgucggccuccuccucuacugcaaggcccgcugaggacuaguguccaccugucccuccugggcugcuggauugucucguuuuccugccaaauaaacaggaucagcgcuuuacagaucuaaaaaaaaaaaaaaaaaaaaaaaaaaaaaaaaaaaaaaaaaaaaaaaaaaaaaaaaaaaaaaaaugcaucccccccccccccccccccccccccccccccaaaggcucuuuucagagccaccagaauu

SEQ ID NO: 4391 - RNA, 1874 nt, Artificial Sequence
  mRNA product Design e-1 comprising derived and/or modified sequence from HRSV(A2)__F-del_DSCav1_mut0 (opt3)
gggagaauauaagcguuggcggagcgucgguuguagcacucugcgcgcccgcucuucugcugcuguuugucuacuuccuccugcuuccccgccgccgccgccgccaucaagcuuaccauggagcugcucauccuuaaggccaacgcuauuaccacaauacugacugcagugacguucugcuuugccagcggccagaauaucaccgaagaguucuaccaauccacauguucugcggucucaaaaggguauuugagugcuuuaagaacuggaugguacaccagcguuauuacaaucgaacuguccaacauuaaggagaauaaaugcaacgguaccgacgccaaggugaaacuaaucaagcaggaacucgauaaguauaaaaaugcaguaacugagcugcagcuucugaugcagucuacacccgccaccggcucggggucagcuauagcaagcggaguggccgucuguaagguguugcaccucgagggcgaaguuaacaaaaucaagagugcucugcuguccacgaauaaagccguggucucucucagcaacgguguguccguauuaacuuuuaagguucuggaccuuaagaauuacauugauaaacaauugcugccuauccuaaacaagcagucaugcaguauuagcaauaucgagaccgugauagaguuccagcagaaaaacaauaggcuccuggaaauuacacgggaguuuucugucaacgcgggggugacuaccccaguguccacauauaugcuuaccaauucagaacuguugagccucaucaacgacaugccgauuacgaacgaucaaaagaaacugaugaguaauaacguccagaucguucgccagcagucuuacuccaucauguguauuauaaaggaggaaguguuagcauauguagugcaacugccccucuacggagucaucgacacuccuugcuggaaacuucauacaagcccacuguguaccacuaauacaaaggagggcucgaacauuugcuugacccgaacggaucguggcugguacugugacaaugccgggucuguguccuucuuuccccaggcugaaaccugcaagguucagucaaacagaguguucugugauacaaugaauaguagaacucugccuagcgaggucaaccucugcaauguggacaucuuuaacccaaaauaugauugcaagauaaugaccuccaaaacagacguaucuagcucaguuauuaccagucugggagccaucguguccuguuacgguaagacuaaaugcacagcaagcaauaagaacaggggcaucauuaagaccuucucuaaugggugugauuaugucucaaacaaaggaguggacacugucagugugggcaauacgcuuuacuauguuaacaagcaagaggguaaaagccuguacgugaagggggaacccaucauuaacuuuuaugacccuuugguauucccauccgaugaguuugacgcuucuauaucgcaggucaaugagaaaaucaaccagagccucgccuucauucggaaguccgaugaacuguuacacaaugugaacgcgggaaagucaacaaccaauaucaugaucacuaccauuauaaucguuauuaucgugauucugcuaagucucaucgccgucggccugcuuuuguacugcaaagcacgcugaggacuaguguccaccugucccuccugggcugcuggauugucucguuuuccugccaaauaaacaggaucagcgcuuuacagaucuaaaaaaaaaaaaaaaaaaaaaaaaaaaaaaaaaaaaaaaaaaaaaaaaaaaaaaaaaaaaaaaaugcaucccccccccccccccccccccccccccccccaaaggcucuuuucagagccaccagaauu

SEQ ID NO: 4392 - RNA, 1874 nt, Artificial Sequence
  mRNA product Design e-1 comprising derived and/or modified sequence from HRSV(A2)__F-del_DSCav1_mut0 (opt4)
gggagaauauaagcguuggcggagcgucgguuguagcacucugcgcgcccgcucuucugcugcuguuugucuacuuccuccugcuuccccgccgccgccgccgccaucaagcuuaccauggagcugcugauccugaaggccaacgccaucaccaccauccugaccgccgugaccuucugcuucgccagcggccagaacaucaccgaggaguucuaccagagcaccugcagcgccgugagcaagggcuaccugagcgcccugagaaccggcugguacaccagcgugaucaccaucgagcugagcaacaucaaggagaacaagugcaacggcaccgacgccaaggugaagcugaucaagcaggagcuggacaaguacaagaacgccgugaccgagcugcagcugcugaugcagagcacccccgccaccggcagcggcagcgccaucgccagcggcguggccgugugcaaggugcugcaccuggagggcgaggugaacaagaucaagagcgcccugcugagcaccaacaaggccguggugagccugagcaacggcgugagcgugcugaccuucaaggugcuggaccugaagaacuacaucgacaagcagcugcugcccauccugaacaagcagagcugcagcaucagcaacaucgagaccgugaucgaguuccagcagaagaacaacagacugcuggagaucaccagagaguucagcgugaacgccggcgugaccacccccgugagcaccuacaugcugaccaacagcgagcugcugagccugaucaacgacaugcccaucaccaacgaccagaagaagcugaugagcaacaacgugcagaucgugagacagcagagcuacagcaucaugugcaucaucaaggaggaggugcuggccuacguggugcagcugccccuguacggcgugaucgacacccccugcuggaagcugcacaccagcccccugugcaccaccaacaccaaggagggcagcaacaucugccugaccagaaccgacagaggcugguacugcgacaacgccggcagcgugagcuucuucccccaggccgagaccugcaaggugcagagcaacagaguguucugcgacaccaugaacagcagaacccugcccagcgaggugaaccugugcaacguggacaucuucaaccccaaguacgacugcaagaucaugaccagcaagaccgacgugagcagcagcgugaucaccagccugggcgccaucgugagcugcuacggcaagaccaagugcaccgccagcaacaagaacagaggcaucaucaagaccuucagcaacggcugcgacuacgugagcaacaagggcguggacaccgugagcgugggcaacacccuguacuacgugaacaagcaggagggcaagagccuguacgugaagggcgagcccaucaucaacuucuacgacccccugguguuccccagcgacgaguucgacgccagcaucagccaggugaacgagaagaucaaccagagccuggccuucaucagaaagagcgacgagcugcugcacaacgugaacgccggcaagagcaccaccaacaucaugaucaccaccaucaucaucgugaucaucgugauccugcugagccugaucgccgugggccugcugcuguacugcaaggccagaugaggacuaguguccaccugucccuccugggcugcuggauugucucguuuuccugccaaauaaacaggaucagcgcuuuacagaucuaaaaaaaaaaaaaaaaaaaaaaaaaaaaaaaaaaaaaaaaaaaaaaaaaaaaaaaaaaaaaaaaugcaucccccccccccccccccccccccccccccccaaaggcucuuuucagagccaccagaauu

SEQ ID NO: 4393 - RNA, 1874 nt, Artificial Sequence
  mRNA product Design e-1 comprising derived and/or modified sequence from HRSV(A2)__F-del_DSCav1_mut0 (opt5)
gggagaauauaagcguuggcggagcgucgguuguagcacucugcgcgcccgcucuucugcugcuguuugucuacuuccuccugcuuccccgccgccgccgccgccaucaagcuuaccauggagcugcucauccugaaggccaacgcuauuaccacaauccuuacggccgugaccuucugcuuugcgagcggccagaauauuacagaagaguucuaccaauccaccuguucugcugucagcaaaggguaucuguccgcccucagaacaggaugguacaccucuguuaucacaauugaacugagcaacaucaaggagaauaaaugcaacggcaccgacgccaaggugaaacuuaucaagcaggaacuggauaaguauaaaaaugcugugacggagcuccagcugcugaugcaguccacccccgccacagggucuggaagcgcuauugccuccggcgucgcgguguguaagguucuccaccuggagggggaagugaacaaaaucaagagcgcccuucugucuaccaauaaagcugucgugucccucagcaacggaguuucugugcugacauuuaagguccuugaccugaagaauuacauugauaaacaacuccugccuauccugaacaagcaguccugcagcauuucuaauaucgagaccgugauugaguuccagcagaaaaacaaucggcuccuggaaaucacgcgcgaguuuuccgugaacgccggcgucacaaccccgguuagcacauauaugcuuaccaauuccgaacugcucucucugaucaacgacaugcccauuaccaacgaucaaaagaaacuuaugagcaauaacgugcagaucgugagacagcaguccuacagcauuauguguaucauuaaggaggaaguccuggcuuaugugguucaacucccucuguacggcgugaucgacacacccugcuggaaacugcauacgucuccucucuguaccacaaauaccaaggagggguccaacaucugccugacacggaccgaucgcggaugguacugugacaaugccggcagcgucucuuucuuuccccaggcggaaacgugcaaggugcagagcaacagaguuuucugugauacaaugaacuccagaacccugccuucugaggugaaucucugcaaugucgacauuuuuaacccgaaauaugauugcaagaucaugaccagcaaaacagacguguccagcucugucauuaccucccugggggccaucgugagcuguuacggaaagacaaaaugcacggcuucuaauaagaaccggggcauuaucaagaccuucuccaaugggugugauuauguuagcaacaaaggaguggacacagucuccgugggcaauacccuuuacuauguuaacaagcaagagggcaaaucucuguacgugaagggggaacccaucauuaacuuuuaugacccucucgucuuccccagcgaugaguuugacgccuccaucucucaggugaaugagaaaauuaaccagagccuggcuuucauccgcaaguccgaugaacugcuccacaaugugaacgccggaaagagcacaaccaauauuaugaucacgaccauuaucaucguuauuaucgucauucugcuuucucugaucgccgugggccuccugcuguacugcaaagcuagaugaggacuaguguccaccugucccuccugggcugcuggauugucucguuuuccugccaaauaaacaggaucagcgcuuuacagaucuaaaaaaaaaaaaaaaaaaaaaaaaaaaaaaaaaaaaaaaaaaaaaaaaaaaaaaaaaaaaaaaaugcaucccccccccccccccccccccccccccccccaaaggcucuuuucagagccaccagaauu

SEQ ID NO: 4394 - RNA, 1874 nt, Artificial Sequence
  mRNA product Design e-1 comprising derived and/or modified sequence from HRSV(A2)__F-del_DSCav1_mut0 (opt6)
gggagaauauaagcguuggcggagcgucgguuguagcacucugcgcgcccgcucuucugcugcuguuugucuacuuccuccugcuuccccgccgccgccgccgccaucaagcuuaccauggaauuacucauccucaaagcaaacgcaauaacaacaauacuaacagcagucacuuucugcuucgcauccggacaaaauaucacagaagaauuuuaccaauccaccugcucugcugucuccaaaggauaccuaucugcccucagaaccgguugguauacaucugucauaaccauagaacuaucaaacauuaaagaaaacaaauguaacggaacagacgcaaaagucaaacuuauaaaacaagaauuagacaaauacaaaaacgcagucacagaauuacaacuacuaaugcaaucaaccccagcaaccggaucaggauccgcaauagcuucaggaguagcaguauguaaaguucuacacuuagaaggagaagucaacaaaauuaaauccgcacuauuaucaaccaacaaagcagucguaucuuuaucaaacggaguaucuguacuuacauucaaaguacuagaccuaaaaaauuacauugauaaacaauuacuaccaauacuaaacaaacaaucauguuccaucucuaacauagaaacaguaauagaauuucaacaaaaaaauaacagauuacuugaaaucacccgagaauuuucaguaaacgcaggaguaaccacacccguaucuacauacaugcuaacaaacucugaacuucugagccuaauaaaugacaugccaauaaccaacgaccaaaaaaaacuaauguccaacaacguacaaauaguacgacaacaaucuuacucaaucaugugcauaaucaaagaagaaguacuagcuuauguaguccaacuuccacucuacggaguaauagacacccccugcuggaaacuacacacaucaccacuaugcacaacaaacacaaaagaaggcucaaacauaugccuaacaagaacugacagaggaugguauugugacaaugcaggcucugucucauucuuuccacaagccgaaacaugcaaaguucaaucaaaccgaguuuucugugacacaaugaacucuagaacucucccaucagaagucaacuuaugcaacguugacauauucaacccaaaauaugacuguaaaauaaugacuuccaaaacugauguaucauccuccgucauaacaucccuaggagcuauuguaucauguuacgggaaaaccaaaugcacagccucaaacaaaaaccgcgguaucauaaaaacauuuucaaacggaugugauuacguaagcaauaaaggaguagacaccguaucaguaggaaauacacuauacuauguaaauaaacaagaaggaaaaucacuauaugucaaaggagaaccaaucauaaauuucuaugacccacuuguauucccauccgaugaauuugacgcaagcauuucacaggucaacgaaaaaauaaaccaaucacuagccuucaucagaaaaucagacgaacuacuacauaacguaaacgccggaaaaucaacaaccaacauaaugauaacaacaaucauaauaguuaucauaguaauacuacuaucucuaauagcugucggacucuuacuauauugcaaagcccgauaaggacuaguguccaccugucccuccugggcugcuggauugucucguuuuccugccaaauaaacaggaucagcgcuuuacagaucuaaaaaaaaaaaaaaaaaaaaaaaaaaaaaaaaaaaaaaaaaaaaaaaaaaaaaaaaaaaaaaaaugcaucccccccccccccccccccccccccccccccaaaggcucuuuucagagccaccagaauu

SEQ ID NO: 4395 - RNA, 1874 nt, Artificial Sequence
  mRNA product Design e-1 comprising derived and/or modified sequence from HRSV(A2)__F-del_DSCav1_mut0 (opt11)
gggagaauauaagcguuggcggagcgucgguuguagcacucugcgcgcccgcucuucugcugcuguuugucuacuuccuccugcuuccccgccgccgccgccgccaucaagcuuaccauggaacuacuaauccugaaagccaacgccauaaccacaauccuuaccgcagucaccuucugcuucgccuccggucaaaacaucacagaagaguucuaccaauccaccuguuccgcagucagcaaaggcuaccucuccgcacuccgaaccggaugguacaccagcgucaucaccaucgaacuauccaacauaaaggaaaauaagugcaaugguacagaugccaaggucaaacucauaaagcaagaacucgacaaauacaaaaacgccgucaccgaacuacaacuacuaaugcaaucuacccccgcaacaggcucagguuccgccauagccuccggcgucgccguuugcaaaguccuccaccucgaaggcgaaguaaacaaaaucaaauccgcccuacucucaaccaacaaagcagucgucucccucucaaacggagucucgguccucaccuucaaaguccucgaccucaaaaacuauauagacaaacaacuccuacccauacucaacaaacaguccugcagcauauccaacaucgaaaccgugaucgaguuccaacagaaaaacaacagacuccucgaaaucacucgagaguucuccguaaacgccggcgucacaaccccagucucaacauacaugcucaccaacagcgaacuccuaucacuaaucaacgacaugccuaucacaaaugaucagaagaaacuaaugagcaacaacguccaaaucguccgccaacaaucauacuccaucaugugcaucauaaaagaagaaguccuagccuacgugguccagcuaccccucuacggcguaauugacaccccuugcuggaaacuacacacuucaccccucugcacaaccaacaccaaagaagguucaaacaucugccucacacgaacagaccgcggcugguacugcgacaacgccggauccguauccuucuucccccaagcagaaaccugcaaaguucaauccaaccggguauucugcgacaccaugaacucaagaacccuucccuccgaaguaaaucuaugcaacgucgacauauucaacccaaaauacgacugcaaaaucaugaccuccaaaaccgaugucuccagcagcgucaucaccagccucggcgccaucgucuccugcuacggcaaaacaaaauguacagcauccaacaaaaaccgaggcauaaucaaaaccuucuccaacgggugcgauuacgucagcaacaaaggcgucgacaccgucuccgugggcaacacccuauacuacgucaacaaacaagaaggcaaaucacuguacguaaagggcgaacccaucaucaacuucuaugacccucugguguucccauccgaugaauuugacgcauccauaucucaggucaacgaaaagaucaaccaaucccucgccuucauacgcaaauccgacgaacuccuacacaacgucaacgcugguaaaagcaccaccaacaucaugaucaccacaaucaucaucgucauaaucguuauccuacucucccuuauagcagucggacuccuccucuacugcaaagcccgcuaaggacuaguguccaccugucccuccugggcugcuggauugucucguuuuccugccaaauaaacaggaucagcgcuuuacagaucuaaaaaaaaaaaaaaaaaaaaaaaaaaaaaaaaaaaaaaaaaaaaaaaaaaaaaaaaaaaaaaaaugcaucccccccccccccccccccccccccccccccaaaggcucuuuucagagccaccagaauu

SEQ ID NO: 4396 - RNA, 1856 nt, Artificial Sequence
  mRNA product Design e-2 comprising derived and/or modified sequence from HRSV(A2)__F-del_DSCav1_mut0 (opt1)
gggagacccgugacccggaaguuguacggcuacgcgacuuucccucccacaaacccucgcgcccuuccuuuccuacuugggcccggcagaaagcuuaccauggagcugcucauccugaaggccaacgccaucaccaccauccugacggcggugaccuucugcuucgccagcggccagaacaucaccgaggaguucuaccaguccacgugcagcgccgucuccaagggguaccucagcgcccugcggaccggcugguacaccuccgugaucaccaucgagcugagcaacaucaaggagaacaagugcaacgggaccgacgccaaggugaagcucaucaagcaggagcuggacaaguacaagaacgcggucacggagcugcagcuccugaugcaguccaccccggcaaccggcuccggcuccgccaucgcgagcggcgucgccgugugcaaggugcugcaccucgagggggaggucaacaagaucaagagcgcccugcuguccaccaacaaggccguggugagccucuccaacggcgucagcgugcugaccuucaaggugcuggaccucaagaacuacaucgacaagcagcugcugcccauccugaacaagcagagcugcuccaucagcaacaucgagacggugaucgaguuccagcagaagaacaaccggcuccuggagaucacccgcgaguucagcgugaacgccggggucaccacccccguguccacguacaugcugaccaacagcgagcuccugucccugaucaacgacaugccgaucaccaacgaccagaagaagcucaugagcaacaacgugcagaucguccggcagcaguccuacagcaucaugugcaucaucaaggaggaggugcuggcguacgugguccagcugccccucuacggcgugaucgacacccccugcuggaagcugcacacgagcccccugugcaccaccaacaccaaggagggguccaacaucugccucacgcgcaccgaccggggcugguacugcgacaacgccggcagcgucuccuucuucccgcaggccgagaccugcaaggugcagagcaaccgcguguucugcgacaccaugaacucccggacgcugcccagcgagguaaaccucugcaacgucgacaucuucaaccccaaguacgacugcaagaucaugaccuccaagaccgacgugagcuccagcgugaucaccucccugggggccaucgucagcugcuacggcaagacgaagugcaccgccagcaacaagaaccgggggaucaucaagaccuucuccaacggcugcgacuacgugagcaacaagggcguggacaccguguccgucgggaacacccuguacuacgugaacaagcaggagggcaagagccucuacgugaagggggagcccaucaucaacuucuacgacccgcuggucuuccccuccgacgaguucgacgcgagcaucucccaggugaacgagaagaucaaccagagccuggccuucauccgcaaguccgacgagcugcuccacaacgugaacgccggcaagagcacgaccaacaucaugaucaccaccaucaucaucgucaucaucgugauccugcugucccucaucgccguggggcugcugcucuacugcaaggcccggugaggacuaguguccaccugucccuccugggcugcuggauugucucguuuuccugccaaauaaacaggaucagcgcuuuacagaucuaaaaaaaaaaaaaaaaaaaaaaaaaaaaaaaaaaaaaaaaaaaaaaaaaaaaaaaaaaaaaaaaugcaucccccccccccccccccccccccccccccccaaaggcucuuuucagagccaccagaauu

SEQ ID NO: 4397 - RNA, 1856 nt, Artificial Sequence
  mRNA product Design e-2 comprising derived and/or modified sequence from HRSV(A2)__F-del_DSCav1_mut0 (opt1)
gggagacccgugacccggaaguuguacggcuacgcgacuuucccucccacaaacccucgcgcccuuccuuuccuacuugggcccggcagaaagcuuaccauggagcugcucauccugaaggccaacgccaucaccaccauccugacggcggugaccuucugcuucgccagcggccagaacaucaccgaggaguucuaccaguccacgugcagcgccgucuccaagggguaccucagcgcccugcgcaccggcugguacaccuccgugaucaccaucgagcugagcaacaucaaggagaacaagugcaacgggaccgacgccaaggugaagcucaucaagcaggagcuggacaaguacaagaacgcggucacggagcugcagcuccugaugcaguccacccccgccaccggcagcggguccgccaucgccagcggcguggcggugugcaagguccugcaccucgagggcgaggugaacaagaucaaguccgcccugcugagcaccaacaaggccguggucucccucagcaacgggguguccgugcugacguucaagguccuggaccucaagaacuacaucgacaagcagcugcugccgauccucaacaagcagagcugcuccaucagcaacaucgagaccgugaucgaguuccagcagaagaacaaccggcugcuggagaucacccgcgaguucuccgugaacgccggcgucaccacgcccgugagcaccuacaugcucaccaacagcgagcugcugucccucaucaacgacaugcccaucaccaacgaccagaagaagcugaugagcaacaacgugcagaucguccggcagcaguccuacagcaucaugugcaucaucaaggaggaggugcuggccuacgugguccagcucccccuguacggggugaucgacacgccgugcuggaagcugcacaccagcccccucugcaccaccaacacgaaggagggcuccaacaucugccugacccgcaccgaccgggggugguacugcgacaacgcgggcuccgugagcuucuucccccaggccgagaccugcaagguccaguccaaccgcguguucugcgacacgaugaacagccggacccuccccuccgaggucaaccugugcaacguggacaucuucaacccgaaguacgacugcaagaucaugaccagcaagaccgacguguccagcuccgucaucacgagccugggcgccaucguguccugcuacgggaagaccaagugcaccgccagcaacaagaaccggggcaucaucaagaccuucuccaacgggugcgacuacgugagcaacaagggcgucgacacggugagcgugggcaacacccucuacuacgucaacaagcaggaggggaagucccuguacgugaagggcgagcccaucaucaacuucuacgacccccugguguuccccagcgacgaguucgacgccuccaucagccaggucaacgagaagaucaaccagucccucgcguucauccgcaagagcgacgagcugcugcacaacgugaacgccgggaaguccaccaccaacaucaugaucaccacgaucaucaucgugaucaucgucauccuccugagccugaucgccgugggccuccugcuguacugcaaggcccggugaggacuaguguccaccugucccuccugggcugcuggauugucucguuuuccugccaaauaaacaggaucagcgcuuuacagaucuaaaaaaaaaaaaaaaaaaaaaaaaaaaaaaaaaaaaaaaaaaaaaaaaaaaaaaaaaaaaaaaaugcaucccccccccccccccccccccccccccccccaaaggcucuuuucagagccaccagaauu

SEQ ID NO: 4398 - RNA, 1856 nt, Artificial Sequence
  mRNA product Design e-2 comprising derived and/or modified sequence from HRSV(A2)__F-del_DSCav1_mut0 (opt2)
gggagacccgugacccggaaguuguacggcuacgcgacuuucccucccacaaacccucgcgcccuuccuuuccuacuugggcccggcagaaagcuuaccauggagcuccucauccucaaggccaacgccaucaccaccauccucaccgccgucaccuucugcuucgccuccggccagaacaucaccgaggaguucuaccaguccaccugcuccgccgucuccaagggcuaccucuccgcccuccgcaccggcugguacaccuccgucaucaccaucgagcucuccaacaucaaggagaacaagugcaacggcaccgacgccaaggucaagcucaucaagcaggagcucgacaaguacaagaacgccgucaccgagcuccagcuccucaugcaguccacccccgccaccggcuccggcuccgccaucgccuccggcgucgccgucugcaagguccuccaccucgagggcgaggucaacaagaucaaguccgcccuccucuccaccaacaaggccgucgucucccucuccaacggcgucuccguccucaccuucaagguccucgaccucaagaacuacaucgacaagcagcuccuccccauccucaacaagcaguccugcuccaucuccaacaucgagaccgucaucgaguuccagcagaagaacaaccgccuccucgagaucacccgcgaguucuccgucaacgccggcgucaccacccccgucuccaccuacaugcucaccaacuccgagcuccucucccucaucaacgacaugcccaucaccaacgaccagaagaagcucauguccaacaacguccagaucguccgccagcaguccuacuccaucaugugcaucaucaaggaggagguccucgccuacgucguccagcucccccucuacggcgucaucgacacccccugcuggaagcuccacaccuccccccucugcaccaccaacaccaaggagggcuccaacaucugccucacccgcaccgaccgcggcugguacugcgacaacgccggcuccgucuccuucuucccccaggccgagaccugcaagguccaguccaaccgcgucuucugcgacaccaugaacucccgcacccuccccuccgaggucaaccucugcaacgucgacaucuucaaccccaaguacgacugcaagaucaugaccuccaagaccgacgucuccuccuccgucaucaccucccucggcgccaucgucuccugcuacggcaagaccaagugcaccgccuccaacaagaaccgcggcaucaucaagaccuucuccaacggcugcgacuacgucuccaacaagggcgucgacaccgucuccgucggcaacacccucuacuacgucaacaagcaggagggcaagucccucuacgucaagggcgagcccaucaucaacuucuacgacccccucgucuuccccuccgacgaguucgacgccuccaucucccaggucaacgagaagaucaaccagucccucgccuucauccgcaaguccgacgagcuccuccacaacgucaacgccggcaaguccaccaccaacaucaugaucaccaccaucaucaucgucaucaucgucauccuccucucccucaucgccgucggccuccuccucuacugcaaggcccgcugaggacuaguguccaccugucccuccugggcugcuggauugucucguuuuccugccaaauaaacaggaucagcgcuuuacagaucuaaaaaaaaaaaaaaaaaaaaaaaaaaaaaaaaaaaaaaaaaaaaaaaaaaaaaaaaaaaaaaaaugcaucccccccccccccccccccccccccccccccaaaggcucuuuucagagccaccagaauu

SEQ ID NO: 4399 - RNA, 1856 nt, Artificial Sequence
  mRNA product Design e-2 comprising derived and/or modified sequence from HRSV(A2)__F-del_DSCav1_mut0 (opt3)
gggagacccgugacccggaaguuguacggcuacgcgacuuucccucccacaaacccucgcgcccuuccuuuccuacuugggcccggcagaaagcuuaccauggagcugcucauccuuaaggccaacgcuauuaccacaauacugacugcagugacguucugcuuugccagcggccagaauaucaccgaagaguucuaccaauccacauguucugcggucucaaaaggguauuugagugcuuuaagaacuggaugguacaccagcguuauuacaaucgaacuguccaacauuaaggagaauaaaugcaacgguaccgacgccaaggugaaacuaaucaagcaggaacucgauaaguauaaaaaugcaguaacugagcugcagcuucugaugcagucuacacccgccaccggcucggggucagcuauagcaagcggaguggccgucuguaagguguugcaccucgagggcgaaguuaacaaaaucaagagugcucugcuguccacgaauaaagccguggucucucucagcaacgguguguccguauuaacuuuuaagguucuggaccuuaagaauuacauugauaaacaauugcugccuauccuaaacaagcagucaugcaguauuagcaauaucgagaccgugauagaguuccagcagaaaaacaauaggcuccuggaaauuacacgggaguuuucugucaacgcgggggugacuaccccaguguccacauauaugcuuaccaauucagaacuguugagccucaucaacgacaugccgauuacgaacgaucaaaagaaacugaugaguaauaacguccagaucguucgccagcagucuuacuccaucauguguauuauaaaggaggaaguguuagcauauguagugcaacugccccucuacggagucaucgacacuccuugcuggaaacuucauacaagcccacuguguaccacuaauacaaaggagggcucgaacauuugcuugacccgaacggaucguggcugguacugugacaaugccgggucuguguccuucuuuccccaggcugaaaccugcaagguucagucaaacagaguguucugugauacaaugaauaguagaacucugccuagcgaggucaaccucugcaauguggacaucuuuaacccaaaauaugauugcaagauaaugaccuccaaaacagacguaucuagcucaguuauuaccagucugggagccaucguguccuguuacgguaagacuaaaugcacagcaagcaauaagaacaggggcaucauuaagaccuucucuaaugggugugauuaugucucaaacaaaggaguggacacugucagugugggcaauacgcuuuacuauguuaacaagcaagaggguaaaagccuguacgugaagggggaacccaucauuaacuuuuaugacccuuugguauucccauccgaugaguuugacgcuucuauaucgcaggucaaugagaaaaucaaccagagccucgccuucauucggaaguccgaugaacuguuacacaaugugaacgcgggaaagucaacaaccaauaucaugaucacuaccauuauaaucguuauuaucgugauucugcuaagucucaucgccgucggccugcuuuuguacugcaaagcacgcugaggacuaguguccaccugucccuccugggcugcuggauugucucguuuuccugccaaauaaacaggaucagcgcuuuacagaucuaaaaaaaaaaaaaaaaaaaaaaaaaaaaaaaaaaaaaaaaaaaaaaaaaaaaaaaaaaaaaaaaugcaucccccccccccccccccccccccccccccccaaaggcucuuuucagagccaccagaauu

SEQ ID NO: 4400 - RNA, 1856 nt, Artificial Sequence
  mRNA product Design e-2 comprising derived and/or modified sequence from HRSV(A2)__F-del_DSCav1_mut0 (opt4)
gggagacccgugacccggaaguuguacggcuacgcgacuuucccucccacaaacccucgcgcccuuccuuuccuacuugggcccggcagaaagcuuaccauggagcugcugauccugaaggccaacgccaucaccaccauccugaccgccgugaccuucugcuucgccagcggccagaacaucaccgaggaguucuaccagagcaccugcagcgccgugagcaagggcuaccugagcgcccugagaaccggcugguacaccagcgugaucaccaucgagcugagcaacaucaaggagaacaagugcaacggcaccgacgccaaggugaagcugaucaagcaggagcuggacaaguacaagaacgccgugaccgagcugcagcugcugaugcagagcacccccgccaccggcagcggcagcgccaucgccagcggcguggccgugugcaaggugcugcaccuggagggcgaggugaacaagaucaagagcgcccugcugagcaccaacaaggccguggugagccugagcaacggcgugagcgugcugaccuucaaggugcuggaccugaagaacuacaucgacaagcagcugcugcccauccugaacaagcagagcugcagcaucagcaacaucgagaccgugaucgaguuccagcagaagaacaacagacugcuggagaucaccagagaguucagcgugaacgccggcgugaccacccccgugagcaccuacaugcugaccaacagcgagcugcugagccugaucaacgacaugcccaucaccaacgaccagaagaagcugaugagcaacaacgugcagaucgugagacagcagagcuacagcaucaugugcaucaucaaggaggaggugcuggccuacguggugcagcugccccuguacggcgugaucgacacccccugcuggaagcugcacaccagcccccugugcaccaccaacaccaaggagggcagcaacaucugccugaccagaaccgacagaggcugguacugcgacaacgccggcagcgugagcuucuucccccaggccgagaccugcaaggugcagagcaacagaguguucugcgacaccaugaacagcagaacccugcccagcgaggugaaccugugcaacguggacaucuucaaccccaaguacgacugcaagaucaugaccagcaagaccgacgugagcagcagcgugaucaccagccugggcgccaucgugagcugcuacggcaagaccaagugcaccgccagcaacaagaacagaggcaucaucaagaccuucagcaacggcugcgacuacgugagcaacaagggcguggacaccgugagcgugggcaacacccuguacuacgugaacaagcaggagggcaagagccuguacgugaagggcgagcccaucaucaacuucuacgacccccugguguuccccagcgacgaguucgacgccagcaucagccaggugaacgagaagaucaaccagagccuggccuucaucagaaagagcgacgagcugcugcacaacgugaacgccggcaagagcaccaccaacaucaugaucaccaccaucaucaucgugaucaucgugauccugcugagccugaucgccgugggccugcugcuguacugcaaggccagaugaggacuaguguccaccugucccuccugggcugcuggauugucucguuuuccugccaaauaaacaggaucagcgcuuuacagaucuaaaaaaaaaaaaaaaaaaaaaaaaaaaaaaaaaaaaaaaaaaaaaaaaaaaaaaaaaaaaaaaaugcaucccccccccccccccccccccccccccccccaaaggcucuuuucagagccaccagaauu

SEQ ID NO: 4401 - RNA, 1856 nt, Artificial Sequence
  mRNA product Design e-2 comprising derived and/or modified sequence from HRSV(A2)__F-del_DSCav1_mut0 (opt5)
gggagacccgugacccggaaguuguacggcuacgcgacuuucccucccacaaacccucgcgcccuuccuuuccuacuugggcccggcagaaagcuuaccauggagcugcucauccugaaggccaacgcuauuaccacaauccuuacggccgugaccuucugcuuugcgagcggccagaauauuacagaagaguucuaccaauccaccuguucugcugucagcaaaggguaucuguccgcccucagaacaggaugguacaccucuguuaucacaauugaacugagcaacaucaaggagaauaaaugcaacggcaccgacgccaaggugaaacuuaucaagcaggaacuggauaaguauaaaaaugcugugacggagcuccagcugcugaugcaguccacccccgccacagggucuggaagcgcuauugccuccggcgucgcgguguguaagguucuccaccuggagggggaagugaacaaaaucaagagcgcccuucugucuaccaauaaagcugucgugucccucagcaacggaguuucugugcugacauuuaagguccuugaccugaagaauuacauugauaaacaacuccugccuauccugaacaagcaguccugcagcauuucuaauaucgagaccgugauugaguuccagcagaaaaacaaucggcuccuggaaaucacgcgcgaguuuuccgugaacgccggcgucacaaccccgguuagcacauauaugcuuaccaauuccgaacugcucucucugaucaacgacaugcccauuaccaacgaucaaaagaaacuuaugagcaauaacgugcagaucgugagacagcaguccuacagcauuauguguaucauuaaggaggaaguccuggcuuaugugguucaacucccucuguacggcgugaucgacacacccugcuggaaacugcauacgucuccucucuguaccacaaauaccaaggagggguccaacaucugccugacacggaccgaucgcggaugguacugugacaaugccggcagcgucucuuucuuuccccaggcggaaacgugcaaggugcagagcaacagaguuuucugugauacaaugaacuccagaacccugccuucugaggugaaucucugcaaugucgacauuuuuaacccgaaauaugauugcaagaucaugaccagcaaaacagacguguccagcucugucauuaccucccugggggccaucgugagcuguuacggaaagacaaaaugcacggcuucuaauaagaaccggggcauuaucaagaccuucuccaaugggugugauuauguuagcaacaaaggaguggacacagucuccgugggcaauacccuuuacuauguuaacaagcaagagggcaaaucucuguacgugaagggggaacccaucauuaacuuuuaugacccucucgucuuccccagcgaugaguuugacgccuccaucucucaggugaaugagaaaauuaaccagagccuggcuuucauccgcaaguccgaugaacugcuccacaaugugaacgccggaaagagcacaaccaauauuaugaucacgaccauuaucaucguuauuaucgucauucugcuuucucugaucgccgugggccuccugcuguacugcaaagcuagaugaggacuaguguccaccugucccuccugggcugcuggauugucucguuuuccugccaaauaaacaggaucagcgcuuuacagaucuaaaaaaaaaaaaaaaaaaaaaaaaaaaaaaaaaaaaaaaaaaaaaaaaaaaaaaaaaaaaaaaaugcaucccccccccccccccccccccccccccccccaaaggcucuuuucagagccaccagaauu

SEQ ID NO: 4402 - RNA, 1856 nt, Artificial Sequence
  mRNA product Design e-2 comprising derived and/or modified sequence from HRSV(A2)__F-del_DSCav1_mut0 (opt6)
gggagacccgugacccggaaguuguacggcuacgcgacuuucccucccacaaacccucgcgcccuuccuuuccuacuugggcccggcagaaagcuuaccauggaauuacucauccucaaagcaaacgcaauaacaacaauacuaacagcagucacuuucugcuucgcauccggacaaaauaucacagaagaauuuuaccaauccaccugcucugcugucuccaaaggauaccuaucugcccucagaaccgguugguauacaucugucauaaccauagaacuaucaaacauuaaagaaaacaaauguaacggaacagacgcaaaagucaaacuuauaaaacaagaauuagacaaauacaaaaacgcagucacagaauuacaacuacuaaugcaaucaaccccagcaaccggaucaggauccgcaauagcuucaggaguagcaguauguaaaguucuacacuuagaaggagaagucaacaaaauuaaauccgcacuauuaucaaccaacaaagcagucguaucuuuaucaaacggaguaucuguacuuacauucaaaguacuagaccuaaaaaauuacauugauaaacaauuacuaccaauacuaaacaaacaaucauguuccaucucuaacauagaaacaguaauagaauuucaacaaaaaaauaacagauuacuugaaaucacccgagaauuuucaguaaacgcaggaguaaccacacccguaucuacauacaugcuaacaaacucugaacuucugagccuaauaaaugacaugccaauaaccaacgaccaaaaaaaacuaauguccaacaacguacaaauaguacgacaacaaucuuacucaaucaugugcauaaucaaagaagaaguacuagcuuauguaguccaacuuccacucuacggaguaauagacacccccugcuggaaacuacacacaucaccacuaugcacaacaaacacaaaagaaggcucaaacauaugccuaacaagaacugacagaggaugguauugugacaaugcaggcucugucucauucuuuccacaagccgaaacaugcaaaguucaaucaaaccgaguuuucugugacacaaugaacucuagaacucucccaucagaagucaacuuaugcaacguugacauauucaacccaaaauaugacuguaaaauaaugacuuccaaaacugauguaucauccuccgucauaacaucccuaggagcuauuguaucauguuacgggaaaaccaaaugcacagccucaaacaaaaaccgcgguaucauaaaaacauuuucaaacggaugugauuacguaagcaauaaaggaguagacaccguaucaguaggaaauacacuauacuauguaaauaaacaagaaggaaaaucacuauaugucaaaggagaaccaaucauaaauuucuaugacccacuuguauucccauccgaugaauuugacgcaagcauuucacaggucaacgaaaaaauaaaccaaucacuagccuucaucagaaaaucagacgaacuacuacauaacguaaacgccggaaaaucaacaaccaacauaaugauaacaacaaucauaauaguuaucauaguaauacuacuaucucuaauagcugucggacucuuacuauauugcaaagcccgauaaggacuaguguccaccugucccuccugggcugcuggauugucucguuuuccugccaaauaaacaggaucagcgcuuuacagaucuaaaaaaaaaaaaaaaaaaaaaaaaaaaaaaaaaaaaaaaaaaaaaaaaaaaaaaaaaaaaaaaaugcaucccccccccccccccccccccccccccccccaaaggcucuuuucagagccaccagaauu

SEQ ID NO: 4403 - RNA, 1856 nt, Artificial Sequence
  mRNA product Design e-2 comprising derived and/or modified sequence from HRSV(A2)__F-del_DSCav1_mut0 (opt11)
gggagacccgugacccggaaguuguacggcuacgcgacuuucccucccacaaacccucgcgcccuuccuuuccuacuugggcccggcagaaagcuuaccauggaacuacuaauccugaaagccaacgccauaaccacaauccuuaccgcagucaccuucugcuucgccuccggucaaaacaucacagaagaguucuaccaauccaccuguuccgcagucagcaaaggcuaccucuccgcacuccgaaccggaugguacaccagcgucaucaccaucgaacuauccaacauaaaggaaaauaagugcaaugguacagaugccaaggucaaacucauaaagcaagaacucgacaaauacaaaaacgccgucaccgaacuacaacuacuaaugcaaucuacccccgcaacaggcucagguuccgccauagccuccggcgucgccguuugcaaaguccuccaccucgaaggcgaaguaaacaaaaucaaauccgcccuacucucaaccaacaaagcagucgucucccucucaaacggagucucgguccucaccuucaaaguccucgaccucaaaaacuauauagacaaacaacuccuacccauacucaacaaacaguccugcagcauauccaacaucgaaaccgugaucgaguuccaacagaaaaacaacagacuccucgaaaucacucgagaguucuccguaaacgccggcgucacaaccccagucucaacauacaugcucaccaacagcgaacuccuaucacuaaucaacgacaugccuaucacaaaugaucagaagaaacuaaugagcaacaacguccaaaucguccgccaacaaucauacuccaucaugugcaucauaaaagaagaaguccuagccuacgugguccagcuaccccucuacggcguaauugacaccccuugcuggaaacuacacacuucaccccucugcacaaccaacaccaaagaagguucaaacaucugccucacacgaacagaccgcggcugguacugcgacaacgccggauccguauccuucuucccccaagcagaaaccugcaaaguucaauccaaccggguauucugcgacaccaugaacucaagaacccuucccuccgaaguaaaucuaugcaacgucgacauauucaacccaaaauacgacugcaaaaucaugaccuccaaaaccgaugucuccagcagcgucaucaccagccucggcgccaucgucuccugcuacggcaaaacaaaauguacagcauccaacaaaaaccgaggcauaaucaaaaccuucuccaacgggugcgauuacgucagcaacaaaggcgucgacaccgucuccgugggcaacacccuauacuacgucaacaaacaagaaggcaaaucacuguacguaaagggcgaacccaucaucaacuucuaugacccucugguguucccauccgaugaauuugacgcauccauaucucaggucaacgaaaagaucaaccaaucccucgccuucauacgcaaauccgacgaacuccuacacaacgucaacgcugguaaaagcaccaccaacaucaugaucaccacaaucaucaucgucauaaucguuauccuacucucccuuauagcagucggacuccuccucuacugcaaagcccgcuaaggacuaguguccaccugucccuccugggcugcuggauugucucguuuuccugccaaauaaacaggaucagcgcuuuacagaucuaaaaaaaaaaaaaaaaaaaaaaaaaaaaaaaaaaaaaaaaaaaaaaaaaaaaaaaaaaaaaaaaugcaucccccccccccccccccccccccccccccccaaaggcucuuuucagagccaccagaauu

SEQ ID NO: 4404 - RNA, 1826 nt, Artificial Sequence
  mRNA product Design e-3 comprising derived and/or modified sequence from HRSV(A2)__F-del_DSCav1_mut0 (opt1)
gggagacuuucccauucuguagcagaauuugguguugccuguggucuuggucccgcggagaagcuuaccauggagcugcucauccugaaggccaacgccaucaccaccauccugacggcggugaccuucugcuucgccagcggccagaacaucaccgaggaguucuaccaguccacgugcagcgccgucuccaagggguaccucagcgcccugcggaccggcugguacaccuccgugaucaccaucgagcugagcaacaucaaggagaacaagugcaacgggaccgacgccaaggugaagcucaucaagcaggagcuggacaaguacaagaacgcggucacggagcugcagcuccugaugcaguccaccccggcaaccggcuccggcuccgccaucgcgagcggcgucgccgugugcaaggugcugcaccucgagggggaggucaacaagaucaagagcgcccugcuguccaccaacaaggccguggugagccucuccaacggcgucagcgugcugaccuucaaggugcuggaccucaagaacuacaucgacaagcagcugcugcccauccugaacaagcagagcugcuccaucagcaacaucgagacggugaucgaguuccagcagaagaacaaccggcuccuggagaucacccgcgaguucagcgugaacgccggggucaccacccccguguccacguacaugcugaccaacagcgagcuccugucccugaucaacgacaugccgaucaccaacgaccagaagaagcucaugagcaacaacgugcagaucguccggcagcaguccuacagcaucaugugcaucaucaaggaggaggugcuggcguacgugguccagcugccccucuacggcgugaucgacacccccugcuggaagcugcacacgagcccccugugcaccaccaacaccaaggagggguccaacaucugccucacgcgcaccgaccggggcugguacugcgacaacgccggcagcgucuccuucuucccgcaggccgagaccugcaaggugcagagcaaccgcguguucugcgacaccaugaacucccggacgcugcccagcgagguaaaccucugcaacgucgacaucuucaaccccaaguacgacugcaagaucaugaccuccaagaccgacgugagcuccagcgugaucaccucccugggggccaucgucagcugcuacggcaagacgaagugcaccgccagcaacaagaaccgggggaucaucaagaccuucuccaacggcugcgacuacgugagcaacaagggcguggacaccguguccgucgggaacacccuguacuacgugaacaagcaggagggcaagagccucuacgugaagggggagcccaucaucaacuucuacgacccgcuggucuuccccuccgacgaguucgacgcgagcaucucccaggugaacgagaagaucaaccagagccuggccuucauccgcaaguccgacgagcugcuccacaacgugaacgccggcaagagcacgaccaacaucaugaucaccaccaucaucaucgucaucaucgugauccugcugucccucaucgccguggggcugcugcucuacugcaaggcccggugaggacuaguguccaccugucccuccugggcugcuggauugucucguuuuccugccaaauaaacaggaucagcgcuuuacagaucuaaaaaaaaaaaaaaaaaaaaaaaaaaaaaaaaaaaaaaaaaaaaaaaaaaaaaaaaaaaaaaaaugcaucccccccccccccccccccccccccccccccaaaggcucuuuucagagccaccagaauu

SEQ ID NO: 4405 - RNA, 1826 nt, Artificial Sequence
  mRNA product Design e-3 comprising derived and/or modified sequence from HRSV(A2)__F-del_DSCav1_mut0 (opt1)
gggagacuuucccauucuguagcagaauuugguguugccuguggucuuggucccgcggagaagcuuaccauggagcugcucauccugaaggccaacgccaucaccaccauccugacggcggugaccuucugcuucgccagcggccagaacaucaccgaggaguucuaccaguccacgugcagcgccgucuccaagggguaccucagcgcccugcgcaccggcugguacaccuccgugaucaccaucgagcugagcaacaucaaggagaacaagugcaacgggaccgacgccaaggugaagcucaucaagcaggagcuggacaaguacaagaacgcggucacggagcugcagcuccugaugcaguccacccccgccaccggcagcggguccgccaucgccagcggcguggcggugugcaagguccugcaccucgagggcgaggugaacaagaucaaguccgcccugcugagcaccaacaaggccguggucucccucagcaacgggguguccgugcugacguucaagguccuggaccucaagaacuacaucgacaagcagcugcugccgauccucaacaagcagagcugcuccaucagcaacaucgagaccgugaucgaguuccagcagaagaacaaccggcugcuggagaucacccgcgaguucuccgugaacgccggcgucaccacgcccgugagcaccuacaugcucaccaacagcgagcugcugucccucaucaacgacaugcccaucaccaacgaccagaagaagcugaugagcaacaacgugcagaucguccggcagcaguccuacagcaucaugugcaucaucaaggaggaggugcuggccuacgugguccagcucccccuguacggggugaucgacacgccgugcuggaagcugcacaccagcccccucugcaccaccaacacgaaggagggcuccaacaucugccugacccgcaccgaccgggggugguacugcgacaacgcgggcuccgugagcuucuucccccaggccgagaccugcaagguccaguccaaccgcguguucugcgacacgaugaacagccggacccuccccuccgaggucaaccugugcaacguggacaucuucaacccgaaguacgacugcaagaucaugaccagcaagaccgacguguccagcuccgucaucacgagccugggcgccaucguguccugcuacgggaagaccaagugcaccgccagcaacaagaaccggggcaucaucaagaccuucuccaacgggugcgacuacgugagcaacaagggcgucgacacggugagcgugggcaacacccucuacuacgucaacaagcaggaggggaagucccuguacgugaagggcgagcccaucaucaacuucuacgacccccugguguuccccagcgacgaguucgacgccuccaucagccaggucaacgagaagaucaaccagucccucgcguucauccgcaagagcgacgagcugcugcacaacgugaacgccgggaaguccaccaccaacaucaugaucaccacgaucaucaucgugaucaucgucauccuccugagccugaucgccgugggccuccugcuguacugcaaggcccggugaggacuaguguccaccugucccuccugggcugcuggauugucucguuuuccugccaaauaaacaggaucagcgcuuuacagaucuaaaaaaaaaaaaaaaaaaaaaaaaaaaaaaaaaaaaaaaaaaaaaaaaaaaaaaaaaaaaaaaaugcaucccccccccccccccccccccccccccccccaaaggcucuuuucagagccaccagaauu

SEQ ID NO: 4406 - RNA, 1826 nt, Artificial Sequence
  mRNA product Design e-3 comprising derived and/or modified sequence from HRSV(A2)__F-del_DSCav1_mut0 (opt2)
gggagacuuucccauucuguagcagaauuugguguugccuguggucuuggucccgcggagaagcuuaccauggagcuccucauccucaaggccaacgccaucaccaccauccucaccgccgucaccuucugcuucgccuccggccagaacaucaccgaggaguucuaccaguccaccugcuccgccgucuccaagggcuaccucuccgcccuccgcaccggcugguacaccuccgucaucaccaucgagcucuccaacaucaaggagaacaagugcaacggcaccgacgccaaggucaagcucaucaagcaggagcucgacaaguacaagaacgccgucaccgagcuccagcuccucaugcaguccacccccgccaccggcuccggcuccgccaucgccuccggcgucgccgucugcaagguccuccaccucgagggcgaggucaacaagaucaaguccgcccuccucuccaccaacaaggccgucgucucccucuccaacggcgucuccguccucaccuucaagguccucgaccucaagaacuacaucgacaagcagcuccuccccauccucaacaagcaguccugcuccaucuccaacaucgagaccgucaucgaguuccagcagaagaacaaccgccuccucgagaucacccgcgaguucuccgucaacgccggcgucaccacccccgucuccaccuacaugcucaccaacuccgagcuccucucccucaucaacgacaugcccaucaccaacgaccagaagaagcucauguccaacaacguccagaucguccgccagcaguccuacuccaucaugugcaucaucaaggaggagguccucgccuacgucguccagcucccccucuacggcgucaucgacacccccugcuggaagcuccacaccuccccccucugcaccaccaacaccaaggagggcuccaacaucugccucacccgcaccgaccgcggcugguacugcgacaacgccggcuccgucuccuucuucccccaggccgagaccugcaagguccaguccaaccgcgucuucugcgacaccaugaacucccgcacccuccccuccgaggucaaccucugcaacgucgacaucuucaaccccaaguacgacugcaagaucaugaccuccaagaccgacgucuccuccuccgucaucaccucccucggcgccaucgucuccugcuacggcaagaccaagugcaccgccuccaacaagaaccgcggcaucaucaagaccuucuccaacggcugcgacuacgucuccaacaagggcgucgacaccgucuccgucggcaacacccucuacuacgucaacaagcaggagggcaagucccucuacgucaagggcgagcccaucaucaacuucuacgacccccucgucuuccccuccgacgaguucgacgccuccaucucccaggucaacgagaagaucaaccagucccucgccuucauccgcaaguccgacgagcuccuccacaacgucaacgccggcaaguccaccaccaacaucaugaucaccaccaucaucaucgucaucaucgucauccuccucucccucaucgccgucggccuccuccucuacugcaaggcccgcugaggacuaguguccaccugucccuccugggcugcuggauugucucguuuuccugccaaauaaacaggaucagcgcuuuacagaucuaaaaaaaaaaaaaaaaaaaaaaaaaaaaaaaaaaaaaaaaaaaaaaaaaaaaaaaaaaaaaaaaugcaucccccccccccccccccccccccccccccccaaaggcucuuuucagagccaccagaauu

SEQ ID NO: 4407 - RNA, 1826 nt, Artificial Sequence
  mRNA product Design e-3 comprising derived and/or modified sequence from HRSV(A2)__F-del_DSCav1_mut0 (opt3)
gggagacuuucccauucuguagcagaauuugguguugccuguggucuuggucccgcggagaagcuuaccauggagcugcucauccuuaaggccaacgcuauuaccacaauacugacugcagugacguucugcuuugccagcggccagaauaucaccgaagaguucuaccaauccacauguucugcggucucaaaaggguauuugagugcuuuaagaacuggaugguacaccagcguuauuacaaucgaacuguccaacauuaaggagaauaaaugcaacgguaccgacgccaaggugaaacuaaucaagcaggaacucgauaaguauaaaaaugcaguaacugagcugcagcuucugaugcagucuacacccgccaccggcucggggucagcuauagcaagcggaguggccgucuguaagguguugcaccucgagggcgaaguuaacaaaaucaagagugcucugcuguccacgaauaaagccguggucucucucagcaacgguguguccguauuaacuuuuaagguucuggaccuuaagaauuacauugauaaacaauugcugccuauccuaaacaagcagucaugcaguauuagcaauaucgagaccgugauagaguuccagcagaaaaacaauaggcuccuggaaauuacacgggaguuuucugucaacgcgggggugacuaccccaguguccacauauaugcuuaccaauucagaacuguugagccucaucaacgacaugccgauuacgaacgaucaaaagaaacugaugaguaauaacguccagaucguucgccagcagucuuacuccaucauguguauuauaaaggaggaaguguuagcauauguagugcaacugccccucuacggagucaucgacacuccuugcuggaaacuucauacaagcccacuguguaccacuaauacaaaggagggcucgaacauuugcuugacccgaacggaucguggcugguacugugacaaugccgggucuguguccuucuuuccccaggcugaaaccugcaagguucagucaaacagaguguucugugauacaaugaauaguagaacucugccuagcgaggucaaccucugcaauguggacaucuuuaacccaaaauaugauugcaagauaaugaccuccaaaacagacguaucuagcucaguuauuaccagucugggagccaucguguccuguuacgguaagacuaaaugcacagcaagcaauaagaacaggggcaucauuaagaccuucucuaaugggugugauuaugucucaaacaaaggaguggacacugucagugugggcaauacgcuuuacuauguuaacaagcaagaggguaaaagccuguacgugaagggggaacccaucauuaacuuuuaugacccuuugguauucccauccgaugaguuugacgcuucuauaucgcaggucaaugagaaaaucaaccagagccucgccuucauucggaaguccgaugaacuguuacacaaugugaacgcgggaaagucaacaaccaauaucaugaucacuaccauuauaaucguuauuaucgugauucugcuaagucucaucgccgucggccugcuuuuguacugcaaagcacgcugaggacuaguguccaccugucccuccugggcugcuggauugucucguuuuccugccaaauaaacaggaucagcgcuuuacagaucuaaaaaaaaaaaaaaaaaaaaaaaaaaaaaaaaaaaaaaaaaaaaaaaaaaaaaaaaaaaaaaaaugcaucccccccccccccccccccccccccccccccaaaggcucuuuucagagccaccagaauu

SEQ ID NO: 4408 - RNA, 1826 nt, Artificial Sequence
  mRNA product Design e-3 comprising derived and/or modified sequence from HRSV(A2)__F-del_DSCav1_mut0 (opt4)
gggagacuuucccauucuguagcagaauuugguguugccuguggucuuggucccgcggagaagcuuaccauggagcugcugauccugaaggccaacgccaucaccaccauccugaccgccgugaccuucugcuucgccagcggccagaacaucaccgaggaguucuaccagagcaccugcagcgccgugagcaagggcuaccugagcgcccugagaaccggcugguacaccagcgugaucaccaucgagcugagcaacaucaaggagaacaagugcaacggcaccgacgccaaggugaagcugaucaagcaggagcuggacaaguacaagaacgccgugaccgagcugcagcugcugaugcagagcacccccgccaccggcagcggcagcgccaucgccagcggcguggccgugugcaaggugcugcaccuggagggcgaggugaacaagaucaagagcgcccugcugagcaccaacaaggccguggugagccugagcaacggcgugagcgugcugaccuucaaggugcuggaccugaagaacuacaucgacaagcagcugcugcccauccugaacaagcagagcugcagcaucagcaacaucgagaccgugaucgaguuccagcagaagaacaacagacugcuggagaucaccagagaguucagcgugaacgccggcgugaccacccccgugagcaccuacaugcugaccaacagcgagcugcugagccugaucaacgacaugcccaucaccaacgaccagaagaagcugaugagcaacaacgugcagaucgugagacagcagagcuacagcaucaugugcaucaucaaggaggaggugcuggccuacguggugcagcugccccuguacggcgugaucgacacccccugcuggaagcugcacaccagcccccugugcaccaccaacaccaaggagggcagcaacaucugccugaccagaaccgacagaggcugguacugcgacaacgccggcagcgugagcuucuucccccaggccgagaccugcaaggugcagagcaacagaguguucugcgacaccaugaacagcagaacccugcccagcgaggugaaccugugcaacguggacaucuucaaccccaaguacgacugcaagaucaugaccagcaagaccgacgugagcagcagcgugaucaccagccugggcgccaucgugagcugcuacggcaagaccaagugcaccgccagcaacaagaacagaggcaucaucaagaccuucagcaacggcugcgacuacgugagcaacaagggcguggacaccgugagcgugggcaacacccuguacuacgugaacaagcaggagggcaagagccuguacgugaagggcgagcccaucaucaacuucuacgacccccugguguuccccagcgacgaguucgacgccagcaucagccaggugaacgagaagaucaaccagagccuggccuucaucagaaagagcgacgagcugcugcacaacgugaacgccggcaagagcaccaccaacaucaugaucaccaccaucaucaucgugaucaucgugauccugcugagccugaucgccgugggccugcugcuguacugcaaggccagaugaggacuaguguccaccugucccuccugggcugcuggauugucucguuuuccugccaaauaaacaggaucagcgcuuuacagaucuaaaaaaaaaaaaaaaaaaaaaaaaaaaaaaaaaaaaaaaaaaaaaaaaaaaaaaaaaaaaaaaaugcaucccccccccccccccccccccccccccccccaaaggcucuuuucagagccaccagaauu

SEQ ID NO: 4409 - RNA, 1826 nt, Artificial Sequence
  mRNA product Design e-3 comprising derived and/or modified sequence from HRSV(A2)__F-del_DSCav1_mut0 (opt5)
gggagacuuucccauucuguagcagaauuugguguugccuguggucuuggucccgcggagaagcuuaccauggagcugcucauccugaaggccaacgcuauuaccacaauccuuacggccgugaccuucugcuuugcgagcggccagaauauuacagaagaguucuaccaauccaccuguucugcugucagcaaaggguaucuguccgcccucagaacaggaugguacaccucuguuaucacaauugaacugagcaacaucaaggagaauaaaugcaacggcaccgacgccaaggugaaacuuaucaagcaggaacuggauaaguauaaaaaugcugugacggagcuccagcugcugaugcaguccacccccgccacagggucuggaagcgcuauugccuccggcgucgcgguguguaagguucuccaccuggagggggaagugaacaaaaucaagagcgcccuucugucuaccaauaaagcugucgugucccucagcaacggaguuucugugcugacauuuaagguccuugaccugaagaauuacauugauaaacaacuccugccuauccugaacaagcaguccugcagcauuucuaauaucgagaccgugauugaguuccagcagaaaaacaaucggcuccuggaaaucacgcgcgaguuuuccgugaacgccggcgucacaaccccgguuagcacauauaugcuuaccaauuccgaacugcucucucugaucaacgacaugcccauuaccaacgaucaaaagaaacuuaugagcaauaacgugcagaucgugagacagcaguccuacagcauuauguguaucauuaaggaggaaguccuggcuuaugugguucaacucccucuguacggcgugaucgacacacccugcuggaaacugcauacgucuccucucuguaccacaaauaccaaggagggguccaacaucugccugacacggaccgaucgcggaugguacugugacaaugccggcagcgucucuuucuuuccccaggcggaaacgugcaaggugcagagcaacagaguuuucugugauacaaugaacuccagaacccugccuucugaggugaaucucugcaaugucgacauuuuuaacccgaaauaugauugcaagaucaugaccagcaaaacagacguguccagcucugucauuaccucccugggggccaucgugagcuguuacggaaagacaaaaugcacggcuucuaauaagaaccggggcauuaucaagaccuucuccaaugggugugauuauguuagcaacaaaggaguggacacagucuccgugggcaauacccuuuacuauguuaacaagcaagagggcaaaucucuguacgugaagggggaacccaucauuaacuuuuaugacccucucgucuuccccagcgaugaguuugacgccuccaucucucaggugaaugagaaaauuaaccagagccuggcuuucauccgcaaguccgaugaacugcuccacaaugugaacgccggaaagagcacaaccaauauuaugaucacgaccauuaucaucguuauuaucgucauucugcuuucucugaucgccgugggccuccugcuguacugcaaagcuagaugaggacuaguguccaccugucccuccugggcugcuggauugucucguuuuccugccaaauaaacaggaucagcgcuuuacagaucuaaaaaaaaaaaaaaaaaaaaaaaaaaaaaaaaaaaaaaaaaaaaaaaaaaaaaaaaaaaaaaaaugcaucccccccccccccccccccccccccccccccaaaggcucuuuucagagccaccagaauu

SEQ ID NO: 4410 - RNA, 1826 nt, Artificial Sequence
  mRNA product Design e-3 comprising derived and/or modified sequence from HRSV(A2)__F-del_DSCav1_mut0 (opt6)
gggagacuuucccauucuguagcagaauuugguguugccuguggucuuggucccgcggagaagcuuaccauggaauuacucauccucaaagcaaacgcaauaacaacaauacuaacagcagucacuuucugcuucgcauccggacaaaauaucacagaagaauuuuaccaauccaccugcucugcugucuccaaaggauaccuaucugcccucagaaccgguugguauacaucugucauaaccauagaacuaucaaacauuaaagaaaacaaauguaacggaacagacgcaaaagucaaacuuauaaaacaagaauuagacaaauacaaaaacgcagucacagaauuacaacuacuaaugcaaucaaccccagcaaccggaucaggauccgcaauagcuucaggaguagcaguauguaaaguucuacacuuagaaggagaagucaacaaaauuaaauccgcacuauuaucaaccaacaaagcagucguaucuuuaucaaacggaguaucuguacuuacauucaaaguacuagaccuaaaaaauuacauugauaaacaauuacuaccaauacuaaacaaacaaucauguuccaucucuaacauagaaacaguaauagaauuucaacaaaaaaauaacagauuacuugaaaucacccgagaauuuucaguaaacgcaggaguaaccacacccguaucuacauacaugcuaacaaacucugaacuucugagccuaauaaaugacaugccaauaaccaacgaccaaaaaaaacuaauguccaacaacguacaaauaguacgacaacaaucuuacucaaucaugugcauaaucaaagaagaaguacuagcuuauguaguccaacuuccacucuacggaguaauagacacccccugcuggaaacuacacacaucaccacuaugcacaacaaacacaaaagaaggcucaaacauaugccuaacaagaacugacagaggaugguauugugacaaugcaggcucugucucauucuuuccacaagccgaaacaugcaaaguucaaucaaaccgaguuuucugugacacaaugaacucuagaacucucccaucagaagucaacuuaugcaacguugacauauucaacccaaaauaugacuguaaaauaaugacuuccaaaacugauguaucauccuccgucauaacaucccuaggagcuauuguaucauguuacgggaaaaccaaaugcacagccucaaacaaaaaccgcgguaucauaaaaacauuuucaaacggaugugauuacguaagcaauaaaggaguagacaccguaucaguaggaaauacacuauacuauguaaauaaacaagaaggaaaaucacuauaugucaaaggagaaccaaucauaaauuucuaugacccacuuguauucccauccgaugaauuugacgcaagcauuucacaggucaacgaaaaaauaaaccaaucacuagccuucaucagaaaaucagacgaacuacuacauaacguaaacgccggaaaaucaacaaccaacauaaugauaacaacaaucauaauaguuaucauaguaauacuacuaucucuaauagcugucggacucuuacuauauugcaaagcccgauaaggacuaguguccaccugucccuccugggcugcuggauugucucguuuuccugccaaauaaacaggaucagcgcuuuacagaucuaaaaaaaaaaaaaaaaaaaaaaaaaaaaaaaaaaaaaaaaaaaaaaaaaaaaaaaaaaaaaaaaugcaucccccccccccccccccccccccccccccccaaaggcucuuuucagagccaccagaauu

SEQ ID NO: 4411 - RNA, 1826 nt, Artificial Sequence
  mRNA product Design e-3 comprising derived and/or modified sequence from HRSV(A2)__F-del_DSCav1_mut0 (opt11)
gggagacuuucccauucuguagcagaauuugguguugccuguggucuuggucccgcggagaagcuuaccauggaacuacuaauccugaaagccaacgccauaaccacaauccuuaccgcagucaccuucugcuucgccuccggucaaaacaucacagaagaguucuaccaauccaccuguuccgcagucagcaaaggcuaccucuccgcacuccgaaccggaugguacaccagcgucaucaccaucgaacuauccaacauaaaggaaaauaagugcaaugguacagaugccaaggucaaacucauaaagcaagaacucgacaaauacaaaaacgccgucaccgaacuacaacuacuaaugcaaucuacccccgcaacaggcucagguuccgccauagccuccggcgucgccguuugcaaaguccuccaccucgaaggcgaaguaaacaaaaucaaauccgcccuacucucaaccaacaaagcagucgucucccucucaaacggagucucgguccucaccuucaaaguccucgaccucaaaaacuauauagacaaacaacuccuacccauacucaacaaacaguccugcagcauauccaacaucgaaaccgugaucgaguuccaacagaaaaacaacagacuccucgaaaucacucgagaguucuccguaaacgccggcgucacaaccccagucucaacauacaugcucaccaacagcgaacuccuaucacuaaucaacgacaugccuaucacaaaugaucagaagaaacuaaugagcaacaacguccaaaucguccgccaacaaucauacuccaucaugugcaucauaaaagaagaaguccuagccuacgugguccagcuaccccucuacggcguaauugacaccccuugcuggaaacuacacacuucaccccucugcacaaccaacaccaaagaagguucaaacaucugccucacacgaacagaccgcggcugguacugcgacaacgccggauccguauccuucuucccccaagcagaaaccugcaaaguucaauccaaccggguauucugcgacaccaugaacucaagaacccuucccuccgaaguaaaucuaugcaacgucgacauauucaacccaaaauacgacugcaaaaucaugaccuccaaaaccgaugucuccagcagcgucaucaccagccucggcgccaucgucuccugcuacggcaaaacaaaauguacagcauccaacaaaaaccgaggcauaaucaaaaccuucuccaacgggugcgauuacgucagcaacaaaggcgucgacaccgucuccgugggcaacacccuauacuacgucaacaaacaagaaggcaaaucacuguacguaaagggcgaacccaucaucaacuucuaugacccucugguguucccauccgaugaauuugacgcauccauaucucaggucaacgaaaagaucaaccaaucccucgccuucauacgcaaauccgacgaacuccuacacaacgucaacgcugguaaaagcaccaccaacaucaugaucaccacaaucaucaucgucauaaucguuauccuacucucccuuauagcagucggacuccuccucuacugcaaagcccgcuaaggacuaguguccaccugucccuccugggcugcuggauugucucguuuuccugccaaauaaacaggaucagcgcuuuacagaucuaaaaaaaaaaaaaaaaaaaaaaaaaaaaaaaaaaaaaaaaaaaaaaaaaaaaaaaaaaaaaaaaugcaucccccccccccccccccccccccccccccccaaaggcucuuuucagagccaccagaauu

SEQ ID NO: 4412 - RNA, 1880 nt, Artificial Sequence
  mRNA product Design e-4 comprising derived and/or modified sequence from HRSV(A2)__F-del_DSCav1_mut0 (opt1)
gggagacuccugucgggcggaaguaggaggaguagaguuuaaaaacaguacucuuuuuccgguucgggacguaguugaagcaacgacaagccggauaaccgcucuugagacaggaagcuuaccauggagcugcucauccugaaggccaacgccaucaccaccauccugacggcggugaccuucugcuucgccagcggccagaacaucaccgaggaguucuaccaguccacgugcagcgccgucuccaagggguaccucagcgcccugcggaccggcugguacaccuccgugaucaccaucgagcugagcaacaucaaggagaacaagugcaacgggaccgacgccaaggugaagcucaucaagcaggagcuggacaaguacaagaacgcggucacggagcugcagcuccugaugcaguccaccccggcaaccggcuccggcuccgccaucgcgagcggcgucgccgugugcaaggugcugcaccucgagggggaggucaacaagaucaagagcgcccugcuguccaccaacaaggccguggugagccucuccaacggcgucagcgugcugaccuucaaggugcuggaccucaagaacuacaucgacaagcagcugcugcccauccugaacaagcagagcugcuccaucagcaacaucgagacggugaucgaguuccagcagaagaacaaccggcuccuggagaucacccgcgaguucagcgugaacgccggggucaccacccccguguccacguacaugcugaccaacagcgagcuccugucccugaucaacgacaugccgaucaccaacgaccagaagaagcucaugagcaacaacgugcagaucguccggcagcaguccuacagcaucaugugcaucaucaaggaggaggugcuggcguacgugguccagcugccccucuacggcgugaucgacacccccugcuggaagcugcacacgagcccccugugcaccaccaacaccaaggagggguccaacaucugccucacgcgcaccgaccggggcugguacugcgacaacgccggcagcgucuccuucuucccgcaggccgagaccugcaaggugcagagcaaccgcguguucugcgacaccaugaacucccggacgcugcccagcgagguaaaccucugcaacgucgacaucuucaaccccaaguacgacugcaagaucaugaccuccaagaccgacgugagcuccagcgugaucaccucccugggggccaucgucagcugcuacggcaagacgaagugcaccgccagcaacaagaaccgggggaucaucaagaccuucuccaacggcugcgacuacgugagcaacaagggcguggacaccguguccgucgggaacacccuguacuacgugaacaagcaggagggcaagagccucuacgugaagggggagcccaucaucaacuucuacgacccgcuggucuuccccuccgacgaguucgacgcgagcaucucccaggugaacgagaagaucaaccagagccuggccuucauccgcaaguccgacgagcugcuccacaacgugaacgccggcaagagcacgaccaacaucaugaucaccaccaucaucaucgucaucaucgugauccugcugucccucaucgccguggggcugcugcucuacugcaaggcccggugaggacuaguguccaccugucccuccugggcugcuggauugucucguuuuccugccaaauaaacaggaucagcgcuuuacagaucuaaaaaaaaaaaaaaaaaaaaaaaaaaaaaaaaaaaaaaaaaaaaaaaaaaaaaaaaaaaaaaaaugcaucccccccccccccccccccccccccccccccaaaggcucuuuucagagccaccagaauu

SEQ ID NO: 4413 - RNA, 1880 nt, Artificial Sequence
  mRNA product Design e-4 comprising derived and/or modified sequence from HRSV(A2)__F-del_DSCav1_mut0 (opt1)
gggagacuccugucgggcggaaguaggaggaguagaguuuaaaaacaguacucuuuuuccgguucgggacguaguugaagcaacgacaagccggauaaccgcucuugagacaggaagcuuaccauggagcugcucauccugaaggccaacgccaucaccaccauccugacggcggugaccuucugcuucgccagcggccagaacaucaccgaggaguucuaccaguccacgugcagcgccgucuccaagggguaccucagcgcccugcgcaccggcugguacaccuccgugaucaccaucgagcugagcaacaucaaggagaacaagugcaacgggaccgacgccaaggugaagcucaucaagcaggagcuggacaaguacaagaacgcggucacggagcugcagcuccugaugcaguccacccccgccaccggcagcggguccgccaucgccagcggcguggcggugugcaagguccugcaccucgagggcgaggugaacaagaucaaguccgcccugcugagcaccaacaaggccguggucucccucagcaacgggguguccgugcugacguucaagguccuggaccucaagaacuacaucgacaagcagcugcugccgauccucaacaagcagagcugcuccaucagcaacaucgagaccgugaucgaguuccagcagaagaacaaccggcugcuggagaucacccgcgaguucuccgugaacgccggcgucaccacgcccgugagcaccuacaugcucaccaacagcgagcugcugucccucaucaacgacaugcccaucaccaacgaccagaagaagcugaugagcaacaacgugcagaucguccggcagcaguccuacagcaucaugugcaucaucaaggaggaggugcuggccuacgugguccagcucccccuguacggggugaucgacacgccgugcuggaagcugcacaccagcccccucugcaccaccaacacgaaggagggcuccaacaucugccugacccgcaccgaccgggggugguacugcgacaacgcgggcuccgugagcuucuucccccaggccgagaccugcaagguccaguccaaccgcguguucugcgacacgaugaacagccggacccuccccuccgaggucaaccugugcaacguggacaucuucaacccgaaguacgacugcaagaucaugaccagcaagaccgacguguccagcuccgucaucacgagccugggcgccaucguguccugcuacgggaagaccaagugcaccgccagcaacaagaaccggggcaucaucaagaccuucuccaacgggugcgacuacgugagcaacaagggcgucgacacggugagcgugggcaacacccucuacuacgucaacaagcaggaggggaagucccuguacgugaagggcgagcccaucaucaacuucuacgacccccugguguuccccagcgacgaguucgacgccuccaucagccaggucaacgagaagaucaaccagucccucgcguucauccgcaagagcgacgagcugcugcacaacgugaacgccgggaaguccaccaccaacaucaugaucaccacgaucaucaucgugaucaucgucauccuccugagccugaucgccgugggccuccugcuguacugcaaggcccggugaggacuaguguccaccugucccuccugggcugcuggauugucucguuuuccugccaaauaaacaggaucagcgcuuuacagaucuaaaaaaaaaaaaaaaaaaaaaaaaaaaaaaaaaaaaaaaaaaaaaaaaaaaaaaaaaaaaaaaaugcaucccccccccccccccccccccccccccccccaaaggcucuuuucagagccaccagaauu

SEQ ID NO: 4414 - RNA, 1880 nt, Artificial Sequence
  mRNA product Design e-4 comprising derived and/or modified sequence from HRSV(A2)__F-del_DSCav1_mut0 (opt2)
gggagacuccugucgggcggaaguaggaggaguagaguuuaaaaacaguacucuuuuuccgguucgggacguaguugaagcaacgacaagccggauaaccgcucuugagacaggaagcuuaccauggagcuccucauccucaaggccaacgccaucaccaccauccucaccgccgucaccuucugcuucgccuccggccagaacaucaccgaggaguucuaccaguccaccugcuccgccgucuccaagggcuaccucuccgcccuccgcaccggcugguacaccuccgucaucaccaucgagcucuccaacaucaaggagaacaagugcaacggcaccgacgccaaggucaagcucaucaagcaggagcucgacaaguacaagaacgccgucaccgagcuccagcuccucaugcaguccacccccgccaccggcuccggcuccgccaucgccuccggcgucgccgucugcaagguccuccaccucgagggcgaggucaacaagaucaaguccgcccuccucuccaccaacaaggccgucgucucccucuccaacggcgucuccguccucaccuucaagguccucgaccucaagaacuacaucgacaagcagcuccuccccauccucaacaagcaguccugcuccaucuccaacaucgagaccgucaucgaguuccagcagaagaacaaccgccuccucgagaucacccgcgaguucuccgucaacgccggcgucaccacccccgucuccaccuacaugcucaccaacuccgagcuccucucccucaucaacgacaugcccaucaccaacgaccagaagaagcucauguccaacaacguccagaucguccgccagcaguccuacuccaucaugugcaucaucaaggaggagguccucgccuacgucguccagcucccccucuacggcgucaucgacacccccugcuggaagcuccacaccuccccccucugcaccaccaacaccaaggagggcuccaacaucugccucacccgcaccgaccgcggcugguacugcgacaacgccggcuccgucuccuucuucccccaggccgagaccugcaagguccaguccaaccgcgucuucugcgacaccaugaacucccgcacccuccccuccgaggucaaccucugcaacgucgacaucuucaaccccaaguacgacugcaagaucaugaccuccaagaccgacgucuccuccuccgucaucaccucccucggcgccaucgucuccugcuacggcaagaccaagugcaccgccuccaacaagaaccgcggcaucaucaagaccuucuccaacggcugcgacuacgucuccaacaagggcgucgacaccgucuccgucggcaacacccucuacuacgucaacaagcaggagggcaagucccucuacgucaagggcgagcccaucaucaacuucuacgacccccucgucuuccccuccgacgaguucgacgccuccaucucccaggucaacgagaagaucaaccagucccucgccuucauccgcaaguccgacgagcuccuccacaacgucaacgccggcaaguccaccaccaacaucaugaucaccaccaucaucaucgucaucaucgucauccuccucucccucaucgccgucggccuccuccucuacugcaaggcccgcugaggacuaguguccaccugucccuccugggcugcuggauugucucguuuuccugccaaauaaacaggaucagcgcuuuacagaucuaaaaaaaaaaaaaaaaaaaaaaaaaaaaaaaaaaaaaaaaaaaaaaaaaaaaaaaaaaaaaaaaugcaucccccccccccccccccccccccccccccccaaaggcucuuuucagagccaccagaauu

SEQ ID NO: 4415 - RNA, 1880 nt, Artificial Sequence
  mRNA product Design e-4 comprising derived and/or modified sequence from HRSV(A2)__F-del_DSCav1_mut0 (opt3)
gggagacuccugucgggcggaaguaggaggaguagaguuuaaaaacaguacucuuuuuccgguucgggacguaguugaagcaacgacaagccggauaaccgcucuugagacaggaagcuuaccauggagcugcucauccuuaaggccaacgcuauuaccacaauacugacugcagugacguucugcuuugccagcggccagaauaucaccgaagaguucuaccaauccacauguucugcggucucaaaaggguauuugagugcuuuaagaacuggaugguacaccagcguuauuacaaucgaacuguccaacauuaaggagaauaaaugcaacgguaccgacgccaaggugaaacuaaucaagcaggaacucgauaaguauaaaaaugcaguaacugagcugcagcuucugaugcagucuacacccgccaccggcucggggucagcuauagcaagcggaguggccgucuguaagguguugcaccucgagggcgaaguuaacaaaaucaagagugcucugcuguccacgaauaaagccguggucucucucagcaacgguguguccguauuaacuuuuaagguucuggaccuuaagaauuacauugauaaacaauugcugccuauccuaaacaagcagucaugcaguauuagcaauaucgagaccgugauagaguuccagcagaaaaacaauaggcuccuggaaauuacacgggaguuuucugucaacgcgggggugacuaccccaguguccacauauaugcuuaccaauucagaacuguugagccucaucaacgacaugccgauuacgaacgaucaaaagaaacugaugaguaauaacguccagaucguucgccagcagucuuacuccaucauguguauuauaaaggaggaaguguuagcauauguagugcaacugccccucuacggagucaucgacacuccuugcuggaaacuucauacaagcccacuguguaccacuaauacaaaggagggcucgaacauuugcuugacccgaacggaucguggcugguacugugacaaugccgggucuguguccuucuuuccccaggcugaaaccugcaagguucagucaaacagaguguucugugauacaaugaauaguagaacucugccuagcgaggucaaccucugcaauguggacaucuuuaacccaaaauaugauugcaagauaaugaccuccaaaacagacguaucuagcucaguuauuaccagucugggagccaucguguccuguuacgguaagacuaaaugcacagcaagcaauaagaacaggggcaucauuaagaccuucucuaaugggugugauuaugucucaaacaaaggaguggacacugucagugugggcaauacgcuuuacuauguuaacaagcaagaggguaaaagccuguacgugaagggggaacccaucauuaacuuuuaugacccuuugguauucccauccgaugaguuugacgcuucuauaucgcaggucaaugagaaaaucaaccagagccucgccuucauucggaaguccgaugaacuguuacacaaugugaacgcgggaaagucaacaaccaauaucaugaucacuaccauuauaaucguuauuaucgugauucugcuaagucucaucgccgucggccugcuuuuguacugcaaagcacgcugaggacuaguguccaccugucccuccugggcugcuggauugucucguuuuccugccaaauaaacaggaucagcgcuuuacagaucuaaaaaaaaaaaaaaaaaaaaaaaaaaaaaaaaaaaaaaaaaaaaaaaaaaaaaaaaaaaaaaaaugcaucccccccccccccccccccccccccccccccaaaggcucuuuucagagccaccagaauu

SEQ ID NO: 4416 - RNA, 1880 nt, Artificial Sequence
  mRNA product Design e-4 comprising derived and/or modified sequence from HRSV(A2)__F-del_DSCav1_mut0 (opt4)
gggagacuccugucgggcggaaguaggaggaguagaguuuaaaaacaguacucuuuuuccgguucgggacguaguugaagcaacgacaagccggauaaccgcucuugagacaggaagcuuaccauggagcugcugauccugaaggccaacgccaucaccaccauccugaccgccgugaccuucugcuucgccagcggccagaacaucaccgaggaguucuaccagagcaccugcagcgccgugagcaagggcuaccugagcgcccugagaaccggcugguacaccagcgugaucaccaucgagcugagcaacaucaaggagaacaagugcaacggcaccgacgccaaggugaagcugaucaagcaggagcuggacaaguacaagaacgccgugaccgagcugcagcugcugaugcagagcacccccgccaccggcagcggcagcgccaucgccagcggcguggccgugugcaaggugcugcaccuggagggcgaggugaacaagaucaagagcgcccugcugagcaccaacaaggccguggugagccugagcaacggcgugagcgugcugaccuucaaggugcuggaccugaagaacuacaucgacaagcagcugcugcccauccugaacaagcagagcugcagcaucagcaacaucgagaccgugaucgaguuccagcagaagaacaacagacugcuggagaucaccagagaguucagcgugaacgccggcgugaccacccccgugagcaccuacaugcugaccaacagcgagcugcugagccugaucaacgacaugcccaucaccaacgaccagaagaagcugaugagcaacaacgugcagaucgugagacagcagagcuacagcaucaugugcaucaucaaggaggaggugcuggccuacguggugcagcugccccuguacggcgugaucgacacccccugcuggaagcugcacaccagcccccugugcaccaccaacaccaaggagggcagcaacaucugccugaccagaaccgacagaggcugguacugcgacaacgccggcagcgugagcuucuucccccaggccgagaccugcaaggugcagagcaacagaguguucugcgacaccaugaacagcagaacccugcccagcgaggugaaccugugcaacguggacaucuucaaccccaaguacgacugcaagaucaugaccagcaagaccgacgugagcagcagcgugaucaccagccugggcgccaucgugagcugcuacggcaagaccaagugcaccgccagcaacaagaacagaggcaucaucaagaccuucagcaacggcugcgacuacgugagcaacaagggcguggacaccgugagcgugggcaacacccuguacuacgugaacaagcaggagggcaagagccuguacgugaagggcgagcccaucaucaacuucuacgacccccugguguuccccagcgacgaguucgacgccagcaucagccaggugaacgagaagaucaaccagagccuggccuucaucagaaagagcgacgagcugcugcacaacgugaacgccggcaagagcaccaccaacaucaugaucaccaccaucaucaucgugaucaucgugauccugcugagccugaucgccgugggccugcugcuguacugcaaggccagaugaggacuaguguccaccugucccuccugggcugcuggauugucucguuuuccugccaaauaaacaggaucagcgcuuuacagaucuaaaaaaaaaaaaaaaaaaaaaaaaaaaaaaaaaaaaaaaaaaaaaaaaaaaaaaaaaaaaaaaaugcaucccccccccccccccccccccccccccccccaaaggcucuuuucagagccaccagaauu

SEQ ID NO: 4417 - RNA, 1880 nt, Artificial Sequence
  mRNA product Design e-4 comprising derived and/or modified sequence from HRSV(A2)__F-del_DSCav1_mut0 (opt5)
gggagacuccugucgggcggaaguaggaggaguagaguuuaaaaacaguacucuuuuuccgguucgggacguaguugaagcaacgacaagccggauaaccgcucuugagacaggaagcuuaccauggagcugcucauccugaaggccaacgcuauuaccacaauccuuacggccgugaccuucugcuuugcgagcggccagaauauuacagaagaguucuaccaauccaccuguucugcugucagcaaaggguaucuguccgcccucagaacaggaugguacaccucuguuaucacaauugaacugagcaacaucaaggagaauaaaugcaacggcaccgacgccaaggugaaacuuaucaagcaggaacuggauaaguauaaaaaugcugugacggagcuccagcugcugaugcaguccacccccgccacagggucuggaagcgcuauugccuccggcgucgcgguguguaagguucuccaccuggagggggaagugaacaaaaucaagagcgcccuucugucuaccaauaaagcugucgugucccucagcaacggaguuucugugcugacauuuaagguccuugaccugaagaauuacauugauaaacaacuccugccuauccugaacaagcaguccugcagcauuucuaauaucgagaccgugauugaguuccagcagaaaaacaaucggcuccuggaaaucacgcgcgaguuuuccgugaacgccggcgucacaaccccgguuagcacauauaugcuuaccaauuccgaacugcucucucugaucaacgacaugcccauuaccaacgaucaaaagaaacuuaugagcaauaacgugcagaucgugagacagcaguccuacagcauuauguguaucauuaaggaggaaguccuggcuuaugugguucaacucccucuguacggcgugaucgacacacccugcuggaaacugcauacgucuccucucuguaccacaaauaccaaggagggguccaacaucugccugacacggaccgaucgcggaugguacugugacaaugccggcagcgucucuuucuuuccccaggcggaaacgugcaaggugcagagcaacagaguuuucugugauacaaugaacuccagaacccugccuucugaggugaaucucugcaaugucgacauuuuuaacccgaaauaugauugcaagaucaugaccagcaaaacagacguguccagcucugucauuaccucccugggggccaucgugagcuguuacggaaagacaaaaugcacggcuucuaauaagaaccggggcauuaucaagaccuucuccaaugggugugauuauguuagcaacaaaggaguggacacagucuccgugggcaauacccuuuacuauguuaacaagcaagagggcaaaucucuguacgugaagggggaacccaucauuaacuuuuaugacccucucgucuuccccagcgaugaguuugacgccuccaucucucaggugaaugagaaaauuaaccagagccuggcuuucauccgcaaguccgaugaacugcuccacaaugugaacgccggaaagagcacaaccaauauuaugaucacgaccauuaucaucguuauuaucgucauucugcuuucucugaucgccgugggccuccugcuguacugcaaagcuagaugaggacuaguguccaccugucccuccugggcugcuggauugucucguuuuccugccaaauaaacaggaucagcgcuuuacagaucuaaaaaaaaaaaaaaaaaaaaaaaaaaaaaaaaaaaaaaaaaaaaaaaaaaaaaaaaaaaaaaaaugcaucccccccccccccccccccccccccccccccaaaggcucuuuucagagccaccagaauu

SEQ ID NO: 4418 - RNA, 1880 nt, Artificial Sequence
  mRNA product Design e-4 comprising derived and/or modified sequence from HRSV(A2)__F-del_DSCav1_mut0 (opt6)
gggagacuccugucgggcggaaguaggaggaguagaguuuaaaaacaguacucuuuuuccgguucgggacguaguugaagcaacgacaagccggauaaccgcucuugagacaggaagcuuaccauggaauuacucauccucaaagcaaacgcaauaacaacaauacuaacagcagucacuuucugcuucgcauccggacaaaauaucacagaagaauuuuaccaauccaccugcucugcugucuccaaaggauaccuaucugcccucagaaccgguugguauacaucugucauaaccauagaacuaucaaacauuaaagaaaacaaauguaacggaacagacgcaaaagucaaacuuauaaaacaagaauuagacaaauacaaaaacgcagucacagaauuacaacuacuaaugcaaucaaccccagcaaccggaucaggauccgcaauagcuucaggaguagcaguauguaaaguucuacacuuagaaggagaagucaacaaaauuaaauccgcacuauuaucaaccaacaaagcagucguaucuuuaucaaacggaguaucuguacuuacauucaaaguacuagaccuaaaaaauuacauugauaaacaauuacuaccaauacuaaacaaacaaucauguuccaucucuaacauagaaacaguaauagaauuucaacaaaaaaauaacagauuacuugaaaucacccgagaauuuucaguaaacgcaggaguaaccacacccguaucuacauacaugcuaacaaacucugaacuucugagccuaauaaaugacaugccaauaaccaacgaccaaaaaaaacuaauguccaacaacguacaaauaguacgacaacaaucuuacucaaucaugugcauaaucaaagaagaaguacuagcuuauguaguccaacuuccacucuacggaguaauagacacccccugcuggaaacuacacacaucaccacuaugcacaacaaacacaaaagaaggcucaaacauaugccuaacaagaacugacagaggaugguauugugacaaugcaggcucugucucauucuuuccacaagccgaaacaugcaaaguucaaucaaaccgaguuuucugugacacaaugaacucuagaacucucccaucagaagucaacuuaugcaacguugacauauucaacccaaaauaugacuguaaaauaaugacuuccaaaacugauguaucauccuccgucauaacaucccuaggagcuauuguaucauguuacgggaaaaccaaaugcacagccucaaacaaaaaccgcgguaucauaaaaacauuuucaaacggaugugauuacguaagcaauaaaggaguagacaccguaucaguaggaaauacacuauacuauguaaauaaacaagaaggaaaaucacuauaugucaaaggagaaccaaucauaaauuucuaugacccacuuguauucccauccgaugaauuugacgcaagcauuucacaggucaacgaaaaaauaaaccaaucacuagccuucaucagaaaaucagacgaacuacuacauaacguaaacgccggaaaaucaacaaccaacauaaugauaacaacaaucauaauaguuaucauaguaauacuacuaucucuaauagcugucggacucuuacuauauugcaaagcccgauaaggacuaguguccaccugucccuccugggcugcuggauugucucguuuuccugccaaauaaacaggaucagcgcuuuacagaucuaaaaaaaaaaaaaaaaaaaaaaaaaaaaaaaaaaaaaaaaaaaaaaaaaaaaaaaaaaaaaaaaugcaucccccccccccccccccccccccccccccccaaaggcucuuuucagagccaccagaauu

SEQ ID NO: 4419 - RNA, 1880 nt, Artificial Sequence
  mRNA product Design e-4 comprising derived and/or modified sequence from HRSV(A2)__F-del_DSCav1_mut0 (opt11)
gggagacuccugucgggcggaaguaggaggaguagaguuuaaaaacaguacucuuuuuccgguucgggacguaguugaagcaacgacaagccggauaaccgcucuugagacaggaagcuuaccauggaacuacuaauccugaaagccaacgccauaaccacaauccuuaccgcagucaccuucugcuucgccuccggucaaaacaucacagaagaguucuaccaauccaccuguuccgcagucagcaaaggcuaccucuccgcacuccgaaccggaugguacaccagcgucaucaccaucgaacuauccaacauaaaggaaaauaagugcaaugguacagaugccaaggucaaacucauaaagcaagaacucgacaaauacaaaaacgccgucaccgaacuacaacuacuaaugcaaucuacccccgcaacaggcucagguuccgccauagccuccggcgucgccguuugcaaaguccuccaccucgaaggcgaaguaaacaaaaucaaauccgcccuacucucaaccaacaaagcagucgucucccucucaaacggagucucgguccucaccuucaaaguccucgaccucaaaaacuauauagacaaacaacuccuacccauacucaacaaacaguccugcagcauauccaacaucgaaaccgugaucgaguuccaacagaaaaacaacagacuccucgaaaucacucgagaguucuccguaaacgccggcgucacaaccccagucucaacauacaugcucaccaacagcgaacuccuaucacuaaucaacgacaugccuaucacaaaugaucagaagaaacuaaugagcaacaacguccaaaucguccgccaacaaucauacuccaucaugugcaucauaaaagaagaaguccuagccuacgugguccagcuaccccucuacggcguaauugacaccccuugcuggaaacuacacacuucaccccucugcacaaccaacaccaaagaagguucaaacaucugccucacacgaacagaccgcggcugguacugcgacaacgccggauccguauccuucuucccccaagcagaaaccugcaaaguucaauccaaccggguauucugcgacaccaugaacucaagaacccuucccuccgaaguaaaucuaugcaacgucgacauauucaacccaaaauacgacugcaaaaucaugaccuccaaaaccgaugucuccagcagcgucaucaccagccucggcgccaucgucuccugcuacggcaaaacaaaauguacagcauccaacaaaaaccgaggcauaaucaaaaccuucuccaacgggugcgauuacgucagcaacaaaggcgucgacaccgucuccgugggcaacacccuauacuacgucaacaaacaagaaggcaaaucacuguacguaaagggcgaacccaucaucaacuucuaugacccucugguguucccauccgaugaauuugacgcauccauaucucaggucaacgaaaagaucaaccaaucccucgccuucauacgcaaauccgacgaacuccuacacaacgucaacgcugguaaaagcaccaccaacaucaugaucaccacaaucaucaucgucauaaucguuauccuacucucccuuauagcagucggacuccuccucuacugcaaagcccgcuaaggacuaguguccaccugucccuccugggcugcuggauugucucguuuuccugccaaauaaacaggaucagcgcuuuacagaucuaaaaaaaaaaaaaaaaaaaaaaaaaaaaaaaaaaaaaaaaaaaaaaaaaaaaaaaaaaaaaaaaugcaucccccccccccccccccccccccccccccccaaaggcucuuuucagagccaccagaauu

SEQ ID NO: 4420 - RNA, 1847 nt, Artificial Sequence
  mRNA product Design e-5 comprising derived and/or modified sequence from HRSV(A2)__F-del_DSCav1_mut0 (opt1)
gggagagcggcucggccauuuugucccagucaguccggaggcugcggcugcagaaguaccgccugcggaguaacugcaaagaagcuuaccauggagcugcucauccugaaggccaacgccaucaccaccauccugacggcggugaccuucugcuucgccagcggccagaacaucaccgaggaguucuaccaguccacgugcagcgccgucuccaagggguaccucagcgcccugcggaccggcugguacaccuccgugaucaccaucgagcugagcaacaucaaggagaacaagugcaacgggaccgacgccaaggugaagcucaucaagcaggagcuggacaaguacaagaacgcggucacggagcugcagcuccugaugcaguccaccccggcaaccggcuccggcuccgccaucgcgagcggcgucgccgugugcaaggugcugcaccucgagggggaggucaacaagaucaagagcgcccugcuguccaccaacaaggccguggugagccucuccaacggcgucagcgugcugaccuucaaggugcuggaccucaagaacuacaucgacaagcagcugcugcccauccugaacaagcagagcugcuccaucagcaacaucgagacggugaucgaguuccagcagaagaacaaccggcuccuggagaucacccgcgaguucagcgugaacgccggggucaccacccccguguccacguacaugcugaccaacagcgagcuccugucccugaucaacgacaugccgaucaccaacgaccagaagaagcucaugagcaacaacgugcagaucguccggcagcaguccuacagcaucaugugcaucaucaaggaggaggugcuggcguacgugguccagcugccccucuacggcgugaucgacacccccugcuggaagcugcacacgagcccccugugcaccaccaacaccaaggagggguccaacaucugccucacgcgcaccgaccggggcugguacugcgacaacgccggcagcgucuccuucuucccgcaggccgagaccugcaaggugcagagcaaccgcguguucugcgacaccaugaacucccggacgcugcccagcgagguaaaccucugcaacgucgacaucuucaaccccaaguacgacugcaagaucaugaccuccaagaccgacgugagcuccagcgugaucaccucccugggggccaucgucagcugcuacggcaagacgaagugcaccgccagcaacaagaaccgggggaucaucaagaccuucuccaacggcugcgacuacgugagcaacaagggcguggacaccguguccgucgggaacacccuguacuacgugaacaagcaggagggcaagagccucuacgugaagggggagcccaucaucaacuucuacgacccgcuggucuuccccuccgacgaguucgacgcgagcaucucccaggugaacgagaagaucaaccagagccuggccuucauccgcaaguccgacgagcugcuccacaacgugaacgccggcaagagcacgaccaacaucaugaucaccaccaucaucaucgucaucaucgugauccugcugucccucaucgccguggggcugcugcucuacugcaaggcccggugaggacuaguguccaccugucccuccugggcugcuggauugucucguuuuccugccaaauaaacaggaucagcgcuuuacagaucuaaaaaaaaaaaaaaaaaaaaaaaaaaaaaaaaaaaaaaaaaaaaaaaaaaaaaaaaaaaaaaaaugcaucccccccccccccccccccccccccccccccaaaggcucuuuucagagccaccagaauu

SEQ ID NO: 4421 - RNA, 1847 nt, Artificial Sequence
  mRNA product Design e-5 comprising derived and/or modified sequence from HRSV(A2)__F-del_DSCav1_mut0 (opt1)
gggagagcggcucggccauuuugucccagucaguccggaggcugcggcugcagaaguaccgccugcggaguaacugcaaagaagcuuaccauggagcugcucauccugaaggccaacgccaucaccaccauccugacggcggugaccuucugcuucgccagcggccagaacaucaccgaggaguucuaccaguccacgugcagcgccgucuccaagggguaccucagcgcccugcgcaccggcugguacaccuccgugaucaccaucgagcugagcaacaucaaggagaacaagugcaacgggaccgacgccaaggugaagcucaucaagcaggagcuggacaaguacaagaacgcggucacggagcugcagcuccugaugcaguccacccccgccaccggcagcggguccgccaucgccagcggcguggcggugugcaagguccugcaccucgagggcgaggugaacaagaucaaguccgcccugcugagcaccaacaaggccguggucucccucagcaacgggguguccgugcugacguucaagguccuggaccucaagaacuacaucgacaagcagcugcugccgauccucaacaagcagagcugcuccaucagcaacaucgagaccgugaucgaguuccagcagaagaacaaccggcugcuggagaucacccgcgaguucuccgugaacgccggcgucaccacgcccgugagcaccuacaugcucaccaacagcgagcugcugucccucaucaacgacaugcccaucaccaacgaccagaagaagcugaugagcaacaacgugcagaucguccggcagcaguccuacagcaucaugugcaucaucaaggaggaggugcuggccuacgugguccagcucccccuguacggggugaucgacacgccgugcuggaagcugcacaccagcccccucugcaccaccaacacgaaggagggcuccaacaucugccugacccgcaccgaccgggggugguacugcgacaacgcgggcuccgugagcuucuucccccaggccgagaccugcaagguccaguccaaccgcguguucugcgacacgaugaacagccggacccuccccuccgaggucaaccugugcaacguggacaucuucaacccgaaguacgacugcaagaucaugaccagcaagaccgacguguccagcuccgucaucacgagccugggcgccaucguguccugcuacgggaagaccaagugcaccgccagcaacaagaaccggggcaucaucaagaccuucuccaacgggugcgacuacgugagcaacaagggcgucgacacggugagcgugggcaacacccucuacuacgucaacaagcaggaggggaagucccuguacgugaagggcgagcccaucaucaacuucuacgacccccugguguuccccagcgacgaguucgacgccuccaucagccaggucaacgagaagaucaaccagucccucgcguucauccgcaagagcgacgagcugcugcacaacgugaacgccgggaaguccaccaccaacaucaugaucaccacgaucaucaucgugaucaucgucauccuccugagccugaucgccgugggccuccugcuguacugcaaggcccggugaggacuaguguccaccugucccuccugggcugcuggauugucucguuuuccugccaaauaaacaggaucagcgcuuuacagaucuaaaaaaaaaaaaaaaaaaaaaaaaaaaaaaaaaaaaaaaaaaaaaaaaaaaaaaaaaaaaaaaaugcaucccccccccccccccccccccccccccccccaaaggcucuuuucagagccaccagaauu

SEQ ID NO: 4422 - RNA, 1847 nt, Artificial Sequence
  mRNA product Design e-5 comprising derived and/or modified sequence from HRSV(A2)__F-del_DSCav1_mut0 (opt2)
gggagagcggcucggccauuuugucccagucaguccggaggcugcggcugcagaaguaccgccugcggaguaacugcaaagaagcuuaccauggagcuccucauccucaaggccaacgccaucaccaccauccucaccgccgucaccuucugcuucgccuccggccagaacaucaccgaggaguucuaccaguccaccugcuccgccgucuccaagggcuaccucuccgcccuccgcaccggcugguacaccuccgucaucaccaucgagcucuccaacaucaaggagaacaagugcaacggcaccgacgccaaggucaagcucaucaagcaggagcucgacaaguacaagaacgccgucaccgagcuccagcuccucaugcaguccacccccgccaccggcuccggcuccgccaucgccuccggcgucgccgucugcaagguccuccaccucgagggcgaggucaacaagaucaaguccgcccuccucuccaccaacaaggccgucgucucccucuccaacggcgucuccguccucaccuucaagguccucgaccucaagaacuacaucgacaagcagcuccuccccauccucaacaagcaguccugcuccaucuccaacaucgagaccgucaucgaguuccagcagaagaacaaccgccuccucgagaucacccgcgaguucuccgucaacgccggcgucaccacccccgucuccaccuacaugcucaccaacuccgagcuccucucccucaucaacgacaugcccaucaccaacgaccagaagaagcucauguccaacaacguccagaucguccgccagcaguccuacuccaucaugugcaucaucaaggaggagguccucgccuacgucguccagcucccccucuacggcgucaucgacacccccugcuggaagcuccacaccuccccccucugcaccaccaacaccaaggagggcuccaacaucugccucacccgcaccgaccgcggcugguacugcgacaacgccggcuccgucuccuucuucccccaggccgagaccugcaagguccaguccaaccgcgucuucugcgacaccaugaacucccgcacccuccccuccgaggucaaccucugcaacgucgacaucuucaaccccaaguacgacugcaagaucaugaccuccaagaccgacgucuccuccuccgucaucaccucccucggcgccaucgucuccugcuacggcaagaccaagugcaccgccuccaacaagaaccgcggcaucaucaagaccuucuccaacggcugcgacuacgucuccaacaagggcgucgacaccgucuccgucggcaacacccucuacuacgucaacaagcaggagggcaagucccucuacgucaagggcgagcccaucaucaacuucuacgacccccucgucuuccccuccgacgaguucgacgccuccaucucccaggucaacgagaagaucaaccagucccucgccuucauccgcaaguccgacgagcuccuccacaacgucaacgccggcaaguccaccaccaacaucaugaucaccaccaucaucaucgucaucaucgucauccuccucucccucaucgccgucggccuccuccucuacugcaaggcccgcugaggacuaguguccaccugucccuccugggcugcuggauugucucguuuuccugccaaauaaacaggaucagcgcuuuacagaucuaaaaaaaaaaaaaaaaaaaaaaaaaaaaaaaaaaaaaaaaaaaaaaaaaaaaaaaaaaaaaaaaugcaucccccccccccccccccccccccccccccccaaaggcucuuuucagagccaccagaauu

SEQ ID NO: 4423 - RNA, 1847 nt, Artificial Sequence
  mRNA product Design e-5 comprising derived and/or modified sequence from HRSV(A2)__F-del_DSCav1_mut0 (opt3)
gggagagcggcucggccauuuugucccagucaguccggaggcugcggcugcagaaguaccgccugcggaguaacugcaaagaagcuuaccauggagcugcucauccuuaaggccaacgcuauuaccacaauacugacugcagugacguucugcuuugccagcggccagaauaucaccgaagaguucuaccaauccacauguucugcggucucaaaaggguauuugagugcuuuaagaacuggaugguacaccagcguuauuacaaucgaacuguccaacauuaaggagaauaaaugcaacgguaccgacgccaaggugaaacuaaucaagcaggaacucgauaaguauaaaaaugcaguaacugagcugcagcuucugaugcagucuacacccgccaccggcucggggucagcuauagcaagcggaguggccgucuguaagguguugcaccucgagggcgaaguuaacaaaaucaagagugcucugcuguccacgaauaaagccguggucucucucagcaacgguguguccguauuaacuuuuaagguucuggaccuuaagaauuacauugauaaacaauugcugccuauccuaaacaagcagucaugcaguauuagcaauaucgagaccgugauagaguuccagcagaaaaacaauaggcuccuggaaauuacacgggaguuuucugucaacgcgggggugacuaccccaguguccacauauaugcuuaccaauucagaacuguugagccucaucaacgacaugccgauuacgaacgaucaaaagaaacugaugaguaauaacguccagaucguucgccagcagucuuacuccaucauguguauuauaaaggaggaaguguuagcauauguagugcaacugccccucuacggagucaucgacacuccuugcuggaaacuucauacaagcccacuguguaccacuaauacaaaggagggcucgaacauuugcuugacccgaacggaucguggcugguacugugacaaugccgggucuguguccuucuuuccccaggcugaaaccugcaagguucagucaaacagaguguucugugauacaaugaauaguagaacucugccuagcgaggucaaccucugcaauguggacaucuuuaacccaaaauaugauugcaagauaaugaccuccaaaacagacguaucuagcucaguuauuaccagucugggagccaucguguccuguuacgguaagacuaaaugcacagcaagcaauaagaacaggggcaucauuaagaccuucucuaaugggugugauuaugucucaaacaaaggaguggacacugucagugugggcaauacgcuuuacuauguuaacaagcaagaggguaaaagccuguacgugaagggggaacccaucauuaacuuuuaugacccuuugguauucccauccgaugaguuugacgcuucuauaucgcaggucaaugagaaaaucaaccagagccucgccuucauucggaaguccgaugaacuguuacacaaugugaacgcgggaaagucaacaaccaauaucaugaucacuaccauuauaaucguuauuaucgugauucugcuaagucucaucgccgucggccugcuuuuguacugcaaagcacgcugaggacuaguguccaccugucccuccugggcugcuggauugucucguuuuccugccaaauaaacaggaucagcgcuuuacagaucuaaaaaaaaaaaaaaaaaaaaaaaaaaaaaaaaaaaaaaaaaaaaaaaaaaaaaaaaaaaaaaaaugcaucccccccccccccccccccccccccccccccaaaggcucuuuucagagccaccagaauu

SEQ ID NO: 4424 - RNA, 1847 nt, Artificial Sequence
  mRNA product Design e-5 comprising derived and/or modified sequence from HRSV(A2)__F-del_DSCav1_mut0 (opt4)
gggagagcggcucggccauuuugucccagucaguccggaggcugcggcugcagaaguaccgccugcggaguaacugcaaagaagcuuaccauggagcugcugauccugaaggccaacgccaucaccaccauccugaccgccgugaccuucugcuucgccagcggccagaacaucaccgaggaguucuaccagagcaccugcagcgccgugagcaagggcuaccugagcgcccugagaaccggcugguacaccagcgugaucaccaucgagcugagcaacaucaaggagaacaagugcaacggcaccgacgccaaggugaagcugaucaagcaggagcuggacaaguacaagaacgccgugaccgagcugcagcugcugaugcagagcacccccgccaccggcagcggcagcgccaucgccagcggcguggccgugugcaaggugcugcaccuggagggcgaggugaacaagaucaagagcgcccugcugagcaccaacaaggccguggugagccugagcaacggcgugagcgugcugaccuucaaggugcuggaccugaagaacuacaucgacaagcagcugcugcccauccugaacaagcagagcugcagcaucagcaacaucgagaccgugaucgaguuccagcagaagaacaacagacugcuggagaucaccagagaguucagcgugaacgccggcgugaccacccccgugagcaccuacaugcugaccaacagcgagcugcugagccugaucaacgacaugcccaucaccaacgaccagaagaagcugaugagcaacaacgugcagaucgugagacagcagagcuacagcaucaugugcaucaucaaggaggaggugcuggccuacguggugcagcugccccuguacggcgugaucgacacccccugcuggaagcugcacaccagcccccugugcaccaccaacaccaaggagggcagcaacaucugccugaccagaaccgacagaggcugguacugcgacaacgccggcagcgugagcuucuucccccaggccgagaccugcaaggugcagagcaacagaguguucugcgacaccaugaacagcagaacccugcccagcgaggugaaccugugcaacguggacaucuucaaccccaaguacgacugcaagaucaugaccagcaagaccgacgugagcagcagcgugaucaccagccugggcgccaucgugagcugcuacggcaagaccaagugcaccgccagcaacaagaacagaggcaucaucaagaccuucagcaacggcugcgacuacgugagcaacaagggcguggacaccgugagcgugggcaacacccuguacuacgugaacaagcaggagggcaagagccuguacgugaagggcgagcccaucaucaacuucuacgacccccugguguuccccagcgacgaguucgacgccagcaucagccaggugaacgagaagaucaaccagagccuggccuucaucagaaagagcgacgagcugcugcacaacgugaacgccggcaagagcaccaccaacaucaugaucaccaccaucaucaucgugaucaucgugauccugcugagccugaucgccgugggccugcugcuguacugcaaggccagaugaggacuaguguccaccugucccuccugggcugcuggauugucucguuuuccugccaaauaaacaggaucagcgcuuuacagaucuaaaaaaaaaaaaaaaaaaaaaaaaaaaaaaaaaaaaaaaaaaaaaaaaaaaaaaaaaaaaaaaaugcaucccccccccccccccccccccccccccccccaaaggcucuuuucagagccaccagaauu

SEQ ID NO: 4425 - RNA, 1847 nt, Artificial Sequence
  mRNA product Design e-5 comprising derived and/or modified sequence from HRSV(A2)__F-del_DSCav1_mut0 (opt5)
gggagagcggcucggccauuuugucccagucaguccggaggcugcggcugcagaaguaccgccugcggaguaacugcaaagaagcuuaccauggagcugcucauccugaaggccaacgcuauuaccacaauccuuacggccgugaccuucugcuuugcgagcggccagaauauuacagaagaguucuaccaauccaccuguucugcugucagcaaaggguaucuguccgcccucagaacaggaugguacaccucuguuaucacaauugaacugagcaacaucaaggagaauaaaugcaacggcaccgacgccaaggugaaacuuaucaagcaggaacuggauaaguauaaaaaugcugugacggagcuccagcugcugaugcaguccacccccgccacagggucuggaagcgcuauugccuccggcgucgcgguguguaagguucuccaccuggagggggaagugaacaaaaucaagagcgcccuucugucuaccaauaaagcugucgugucccucagcaacggaguuucugugcugacauuuaagguccuugaccugaagaauuacauugauaaacaacuccugccuauccugaacaagcaguccugcagcauuucuaauaucgagaccgugauugaguuccagcagaaaaacaaucggcuccuggaaaucacgcgcgaguuuuccgugaacgccggcgucacaaccccgguuagcacauauaugcuuaccaauuccgaacugcucucucugaucaacgacaugcccauuaccaacgaucaaaagaaacuuaugagcaauaacgugcagaucgugagacagcaguccuacagcauuauguguaucauuaaggaggaaguccuggcuuaugugguucaacucccucuguacggcgugaucgacacacccugcuggaaacugcauacgucuccucucuguaccacaaauaccaaggagggguccaacaucugccugacacggaccgaucgcggaugguacugugacaaugccggcagcgucucuuucuuuccccaggcggaaacgugcaaggugcagagcaacagaguuuucugugauacaaugaacuccagaacccugccuucugaggugaaucucugcaaugucgacauuuuuaacccgaaauaugauugcaagaucaugaccagcaaaacagacguguccagcucugucauuaccucccugggggccaucgugagcuguuacggaaagacaaaaugcacggcuucuaauaagaaccggggcauuaucaagaccuucuccaaugggugugauuauguuagcaacaaaggaguggacacagucuccgugggcaauacccuuuacuauguuaacaagcaagagggcaaaucucuguacgugaagggggaacccaucauuaacuuuuaugacccucucgucuuccccagcgaugaguuugacgccuccaucucucaggugaaugagaaaauuaaccagagccuggcuuucauccgcaaguccgaugaacugcuccacaaugugaacgccggaaagagcacaaccaauauuaugaucacgaccauuaucaucguuauuaucgucauucugcuuucucugaucgccgugggccuccugcuguacugcaaagcuagaugaggacuaguguccaccugucccuccugggcugcuggauugucucguuuuccugccaaauaaacaggaucagcgcuuuacagaucuaaaaaaaaaaaaaaaaaaaaaaaaaaaaaaaaaaaaaaaaaaaaaaaaaaaaaaaaaaaaaaaaugcaucccccccccccccccccccccccccccccccaaaggcucuuuucagagccaccagaauu

SEQ ID NO: 4426 - RNA, 1847 nt, Artificial Sequence
  mRNA product Design e-5 comprising derived and/or modified sequence from HRSV(A2)__F-del_DSCav1_mut0 (opt6)
gggagagcggcucggccauuuugucccagucaguccggaggcugcggcugcagaaguaccgccugcggaguaacugcaaagaagcuuaccauggaauuacucauccucaaagcaaacgcaauaacaacaauacuaacagcagucacuuucugcuucgcauccggacaaaauaucacagaagaauuuuaccaauccaccugcucugcugucuccaaaggauaccuaucugcccucagaaccgguugguauacaucugucauaaccauagaacuaucaaacauuaaagaaaacaaauguaacggaacagacgcaaaagucaaacuuauaaaacaagaauuagacaaauacaaaaacgcagucacagaauuacaacuacuaaugcaaucaaccccagcaaccggaucaggauccgcaauagcuucaggaguagcaguauguaaaguucuacacuuagaaggagaagucaacaaaauuaaauccgcacuauuaucaaccaacaaagcagucguaucuuuaucaaacggaguaucuguacuuacauucaaaguacuagaccuaaaaaauuacauugauaaacaauuacuaccaauacuaaacaaacaaucauguuccaucucuaacauagaaacaguaauagaauuucaacaaaaaaauaacagauuacuugaaaucacccgagaauuuucaguaaacgcaggaguaaccacacccguaucuacauacaugcuaacaaacucugaacuucugagccuaauaaaugacaugccaauaaccaacgaccaaaaaaaacuaauguccaacaacguacaaauaguacgacaacaaucuuacucaaucaugugcauaaucaaagaagaaguacuagcuuauguaguccaacuuccacucuacggaguaauagacacccccugcuggaaacuacacacaucaccacuaugcacaacaaacacaaaagaaggcucaaacauaugccuaacaagaacugacagaggaugguauugugacaaugcaggcucugucucauucuuuccacaagccgaaacaugcaaaguucaaucaaaccgaguuuucugugacacaaugaacucuagaacucucccaucagaagucaacuuaugcaacguugacauauucaacccaaaauaugacuguaaaauaaugacuuccaaaacugauguaucauccuccgucauaacaucccuaggagcuauuguaucauguuacgggaaaaccaaaugcacagccucaaacaaaaaccgcgguaucauaaaaacauuuucaaacggaugugauuacguaagcaauaaaggaguagacaccguaucaguaggaaauacacuauacuauguaaauaaacaagaaggaaaaucacuauaugucaaaggagaaccaaucauaaauuucuaugacccacuuguauucccauccgaugaauuugacgcaagcauuucacaggucaacgaaaaaauaaaccaaucacuagccuucaucagaaaaucagacgaacuacuacauaacguaaacgccggaaaaucaacaaccaacauaaugauaacaacaaucauaauaguuaucauaguaauacuacuaucucuaauagcugucggacucuuacuauauugcaaagcccgauaaggacuaguguccaccugucccuccugggcugcuggauugucucguuuuccugccaaauaaacaggaucagcgcuuuacagaucuaaaaaaaaaaaaaaaaaaaaaaaaaaaaaaaaaaaaaaaaaaaaaaaaaaaaaaaaaaaaaaaaugcaucccccccccccccccccccccccccccccccaaaggcucuuuucagagccaccagaauu

SEQ ID NO: 4427 - RNA, 1847 nt, Artificial Sequence
  mRNA product Design e-5 comprising derived and/or modified sequence from HRSV(A2)__F-del_DSCav1_mut0 (opt11)
gggagagcggcucggccauuuugucccagucaguccggaggcugcggcugcagaaguaccgccugcggaguaacugcaaagaagcuuaccauggaacuacuaauccugaaagccaacgccauaaccacaauccuuaccgcagucaccuucugcuucgccuccggucaaaacaucacagaagaguucuaccaauccaccuguuccgcagucagcaaaggcuaccucuccgcacuccgaaccggaugguacaccagcgucaucaccaucgaacuauccaacauaaaggaaaauaagugcaaugguacagaugccaaggucaaacucauaaagcaagaacucgacaaauacaaaaacgccgucaccgaacuacaacuacuaaugcaaucuacccccgcaacaggcucagguuccgccauagccuccggcgucgccguuugcaaaguccuccaccucgaaggcgaaguaaacaaaaucaaauccgcccuacucucaaccaacaaagcagucgucucccucucaaacggagucucgguccucaccuucaaaguccucgaccucaaaaacuauauagacaaacaacuccuacccauacucaacaaacaguccugcagcauauccaacaucgaaaccgugaucgaguuccaacagaaaaacaacagacuccucgaaaucacucgagaguucuccguaaacgccggcgucacaaccccagucucaacauacaugcucaccaacagcgaacuccuaucacuaaucaacgacaugccuaucacaaaugaucagaagaaacuaaugagcaacaacguccaaaucguccgccaacaaucauacuccaucaugugcaucauaaaagaagaaguccuagccuacgugguccagcuaccccucuacggcguaauugacaccccuugcuggaaacuacacacuucaccccucugcacaaccaacaccaaagaagguucaaacaucugccucacacgaacagaccgcggcugguacugcgacaacgccggauccguauccuucuucccccaagcagaaaccugcaaaguucaauccaaccggguauucugcgacaccaugaacucaagaacccuucccuccgaaguaaaucuaugcaacgucgacauauucaacccaaaauacgacugcaaaaucaugaccuccaaaaccgaugucuccagcagcgucaucaccagccucggcgccaucgucuccugcuacggcaaaacaaaauguacagcauccaacaaaaaccgaggcauaaucaaaaccuucuccaacgggugcgauuacgucagcaacaaaggcgucgacaccgucuccgugggcaacacccuauacuacgucaacaaacaagaaggcaaaucacuguacguaaagggcgaacccaucaucaacuucuaugacccucugguguucccauccgaugaauuugacgcauccauaucucaggucaacgaaaagaucaaccaaucccucgccuucauacgcaaauccgacgaacuccuacacaacgucaacgcugguaaaagcaccaccaacaucaugaucaccacaaucaucaucgucauaaucguuauccuacucucccuuauagcagucggacuccuccucuacugcaaagcccgcuaaggacuaguguccaccugucccuccugggcugcuggauugucucguuuuccugccaaauaaacaggaucagcgcuuuacagaucuaaaaaaaaaaaaaaaaaaaaaaaaaaaaaaaaaaaaaaaaaaaaaaaaaaaaaaaaaaaaaaaaugcaucccccccccccccccccccccccccccccccaaaggcucuuuucagagccaccagaauu

SEQ ID NO: 4428 - RNA, 1914 nt, Artificial Sequence
  mRNA product Design e-6 comprising derived and/or modified sequence from HRSV(A2)__F-del_DSCav1_mut0 (opt1)
gggagagcggcucggccauuuugucccagucaguccggaggcugcggcugcagaaguaccgccugcggaguaacugcaaagaagcuuaccauggagcugcucauccugaaggccaacgccaucaccaccauccugacggcggugaccuucugcuucgccagcggccagaacaucaccgaggaguucuaccaguccacgugcagcgccgucuccaagggguaccucagcgcccugcggaccggcugguacaccuccgugaucaccaucgagcugagcaacaucaaggagaacaagugcaacgggaccgacgccaaggugaagcucaucaagcaggagcuggacaaguacaagaacgcggucacggagcugcagcuccugaugcaguccaccccggcaaccggcuccggcuccgccaucgcgagcggcgucgccgugugcaaggugcugcaccucgagggggaggucaacaagaucaagagcgcccugcuguccaccaacaaggccguggugagccucuccaacggcgucagcgugcugaccuucaaggugcuggaccucaagaacuacaucgacaagcagcugcugcccauccugaacaagcagagcugcuccaucagcaacaucgagacggugaucgaguuccagcagaagaacaaccggcuccuggagaucacccgcgaguucagcgugaacgccggggucaccacccccguguccacguacaugcugaccaacagcgagcuccugucccugaucaacgacaugccgaucaccaacgaccagaagaagcucaugagcaacaacgugcagaucguccggcagcaguccuacagcaucaugugcaucaucaaggaggaggugcuggcguacgugguccagcugccccucuacggcgugaucgacacccccugcuggaagcugcacacgagcccccugugcaccaccaacaccaaggagggguccaacaucugccucacgcgcaccgaccggggcugguacugcgacaacgccggcagcgucuccuucuucccgcaggccgagaccugcaaggugcagagcaaccgcguguucugcgacaccaugaacucccggacgcugcccagcgagguaaaccucugcaacgucgacaucuucaaccccaaguacgacugcaagaucaugaccuccaagaccgacgugagcuccagcgugaucaccucccugggggccaucgucagcugcuacggcaagacgaagugcaccgccagcaacaagaaccgggggaucaucaagaccuucuccaacggcugcgacuacgugagcaacaagggcguggacaccguguccgucgggaacacccuguacuacgugaacaagcaggagggcaagagccucuacgugaagggggagcccaucaucaacuucuacgacccgcuggucuuccccuccgacgaguucgacgcgagcaucucccaggugaacgagaagaucaaccagagccuggccuucauccgcaaguccgacgagcugcuccacaacgugaacgccggcaagagcacgaccaacaucaugaucaccaccaucaucaucgucaucaucgugauccugcugucccucaucgccguggggcugcugcucuacugcaaggcccggugaggacuaguacuggcugcaucucccuuuccucuguccuccauccuucucccaggauggugaagggggaccugguacccagugauccccaccccaggauccuaaaucaugacuuaccugcuaauaaaaacucauuggaaaagugagaagaucuaaaaaaaaaaaaaaaaaaaaaaaaaaaaaaaaaaaaaaaaaaaaaaaaaaaaaaaaaaaaaaaaugcaucccccccccccccccccccccccccccccccaaaggcucuuuucagagccaccagaauu

SEQ ID NO: 4429 - RNA, 1914 nt, Artificial Sequence
  mRNA product Design e-6 comprising derived and/or modified sequence from HRSV(A2)__F-del_DSCav1_mut0 (opt1)
gggagagcggcucggccauuuugucccagucaguccggaggcugcggcugcagaaguaccgccugcggaguaacugcaaagaagcuuaccauggagcugcucauccugaaggccaacgccaucaccaccauccugacggcggugaccuucugcuucgccagcggccagaacaucaccgaggaguucuaccaguccacgugcagcgccgucuccaagggguaccucagcgcccugcgcaccggcugguacaccuccgugaucaccaucgagcugagcaacaucaaggagaacaagugcaacgggaccgacgccaaggugaagcucaucaagcaggagcuggacaaguacaagaacgcggucacggagcugcagcuccugaugcaguccacccccgccaccggcagcggguccgccaucgccagcggcguggcggugugcaagguccugcaccucgagggcgaggugaacaagaucaaguccgcccugcugagcaccaacaaggccguggucucccucagcaacgggguguccgugcugacguucaagguccuggaccucaagaacuacaucgacaagcagcugcugccgauccucaacaagcagagcugcuccaucagcaacaucgagaccgugaucgaguuccagcagaagaacaaccggcugcuggagaucacccgcgaguucuccgugaacgccggcgucaccacgcccgugagcaccuacaugcucaccaacagcgagcugcugucccucaucaacgacaugcccaucaccaacgaccagaagaagcugaugagcaacaacgugcagaucguccggcagcaguccuacagcaucaugugcaucaucaaggaggaggugcuggccuacgugguccagcucccccuguacggggugaucgacacgccgugcuggaagcugcacaccagcccccucugcaccaccaacacgaaggagggcuccaacaucugccugacccgcaccgaccgggggugguacugcgacaacgcgggcuccgugagcuucuucccccaggccgagaccugcaagguccaguccaaccgcguguucugcgacacgaugaacagccggacccuccccuccgaggucaaccugugcaacguggacaucuucaacccgaaguacgacugcaagaucaugaccagcaagaccgacguguccagcuccgucaucacgagccugggcgccaucguguccugcuacgggaagaccaagugcaccgccagcaacaagaaccggggcaucaucaagaccuucuccaacgggugcgacuacgugagcaacaagggcgucgacacggugagcgugggcaacacccucuacuacgucaacaagcaggaggggaagucccuguacgugaagggcgagcccaucaucaacuucuacgacccccugguguuccccagcgacgaguucgacgccuccaucagccaggucaacgagaagaucaaccagucccucgcguucauccgcaagagcgacgagcugcugcacaacgugaacgccgggaaguccaccaccaacaucaugaucaccacgaucaucaucgugaucaucgucauccuccugagccugaucgccgugggccuccugcuguacugcaaggcccggugaggacuaguacuggcugcaucucccuuuccucuguccuccauccuucucccaggauggugaagggggaccugguacccagugauccccaccccaggauccuaaaucaugacuuaccugcuaauaaaaacucauuggaaaagugagaagaucuaaaaaaaaaaaaaaaaaaaaaaaaaaaaaaaaaaaaaaaaaaaaaaaaaaaaaaaaaaaaaaaaugcaucccccccccccccccccccccccccccccccaaaggcucuuuucagagccaccagaauu

SEQ ID NO: 4430 - RNA, 1914 nt, Artificial Sequence
  mRNA product Design e-6 comprising derived and/or modified sequence from HRSV(A2)__F-del_DSCav1_mut0 (opt2)
gggagagcggcucggccauuuugucccagucaguccggaggcugcggcugcagaaguaccgccugcggaguaacugcaaagaagcuuaccauggagcuccucauccucaaggccaacgccaucaccaccauccucaccgccgucaccuucugcuucgccuccggccagaacaucaccgaggaguucuaccaguccaccugcuccgccgucuccaagggcuaccucuccgcccuccgcaccggcugguacaccuccgucaucaccaucgagcucuccaacaucaaggagaacaagugcaacggcaccgacgccaaggucaagcucaucaagcaggagcucgacaaguacaagaacgccgucaccgagcuccagcuccucaugcaguccacccccgccaccggcuccggcuccgccaucgccuccggcgucgccgucugcaagguccuccaccucgagggcgaggucaacaagaucaaguccgcccuccucuccaccaacaaggccgucgucucccucuccaacggcgucuccguccucaccuucaagguccucgaccucaagaacuacaucgacaagcagcuccuccccauccucaacaagcaguccugcuccaucuccaacaucgagaccgucaucgaguuccagcagaagaacaaccgccuccucgagaucacccgcgaguucuccgucaacgccggcgucaccacccccgucuccaccuacaugcucaccaacuccgagcuccucucccucaucaacgacaugcccaucaccaacgaccagaagaagcucauguccaacaacguccagaucguccgccagcaguccuacuccaucaugugcaucaucaaggaggagguccucgccuacgucguccagcucccccucuacggcgucaucgacacccccugcuggaagcuccacaccuccccccucugcaccaccaacaccaaggagggcuccaacaucugccucacccgcaccgaccgcggcugguacugcgacaacgccggcuccgucuccuucuucccccaggccgagaccugcaagguccaguccaaccgcgucuucugcgacaccaugaacucccgcacccuccccuccgaggucaaccucugcaacgucgacaucuucaaccccaaguacgacugcaagaucaugaccuccaagaccgacgucuccuccuccgucaucaccucccucggcgccaucgucuccugcuacggcaagaccaagugcaccgccuccaacaagaaccgcggcaucaucaagaccuucuccaacggcugcgacuacgucuccaacaagggcgucgacaccgucuccgucggcaacacccucuacuacgucaacaagcaggagggcaagucccucuacgucaagggcgagcccaucaucaacuucuacgacccccucgucuuccccuccgacgaguucgacgccuccaucucccaggucaacgagaagaucaaccagucccucgccuucauccgcaaguccgacgagcuccuccacaacgucaacgccggcaaguccaccaccaacaucaugaucaccaccaucaucaucgucaucaucgucauccuccucucccucaucgccgucggccuccuccucuacugcaaggcccgcugaggacuaguacuggcugcaucucccuuuccucuguccuccauccuucucccaggauggugaagggggaccugguacccagugauccccaccccaggauccuaaaucaugacuuaccugcuaauaaaaacucauuggaaaagugagaagaucuaaaaaaaaaaaaaaaaaaaaaaaaaaaaaaaaaaaaaaaaaaaaaaaaaaaaaaaaaaaaaaaaugcaucccccccccccccccccccccccccccccccaaaggcucuuuucagagccaccagaauu

SEQ ID NO: 4431 - RNA, 1914 nt, Artificial Sequence
  mRNA product Design e-6 comprising derived and/or modified sequence from HRSV(A2)__F-del_DSCav1_mut0 (opt3)
gggagagcggcucggccauuuugucccagucaguccggaggcugcggcugcagaaguaccgccugcggaguaacugcaaagaagcuuaccauggagcugcucauccuuaaggccaacgcuauuaccacaauacugacugcagugacguucugcuuugccagcggccagaauaucaccgaagaguucuaccaauccacauguucugcggucucaaaaggguauuugagugcuuuaagaacuggaugguacaccagcguuauuacaaucgaacuguccaacauuaaggagaauaaaugcaacgguaccgacgccaaggugaaacuaaucaagcaggaacucgauaaguauaaaaaugcaguaacugagcugcagcuucugaugcagucuacacccgccaccggcucggggucagcuauagcaagcggaguggccgucuguaagguguugcaccucgagggcgaaguuaacaaaaucaagagugcucugcuguccacgaauaaagccguggucucucucagcaacgguguguccguauuaacuuuuaagguucuggaccuuaagaauuacauugauaaacaauugcugccuauccuaaacaagcagucaugcaguauuagcaauaucgagaccgugauagaguuccagcagaaaaacaauaggcuccuggaaauuacacgggaguuuucugucaacgcgggggugacuaccccaguguccacauauaugcuuaccaauucagaacuguugagccucaucaacgacaugccgauuacgaacgaucaaaagaaacugaugaguaauaacguccagaucguucgccagcagucuuacuccaucauguguauuauaaaggaggaaguguuagcauauguagugcaacugccccucuacggagucaucgacacuccuugcuggaaacuucauacaagcccacuguguaccacuaauacaaaggagggcucgaacauuugcuugacccgaacggaucguggcugguacugugacaaugccgggucuguguccuucuuuccccaggcugaaaccugcaagguucagucaaacagaguguucugugauacaaugaauaguagaacucugccuagcgaggucaaccucugcaauguggacaucuuuaacccaaaauaugauugcaagauaaugaccuccaaaacagacguaucuagcucaguuauuaccagucugggagccaucguguccuguuacgguaagacuaaaugcacagcaagcaauaagaacaggggcaucauuaagaccuucucuaaugggugugauuaugucucaaacaaaggaguggacacugucagugugggcaauacgcuuuacuauguuaacaagcaagaggguaaaagccuguacgugaagggggaacccaucauuaacuuuuaugacccuuugguauucccauccgaugaguuugacgcuucuauaucgcaggucaaugagaaaaucaaccagagccucgccuucauucggaaguccgaugaacuguuacacaaugugaacgcgggaaagucaacaaccaauaucaugaucacuaccauuauaaucguuauuaucgugauucugcuaagucucaucgccgucggccugcuuuuguacugcaaagcacgcugaggacuaguacuggcugcaucucccuuuccucuguccuccauccuucucccaggauggugaagggggaccugguacccagugauccccaccccaggauccuaaaucaugacuuaccugcuaauaaaaacucauuggaaaagugagaagaucuaaaaaaaaaaaaaaaaaaaaaaaaaaaaaaaaaaaaaaaaaaaaaaaaaaaaaaaaaaaaaaaaugcaucccccccccccccccccccccccccccccccaaaggcucuuuucagagccaccagaauu

SEQ ID NO: 4432 - RNA, 1914 nt, Artificial Sequence
  mRNA product Design e-6 comprising derived and/or modified sequence from HRSV(A2)__F-del_DSCav1_mut0 (opt4)
gggagagcggcucggccauuuugucccagucaguccggaggcugcggcugcagaaguaccgccugcggaguaacugcaaagaagcuuaccauggagcugcugauccugaaggccaacgccaucaccaccauccugaccgccgugaccuucugcuucgccagcggccagaacaucaccgaggaguucuaccagagcaccugcagcgccgugagcaagggcuaccugagcgcccugagaaccggcugguacaccagcgugaucaccaucgagcugagcaacaucaaggagaacaagugcaacggcaccgacgccaaggugaagcugaucaagcaggagcuggacaaguacaagaacgccgugaccgagcugcagcugcugaugcagagcacccccgccaccggcagcggcagcgccaucgccagcggcguggccgugugcaaggugcugcaccuggagggcgaggugaacaagaucaagagcgcccugcugagcaccaacaaggccguggugagccugagcaacggcgugagcgugcugaccuucaaggugcuggaccugaagaacuacaucgacaagcagcugcugcccauccugaacaagcagagcugcagcaucagcaacaucgagaccgugaucgaguuccagcagaagaacaacagacugcuggagaucaccagagaguucagcgugaacgccggcgugaccacccccgugagcaccuacaugcugaccaacagcgagcugcugagccugaucaacgacaugcccaucaccaacgaccagaagaagcugaugagcaacaacgugcagaucgugagacagcagagcuacagcaucaugugcaucaucaaggaggaggugcuggccuacguggugcagcugccccuguacggcgugaucgacacccccugcuggaagcugcacaccagcccccugugcaccaccaacaccaaggagggcagcaacaucugccugaccagaaccgacagaggcugguacugcgacaacgccggcagcgugagcuucuucccccaggccgagaccugcaaggugcagagcaacagaguguucugcgacaccaugaacagcagaacccugcccagcgaggugaaccugugcaacguggacaucuucaaccccaaguacgacugcaagaucaugaccagcaagaccgacgugagcagcagcgugaucaccagccugggcgccaucgugagcugcuacggcaagaccaagugcaccgccagcaacaagaacagaggcaucaucaagaccuucagcaacggcugcgacuacgugagcaacaagggcguggacaccgugagcgugggcaacacccuguacuacgugaacaagcaggagggcaagagccuguacgugaagggcgagcccaucaucaacuucuacgacccccugguguuccccagcgacgaguucgacgccagcaucagccaggugaacgagaagaucaaccagagccuggccuucaucagaaagagcgacgagcugcugcacaacgugaacgccggcaagagcaccaccaacaucaugaucaccaccaucaucaucgugaucaucgugauccugcugagccugaucgccgugggccugcugcuguacugcaaggccagaugaggacuaguacuggcugcaucucccuuuccucuguccuccauccuucucccaggauggugaagggggaccugguacccagugauccccaccccaggauccuaaaucaugacuuaccugcuaauaaaaacucauuggaaaagugagaagaucuaaaaaaaaaaaaaaaaaaaaaaaaaaaaaaaaaaaaaaaaaaaaaaaaaaaaaaaaaaaaaaaaugcaucccccccccccccccccccccccccccccccaaaggcucuuuucagagccaccagaauu

SEQ ID NO: 4433 - RNA, 1914 nt, Artificial Sequence
  mRNA product Design e-6 comprising derived and/or modified sequence from HRSV(A2)__F-del_DSCav1_mut0 (opt5)
gggagagcggcucggccauuuugucccagucaguccggaggcugcggcugcagaaguaccgccugcggaguaacugcaaagaagcuuaccauggagcugcucauccugaaggccaacgcuauuaccacaauccuuacggccgugaccuucugcuuugcgagcggccagaauauuacagaagaguucuaccaauccaccuguucugcugucagcaaaggguaucuguccgcccucagaacaggaugguacaccucuguuaucacaauugaacugagcaacaucaaggagaauaaaugcaacggcaccgacgccaaggugaaacuuaucaagcaggaacuggauaaguauaaaaaugcugugacggagcuccagcugcugaugcaguccacccccgccacagggucuggaagcgcuauugccuccggcgucgcgguguguaagguucuccaccuggagggggaagugaacaaaaucaagagcgcccuucugucuaccaauaaagcugucgugucccucagcaacggaguuucugugcugacauuuaagguccuugaccugaagaauuacauugauaaacaacuccugccuauccugaacaagcaguccugcagcauuucuaauaucgagaccgugauugaguuccagcagaaaaacaaucggcuccuggaaaucacgcgcgaguuuuccgugaacgccggcgucacaaccccgguuagcacauauaugcuuaccaauuccgaacugcucucucugaucaacgacaugcccauuaccaacgaucaaaagaaacuuaugagcaauaacgugcagaucgugagacagcaguccuacagcauuauguguaucauuaaggaggaaguccuggcuuaugugguucaacucccucuguacggcgugaucgacacacccugcuggaaacugcauacgucuccucucuguaccacaaauaccaaggagggguccaacaucugccugacacggaccgaucgcggaugguacugugacaaugccggcagcgucucuuucuuuccccaggcggaaacgugcaaggugcagagcaacagaguuuucugugauacaaugaacuccagaacccugccuucugaggugaaucucugcaaugucgacauuuuuaacccgaaauaugauugcaagaucaugaccagcaaaacagacguguccagcucugucauuaccucccugggggccaucgugagcuguuacggaaagacaaaaugcacggcuucuaauaagaaccggggcauuaucaagaccuucuccaaugggugugauuauguuagcaacaaaggaguggacacagucuccgugggcaauacccuuuacuauguuaacaagcaagagggcaaaucucuguacgugaagggggaacccaucauuaacuuuuaugacccucucgucuuccccagcgaugaguuugacgccuccaucucucaggugaaugagaaaauuaaccagagccuggcuuucauccgcaaguccgaugaacugcuccacaaugugaacgccggaaagagcacaaccaauauuaugaucacgaccauuaucaucguuauuaucgucauucugcuuucucugaucgccgugggccuccugcuguacugcaaagcuagaugaggacuaguacuggcugcaucucccuuuccucuguccuccauccuucucccaggauggugaagggggaccugguacccagugauccccaccccaggauccuaaaucaugacuuaccugcuaauaaaaacucauuggaaaagugagaagaucuaaaaaaaaaaaaaaaaaaaaaaaaaaaaaaaaaaaaaaaaaaaaaaaaaaaaaaaaaaaaaaaaugcaucccccccccccccccccccccccccccccccaaaggcucuuuucagagccaccagaauu

SEQ ID NO: 4434 - RNA, 1914 nt, Artificial Sequence
  mRNA product Design e-6 comprising derived and/or modified sequence from HRSV(A2)__F-del_DSCav1_mut0 (opt6)
gggagagcggcucggccauuuugucccagucaguccggaggcugcggcugcagaaguaccgccugcggaguaacugcaaagaagcuuaccauggaauuacucauccucaaagcaaacgcaauaacaacaauacuaacagcagucacuuucugcuucgcauccggacaaaauaucacagaagaauuuuaccaauccaccugcucugcugucuccaaaggauaccuaucugcccucagaaccgguugguauacaucugucauaaccauagaacuaucaaacauuaaagaaaacaaauguaacggaacagacgcaaaagucaaacuuauaaaacaagaauuagacaaauacaaaaacgcagucacagaauuacaacuacuaaugcaaucaaccccagcaaccggaucaggauccgcaauagcuucaggaguagcaguauguaaaguucuacacuuagaaggagaagucaacaaaauuaaauccgcacuauuaucaaccaacaaagcagucguaucuuuaucaaacggaguaucuguacuuacauucaaaguacuagaccuaaaaaauuacauugauaaacaauuacuaccaauacuaaacaaacaaucauguuccaucucuaacauagaaacaguaauagaauuucaacaaaaaaauaacagauuacuugaaaucacccgagaauuuucaguaaacgcaggaguaaccacacccguaucuacauacaugcuaacaaacucugaacuucugagccuaauaaaugacaugccaauaaccaacgaccaaaaaaaacuaauguccaacaacguacaaauaguacgacaacaaucuuacucaaucaugugcauaaucaaagaagaaguacuagcuuauguaguccaacuuccacucuacggaguaauagacacccccugcuggaaacuacacacaucaccacuaugcacaacaaacacaaaagaaggcucaaacauaugccuaacaagaacugacagaggaugguauugugacaaugcaggcucugucucauucuuuccacaagccgaaacaugcaaaguucaaucaaaccgaguuuucugugacacaaugaacucuagaacucucccaucagaagucaacuuaugcaacguugacauauucaacccaaaauaugacuguaaaauaaugacuuccaaaacugauguaucauccuccgucauaacaucccuaggagcuauuguaucauguuacgggaaaaccaaaugcacagccucaaacaaaaaccgcgguaucauaaaaacauuuucaaacggaugugauuacguaagcaauaaaggaguagacaccguaucaguaggaaauacacuauacuauguaaauaaacaagaaggaaaaucacuauaugucaaaggagaaccaaucauaaauuucuaugacccacuuguauucccauccgaugaauuugacgcaagcauuucacaggucaacgaaaaaauaaaccaaucacuagccuucaucagaaaaucagacgaacuacuacauaacguaaacgccggaaaaucaacaaccaacauaaugauaacaacaaucauaauaguuaucauaguaauacuacuaucucuaauagcugucggacucuuacuauauugcaaagcccgauaaggacuaguacuggcugcaucucccuuuccucuguccuccauccuucucccaggauggugaagggggaccugguacccagugauccccaccccaggauccuaaaucaugacuuaccugcuaauaaaaacucauuggaaaagugagaagaucuaaaaaaaaaaaaaaaaaaaaaaaaaaaaaaaaaaaaaaaaaaaaaaaaaaaaaaaaaaaaaaaaugcaucccccccccccccccccccccccccccccccaaaggcucuuuucagagccaccagaauu

SEQ ID NO: 4435 - RNA, 1914 nt, Artificial Sequence
  mRNA product Design e-6 comprising derived and/or modified sequence from HRSV(A2)__F-del_DSCav1_mut0 (opt11)
gggagagcggcucggccauuuugucccagucaguccggaggcugcggcugcagaaguaccgccugcggaguaacugcaaagaagcuuaccauggaacuacuaauccugaaagccaacgccauaaccacaauccuuaccgcagucaccuucugcuucgccuccggucaaaacaucacagaagaguucuaccaauccaccuguuccgcagucagcaaaggcuaccucuccgcacuccgaaccggaugguacaccagcgucaucaccaucgaacuauccaacauaaaggaaaauaagugcaaugguacagaugccaaggucaaacucauaaagcaagaacucgacaaauacaaaaacgccgucaccgaacuacaacuacuaaugcaaucuacccccgcaacaggcucagguuccgccauagccuccggcgucgccguuugcaaaguccuccaccucgaaggcgaaguaaacaaaaucaaauccgcccuacucucaaccaacaaagcagucgucucccucucaaacggagucucgguccucaccuucaaaguccucgaccucaaaaacuauauagacaaacaacuccuacccauacucaacaaacaguccugcagcauauccaacaucgaaaccgugaucgaguuccaacagaaaaacaacagacuccucgaaaucacucgagaguucuccguaaacgccggcgucacaaccccagucucaacauacaugcucaccaacagcgaacuccuaucacuaaucaacgacaugccuaucacaaaugaucagaagaaacuaaugagcaacaacguccaaaucguccgccaacaaucauacuccaucaugugcaucauaaaagaagaaguccuagccuacgugguccagcuaccccucuacggcguaauugacaccccuugcuggaaacuacacacuucaccccucugcacaaccaacaccaaagaagguucaaacaucugccucacacgaacagaccgcggcugguacugcgacaacgccggauccguauccuucuucccccaagcagaaaccugcaaaguucaauccaaccggguauucugcgacaccaugaacucaagaacccuucccuccgaaguaaaucuaugcaacgucgacauauucaacccaaaauacgacugcaaaaucaugaccuccaaaaccgaugucuccagcagcgucaucaccagccucggcgccaucgucuccugcuacggcaaaacaaaauguacagcauccaacaaaaaccgaggcauaaucaaaaccuucuccaacgggugcgauuacgucagcaacaaaggcgucgacaccgucuccgugggcaacacccuauacuacgucaacaaacaagaaggcaaaucacuguacguaaagggcgaacccaucaucaacuucuaugacccucugguguucccauccgaugaauuugacgcauccauaucucaggucaacgaaaagaucaaccaaucccucgccuucauacgcaaauccgacgaacuccuacacaacgucaacgcugguaaaagcaccaccaacaucaugaucaccacaaucaucaucgucauaaucguuauccuacucucccuuauagcagucggacuccuccucuacugcaaagcccgcuaaggacuaguacuggcugcaucucccuuuccucuguccuccauccuucucccaggauggugaagggggaccugguacccagugauccccaccccaggauccuaaaucaugacuuaccugcuaauaaaaacucauuggaaaagugagaagaucuaaaaaaaaaaaaaaaaaaaaaaaaaaaaaaaaaaaaaaaaaaaaaaaaaaaaaaaaaaaaaaaaugcaucccccccccccccccccccccccccccccccaaaggcucuuuucagagccaccagaauu

SEQ ID NO: 4436 - RNA, 2130 nt, Artificial Sequence
  mRNA product Design f-1 comprising derived and/or modified sequence from HRSV(A2)__F-del_DSCav1_mut0 (opt1)
gggagagcggcucggccauuuugucccagucaguccggaggcugcggcugcagaaguaccgccugcggaguaacugcaaagaagcuuaccauggagcugcucauccugaaggccaacgccaucaccaccauccugacggcggugaccuucugcuucgccagcggccagaacaucaccgaggaguucuaccaguccacgugcagcgccgucuccaagggguaccucagcgcccugcggaccggcugguacaccuccgugaucaccaucgagcugagcaacaucaaggagaacaagugcaacgggaccgacgccaaggugaagcucaucaagcaggagcuggacaaguacaagaacgcggucacggagcugcagcuccugaugcaguccaccccggcaaccggcuccggcuccgccaucgcgagcggcgucgccgugugcaaggugcugcaccucgagggggaggucaacaagaucaagagcgcccugcuguccaccaacaaggccguggugagccucuccaacggcgucagcgugcugaccuucaaggugcuggaccucaagaacuacaucgacaagcagcugcugcccauccugaacaagcagagcugcuccaucagcaacaucgagacggugaucgaguuccagcagaagaacaaccggcuccuggagaucacccgcgaguucagcgugaacgccggggucaccacccccguguccacguacaugcugaccaacagcgagcuccugucccugaucaacgacaugccgaucaccaacgaccagaagaagcucaugagcaacaacgugcagaucguccggcagcaguccuacagcaucaugugcaucaucaaggaggaggugcuggcguacgugguccagcugccccucuacggcgugaucgacacccccugcuggaagcugcacacgagcccccugugcaccaccaacaccaaggagggguccaacaucugccucacgcgcaccgaccggggcugguacugcgacaacgccggcagcgucuccuucuucccgcaggccgagaccugcaaggugcagagcaaccgcguguucugcgacaccaugaacucccggacgcugcccagcgagguaaaccucugcaacgucgacaucuucaaccccaaguacgacugcaagaucaugaccuccaagaccgacgugagcuccagcgugaucaccucccugggggccaucgucagcugcuacggcaagacgaagugcaccgccagcaacaagaaccgggggaucaucaagaccuucuccaacggcugcgacuacgugagcaacaagggcguggacaccguguccgucgggaacacccuguacuacgugaacaagcaggagggcaagagccucuacgugaagggggagcccaucaucaacuucuacgacccgcuggucuuccccuccgacgaguucgacgcgagcaucucccaggugaacgagaagaucaaccagagccuggccuucauccgcaaguccgacgagcugcuccacaacgugaacgccggcaagagcacgaccaacaucaugaucaccaccaucaucaucgucaucaucgugauccugcugucccucaucgccguggggcugcugcucuacugcaaggcccggugaggacuagugaagggaacacccaaauuuaauucagccuuaagcacaauuaauuaagagugaaacguaauuguacaagcaguuggucacccaccauagggcaugaucaacaccgcaaccuuuccuuuuucccccagugauucugaaaaaccccucuucccuucagcuugcuuagauguuccaaauuuaguaagcuuaaggcggccuacagaagaaaaagaaaaaaaaggccacaaaaguucccucucacuuucaguaaauaaaauaaaagcagcaacagaaauaaagaaauaaaugaaauucaaaaugaaauaaauauuguguugugcagcauuaaaaaaucaauaaaaauuaaaaaugagcaagaucuaaaaaaaaaaaaaaaaaaaaaaaaaaaaaaaaaaaaaaaaaaaaaaaaaaaaaaaaaaaaaaaaugcaucccccccccccccccccccccccccccccccaaaggcucuuuucagagccaccagaauu

SEQ ID NO: 4437 - RNA, 2130 nt, Artificial Sequence
  mRNA product Design f-1 comprising derived and/or modified sequence from HRSV(A2)__F-del_DSCav1_mut0 (opt1)
gggagagcggcucggccauuuugucccagucaguccggaggcugcggcugcagaaguaccgccugcggaguaacugcaaagaagcuuaccauggagcugcucauccugaaggccaacgccaucaccaccauccugacggcggugaccuucugcuucgccagcggccagaacaucaccgaggaguucuaccaguccacgugcagcgccgucuccaagggguaccucagcgcccugcgcaccggcugguacaccuccgugaucaccaucgagcugagcaacaucaaggagaacaagugcaacgggaccgacgccaaggugaagcucaucaagcaggagcuggacaaguacaagaacgcggucacggagcugcagcuccugaugcaguccacccccgccaccggcagcggguccgccaucgccagcggcguggcggugugcaagguccugcaccucgagggcgaggugaacaagaucaaguccgcccugcugagcaccaacaaggccguggucucccucagcaacgggguguccgugcugacguucaagguccuggaccucaagaacuacaucgacaagcagcugcugccgauccucaacaagcagagcugcuccaucagcaacaucgagaccgugaucgaguuccagcagaagaacaaccggcugcuggagaucacccgcgaguucuccgugaacgccggcgucaccacgcccgugagcaccuacaugcucaccaacagcgagcugcugucccucaucaacgacaugcccaucaccaacgaccagaagaagcugaugagcaacaacgugcagaucguccggcagcaguccuacagcaucaugugcaucaucaaggaggaggugcuggccuacgugguccagcucccccuguacggggugaucgacacgccgugcuggaagcugcacaccagcccccucugcaccaccaacacgaaggagggcuccaacaucugccugacccgcaccgaccgggggugguacugcgacaacgcgggcuccgugagcuucuucccccaggccgagaccugcaagguccaguccaaccgcguguucugcgacacgaugaacagccggacccuccccuccgaggucaaccugugcaacguggacaucuucaacccgaaguacgacugcaagaucaugaccagcaagaccgacguguccagcuccgucaucacgagccugggcgccaucguguccugcuacgggaagaccaagugcaccgccagcaacaagaaccggggcaucaucaagaccuucuccaacgggugcgacuacgugagcaacaagggcgucgacacggugagcgugggcaacacccucuacuacgucaacaagcaggaggggaagucccuguacgugaagggcgagcccaucaucaacuucuacgacccccugguguuccccagcgacgaguucgacgccuccaucagccaggucaacgagaagaucaaccagucccucgcguucauccgcaagagcgacgagcugcugcacaacgugaacgccgggaaguccaccaccaacaucaugaucaccacgaucaucaucgugaucaucgucauccuccugagccugaucgccgugggccuccugcuguacugcaaggcccggugaggacuagugaagggaacacccaaauuuaauucagccuuaagcacaauuaauuaagagugaaacguaauuguacaagcaguuggucacccaccauagggcaugaucaacaccgcaaccuuuccuuuuucccccagugauucugaaaaaccccucuucccuucagcuugcuuagauguuccaaauuuaguaagcuuaaggcggccuacagaagaaaaagaaaaaaaaggccacaaaaguucccucucacuuucaguaaauaaaauaaaagcagcaacagaaauaaagaaauaaaugaaauucaaaaugaaauaaauauuguguugugcagcauuaaaaaaucaauaaaaauuaaaaaugagcaagaucuaaaaaaaaaaaaaaaaaaaaaaaaaaaaaaaaaaaaaaaaaaaaaaaaaaaaaaaaaaaaaaaaugcaucccccccccccccccccccccccccccccccaaaggcucuuuucagagccaccagaauu

SEQ ID NO: 4438 - RNA, 2130 nt, Artificial Sequence
  mRNA product Design f-1 comprising derived and/or modified sequence from HRSV(A2)__F-del_DSCav1_mut0 (opt2)
gggagagcggcucggccauuuugucccagucaguccggaggcugcggcugcagaaguaccgccugcggaguaacugcaaagaagcuuaccauggagcuccucauccucaaggccaacgccaucaccaccauccucaccgccgucaccuucugcuucgccuccggccagaacaucaccgaggaguucuaccaguccaccugcuccgccgucuccaagggcuaccucuccgcccuccgcaccggcugguacaccuccgucaucaccaucgagcucuccaacaucaaggagaacaagugcaacggcaccgacgccaaggucaagcucaucaagcaggagcucgacaaguacaagaacgccgucaccgagcuccagcuccucaugcaguccacccccgccaccggcuccggcuccgccaucgccuccggcgucgccgucugcaagguccuccaccucgagggcgaggucaacaagaucaaguccgcccuccucuccaccaacaaggccgucgucucccucuccaacggcgucuccguccucaccuucaagguccucgaccucaagaacuacaucgacaagcagcuccuccccauccucaacaagcaguccugcuccaucuccaacaucgagaccgucaucgaguuccagcagaagaacaaccgccuccucgagaucacccgcgaguucuccgucaacgccggcgucaccacccccgucuccaccuacaugcucaccaacuccgagcuccucucccucaucaacgacaugcccaucaccaacgaccagaagaagcucauguccaacaacguccagaucguccgccagcaguccuacuccaucaugugcaucaucaaggaggagguccucgccuacgucguccagcucccccucuacggcgucaucgacacccccugcuggaagcuccacaccuccccccucugcaccaccaacaccaaggagggcuccaacaucugccucacccgcaccgaccgcggcugguacugcgacaacgccggcuccgucuccuucuucccccaggccgagaccugcaagguccaguccaaccgcgucuucugcgacaccaugaacucccgcacccuccccuccgaggucaaccucugcaacgucgacaucuucaaccccaaguacgacugcaagaucaugaccuccaagaccgacgucuccuccuccgucaucaccucccucggcgccaucgucuccugcuacggcaagaccaagugcaccgccuccaacaagaaccgcggcaucaucaagaccuucuccaacggcugcgacuacgucuccaacaagggcgucgacaccgucuccgucggcaacacccucuacuacgucaacaagcaggagggcaagucccucuacgucaagggcgagcccaucaucaacuucuacgacccccucgucuuccccuccgacgaguucgacgccuccaucucccaggucaacgagaagaucaaccagucccucgccuucauccgcaaguccgacgagcuccuccacaacgucaacgccggcaaguccaccaccaacaucaugaucaccaccaucaucaucgucaucaucgucauccuccucucccucaucgccgucggccuccuccucuacugcaaggcccgcugaggacuagugaagggaacacccaaauuuaauucagccuuaagcacaauuaauuaagagugaaacguaauuguacaagcaguuggucacccaccauagggcaugaucaacaccgcaaccuuuccuuuuucccccagugauucugaaaaaccccucuucccuucagcuugcuuagauguuccaaauuuaguaagcuuaaggcggccuacagaagaaaaagaaaaaaaaggccacaaaaguucccucucacuuucaguaaauaaaauaaaagcagcaacagaaauaaagaaauaaaugaaauucaaaaugaaauaaauauuguguugugcagcauuaaaaaaucaauaaaaauuaaaaaugagcaagaucuaaaaaaaaaaaaaaaaaaaaaaaaaaaaaaaaaaaaaaaaaaaaaaaaaaaaaaaaaaaaaaaaugcaucccccccccccccccccccccccccccccccaaaggcucuuuucagagccaccagaauu

SEQ ID NO: 4439 - RNA, 2130 nt, Artificial Sequence
  mRNA product Design f-1 comprising derived and/or modified sequence from HRSV(A2)__F-del_DSCav1_mut0 (opt3)
gggagagcggcucggccauuuugucccagucaguccggaggcugcggcugcagaaguaccgccugcggaguaacugcaaagaagcuuaccauggagcugcucauccuuaaggccaacgcuauuaccacaauacugacugcagugacguucugcuuugccagcggccagaauaucaccgaagaguucuaccaauccacauguucugcggucucaaaaggguauuugagugcuuuaagaacuggaugguacaccagcguuauuacaaucgaacuguccaacauuaaggagaauaaaugcaacgguaccgacgccaaggugaaacuaaucaagcaggaacucgauaaguauaaaaaugcaguaacugagcugcagcuucugaugcagucuacacccgccaccggcucggggucagcuauagcaagcggaguggccgucuguaagguguugcaccucgagggcgaaguuaacaaaaucaagagugcucugcuguccacgaauaaagccguggucucucucagcaacgguguguccguauuaacuuuuaagguucuggaccuuaagaauuacauugauaaacaauugcugccuauccuaaacaagcagucaugcaguauuagcaauaucgagaccgugauagaguuccagcagaaaaacaauaggcuccuggaaauuacacgggaguuuucugucaacgcgggggugacuaccccaguguccacauauaugcuuaccaauucagaacuguugagccucaucaacgacaugccgauuacgaacgaucaaaagaaacugaugaguaauaacguccagaucguucgccagcagucuuacuccaucauguguauuauaaaggaggaaguguuagcauauguagugcaacugccccucuacggagucaucgacacuccuugcuggaaacuucauacaagcccacuguguaccacuaauacaaaggagggcucgaacauuugcuugacccgaacggaucguggcugguacugugacaaugccgggucuguguccuucuuuccccaggcugaaaccugcaagguucagucaaacagaguguucugugauacaaugaauaguagaacucugccuagcgaggucaaccucugcaauguggacaucuuuaacccaaaauaugauugcaagauaaugaccuccaaaacagacguaucuagcucaguuauuaccagucugggagccaucguguccuguuacgguaagacuaaaugcacagcaagcaauaagaacaggggcaucauuaagaccuucucuaaugggugugauuaugucucaaacaaaggaguggacacugucagugugggcaauacgcuuuacuauguuaacaagcaagaggguaaaagccuguacgugaagggggaacccaucauuaacuuuuaugacccuuugguauucccauccgaugaguuugacgcuucuauaucgcaggucaaugagaaaaucaaccagagccucgccuucauucggaaguccgaugaacuguuacacaaugugaacgcgggaaagucaacaaccaauaucaugaucacuaccauuauaaucguuauuaucgugauucugcuaagucucaucgccgucggccugcuuuuguacugcaaagcacgcugaggacuagugaagggaacacccaaauuuaauucagccuuaagcacaauuaauuaagagugaaacguaauuguacaagcaguuggucacccaccauagggcaugaucaacaccgcaaccuuuccuuuuucccccagugauucugaaaaaccccucuucccuucagcuugcuuagauguuccaaauuuaguaagcuuaaggcggccuacagaagaaaaagaaaaaaaaggccacaaaaguucccucucacuuucaguaaauaaaauaaaagcagcaacagaaauaaagaaauaaaugaaauucaaaaugaaauaaauauuguguugugcagcauuaaaaaaucaauaaaaauuaaaaaugagcaagaucuaaaaaaaaaaaaaaaaaaaaaaaaaaaaaaaaaaaaaaaaaaaaaaaaaaaaaaaaaaaaaaaaugcaucccccccccccccccccccccccccccccccaaaggcucuuuucagagccaccagaauu

SEQ ID NO: 4440 - RNA, 2130 nt, Artificial Sequence
  mRNA product Design f-1 comprising derived and/or modified sequence from HRSV(A2)__F-del_DSCav1_mut0 (opt4)
gggagagcggcucggccauuuugucccagucaguccggaggcugcggcugcagaaguaccgccugcggaguaacugcaaagaagcuuaccauggagcugcugauccugaaggccaacgccaucaccaccauccugaccgccgugaccuucugcuucgccagcggccagaacaucaccgaggaguucuaccagagcaccugcagcgccgugagcaagggcuaccugagcgcccugagaaccggcugguacaccagcgugaucaccaucgagcugagcaacaucaaggagaacaagugcaacggcaccgacgccaaggugaagcugaucaagcaggagcuggacaaguacaagaacgccgugaccgagcugcagcugcugaugcagagcacccccgccaccggcagcggcagcgccaucgccagcggcguggccgugugcaaggugcugcaccuggagggcgaggugaacaagaucaagagcgcccugcugagcaccaacaaggccguggugagccugagcaacggcgugagcgugcugaccuucaaggugcuggaccugaagaacuacaucgacaagcagcugcugcccauccugaacaagcagagcugcagcaucagcaacaucgagaccgugaucgaguuccagcagaagaacaacagacugcuggagaucaccagagaguucagcgugaacgccggcgugaccacccccgugagcaccuacaugcugaccaacagcgagcugcugagccugaucaacgacaugcccaucaccaacgaccagaagaagcugaugagcaacaacgugcagaucgugagacagcagagcuacagcaucaugugcaucaucaaggaggaggugcuggccuacguggugcagcugccccuguacggcgugaucgacacccccugcuggaagcugcacaccagcccccugugcaccaccaacaccaaggagggcagcaacaucugccugaccagaaccgacagaggcugguacugcgacaacgccggcagcgugagcuucuucccccaggccgagaccugcaaggugcagagcaacagaguguucugcgacaccaugaacagcagaacccugcccagcgaggugaaccugugcaacguggacaucuucaaccccaaguacgacugcaagaucaugaccagcaagaccgacgugagcagcagcgugaucaccagccugggcgccaucgugagcugcuacggcaagaccaagugcaccgccagcaacaagaacagaggcaucaucaagaccuucagcaacggcugcgacuacgugagcaacaagggcguggacaccgugagcgugggcaacacccuguacuacgugaacaagcaggagggcaagagccuguacgugaagggcgagcccaucaucaacuucuacgacccccugguguuccccagcgacgaguucgacgccagcaucagccaggugaacgagaagaucaaccagagccuggccuucaucagaaagagcgacgagcugcugcacaacgugaacgccggcaagagcaccaccaacaucaugaucaccaccaucaucaucgugaucaucgugauccugcugagccugaucgccgugggccugcugcuguacugcaaggccagaugaggacuagugaagggaacacccaaauuuaauucagccuuaagcacaauuaauuaagagugaaacguaauuguacaagcaguuggucacccaccauagggcaugaucaacaccgcaaccuuuccuuuuucccccagugauucugaaaaaccccucuucccuucagcuugcuuagauguuccaaauuuaguaagcuuaaggcggccuacagaagaaaaagaaaaaaaaggccacaaaaguucccucucacuuucaguaaauaaaauaaaagcagcaacagaaauaaagaaauaaaugaaauucaaaaugaaauaaauauuguguugugcagcauuaaaaaaucaauaaaaauuaaaaaugagcaagaucuaaaaaaaaaaaaaaaaaaaaaaaaaaaaaaaaaaaaaaaaaaaaaaaaaaaaaaaaaaaaaaaaugcaucccccccccccccccccccccccccccccccaaaggcucuuuucagagccaccagaauu

SEQ ID NO: 4441 - RNA, 2130 nt, Artificial Sequence
  mRNA product Design f-1 comprising derived and/or modified sequence from HRSV(A2)__F-del_DSCav1_mut0 (opt5)
gggagagcggcucggccauuuugucccagucaguccggaggcugcggcugcagaaguaccgccugcggaguaacugcaaagaagcuuaccauggagcugcucauccugaaggccaacgcuauuaccacaauccuuacggccgugaccuucugcuuugcgagcggccagaauauuacagaagaguucuaccaauccaccuguucugcugucagcaaaggguaucuguccgcccucagaacaggaugguacaccucuguuaucacaauugaacugagcaacaucaaggagaauaaaugcaacggcaccgacgccaaggugaaacuuaucaagcaggaacuggauaaguauaaaaaugcugugacggagcuccagcugcugaugcaguccacccccgccacagggucuggaagcgcuauugccuccggcgucgcgguguguaagguucuccaccuggagggggaagugaacaaaaucaagagcgcccuucugucuaccaauaaagcugucgugucccucagcaacggaguuucugugcugacauuuaagguccuugaccugaagaauuacauugauaaacaacuccugccuauccugaacaagcaguccugcagcauuucuaauaucgagaccgugauugaguuccagcagaaaaacaaucggcuccuggaaaucacgcgcgaguuuuccgugaacgccggcgucacaaccccgguuagcacauauaugcuuaccaauuccgaacugcucucucugaucaacgacaugcccauuaccaacgaucaaaagaaacuuaugagcaauaacgugcagaucgugagacagcaguccuacagcauuauguguaucauuaaggaggaaguccuggcuuaugugguucaacucccucuguacggcgugaucgacacacccugcuggaaacugcauacgucuccucucuguaccacaaauaccaaggagggguccaacaucugccugacacggaccgaucgcggaugguacugugacaaugccggcagcgucucuuucuuuccccaggcggaaacgugcaaggugcagagcaacagaguuuucugugauacaaugaacuccagaacccugccuucugaggugaaucucugcaaugucgacauuuuuaacccgaaauaugauugcaagaucaugaccagcaaaacagacguguccagcucugucauuaccucccugggggccaucgugagcuguuacggaaagacaaaaugcacggcuucuaauaagaaccggggcauuaucaagaccuucuccaaugggugugauuauguuagcaacaaaggaguggacacagucuccgugggcaauacccuuuacuauguuaacaagcaagagggcaaaucucuguacgugaagggggaacccaucauuaacuuuuaugacccucucgucuuccccagcgaugaguuugacgccuccaucucucaggugaaugagaaaauuaaccagagccuggcuuucauccgcaaguccgaugaacugcuccacaaugugaacgccggaaagagcacaaccaauauuaugaucacgaccauuaucaucguuauuaucgucauucugcuuucucugaucgccgugggccuccugcuguacugcaaagcuagaugaggacuagugaagggaacacccaaauuuaauucagccuuaagcacaauuaauuaagagugaaacguaauuguacaagcaguuggucacccaccauagggcaugaucaacaccgcaaccuuuccuuuuucccccagugauucugaaaaaccccucuucccuucagcuugcuuagauguuccaaauuuaguaagcuuaaggcggccuacagaagaaaaagaaaaaaaaggccacaaaaguucccucucacuuucaguaaauaaaauaaaagcagcaacagaaauaaagaaauaaaugaaauucaaaaugaaauaaauauuguguugugcagcauuaaaaaaucaauaaaaauuaaaaaugagcaagaucuaaaaaaaaaaaaaaaaaaaaaaaaaaaaaaaaaaaaaaaaaaaaaaaaaaaaaaaaaaaaaaaaugcaucccccccccccccccccccccccccccccccaaaggcucuuuucagagccaccagaauu

SEQ ID NO: 4442 - RNA, 2130 nt, Artificial Sequence
  mRNA product Design f-1 comprising derived and/or modified sequence from HRSV(A2)__F-del_DSCav1_mut0 (opt6)
gggagagcggcucggccauuuugucccagucaguccggaggcugcggcugcagaaguaccgccugcggaguaacugcaaagaagcuuaccauggaauuacucauccucaaagcaaacgcaauaacaacaauacuaacagcagucacuuucugcuucgcauccggacaaaauaucacagaagaauuuuaccaauccaccugcucugcugucuccaaaggauaccuaucugcccucagaaccgguugguauacaucugucauaaccauagaacuaucaaacauuaaagaaaacaaauguaacggaacagacgcaaaagucaaacuuauaaaacaagaauuagacaaauacaaaaacgcagucacagaauuacaacuacuaaugcaaucaaccccagcaaccggaucaggauccgcaauagcuucaggaguagcaguauguaaaguucuacacuuagaaggagaagucaacaaaauuaaauccgcacuauuaucaaccaacaaagcagucguaucuuuaucaaacggaguaucuguacuuacauucaaaguacuagaccuaaaaaauuacauugauaaacaauuacuaccaauacuaaacaaacaaucauguuccaucucuaacauagaaacaguaauagaauuucaacaaaaaaauaacagauuacuugaaaucacccgagaauuuucaguaaacgcaggaguaaccacacccguaucuacauacaugcuaacaaacucugaacuucugagccuaauaaaugacaugccaauaaccaacgaccaaaaaaaacuaauguccaacaacguacaaauaguacgacaacaaucuuacucaaucaugugcauaaucaaagaagaaguacuagcuuauguaguccaacuuccacucuacggaguaauagacacccccugcuggaaacuacacacaucaccacuaugcacaacaaacacaaaagaaggcucaaacauaugccuaacaagaacugacagaggaugguauugugacaaugcaggcucugucucauucuuuccacaagccgaaacaugcaaaguucaaucaaaccgaguuuucugugacacaaugaacucuagaacucucccaucagaagucaacuuaugcaacguugacauauucaacccaaaauaugacuguaaaauaaugacuuccaaaacugauguaucauccuccgucauaacaucccuaggagcuauuguaucauguuacgggaaaaccaaaugcacagccucaaacaaaaaccgcgguaucauaaaaacauuuucaaacggaugugauuacguaagcaauaaaggaguagacaccguaucaguaggaaauacacuauacuauguaaauaaacaagaaggaaaaucacuauaugucaaaggagaaccaaucauaaauuucuaugacccacuuguauucccauccgaugaauuugacgcaagcauuucacaggucaacgaaaaaauaaaccaaucacuagccuucaucagaaaaucagacgaacuacuacauaacguaaacgccggaaaaucaacaaccaacauaaugauaacaacaaucauaauaguuaucauaguaauacuacuaucucuaauagcugucggacucuuacuauauugcaaagcccgauaaggacuagugaagggaacacccaaauuuaauucagccuuaagcacaauuaauuaagagugaaacguaauuguacaagcaguuggucacccaccauagggcaugaucaacaccgcaaccuuuccuuuuucccccagugauucugaaaaaccccucuucccuucagcuugcuuagauguuccaaauuuaguaagcuuaaggcggccuacagaagaaaaagaaaaaaaaggccacaaaaguucccucucacuuucaguaaauaaaauaaaagcagcaacagaaauaaagaaauaaaugaaauucaaaaugaaauaaauauuguguugugcagcauuaaaaaaucaauaaaaauuaaaaaugagcaagaucuaaaaaaaaaaaaaaaaaaaaaaaaaaaaaaaaaaaaaaaaaaaaaaaaaaaaaaaaaaaaaaaaugcaucccccccccccccccccccccccccccccccaaaggcucuuuucagagccaccagaauu

SEQ ID NO: 4443 - RNA, 2130 nt, Artificial Sequence
  mRNA product Design f-1 comprising derived and/or modified sequence from HRSV(A2)__F-del_DSCav1_mut0 (opt11)
gggagagcggcucggccauuuugucccagucaguccggaggcugcggcugcagaaguaccgccugcggaguaacugcaaagaagcuuaccauggaacuacuaauccugaaagccaacgccauaaccacaauccuuaccgcagucaccuucugcuucgccuccggucaaaacaucacagaagaguucuaccaauccaccuguuccgcagucagcaaaggcuaccucuccgcacuccgaaccggaugguacaccagcgucaucaccaucgaacuauccaacauaaaggaaaauaagugcaaugguacagaugccaaggucaaacucauaaagcaagaacucgacaaauacaaaaacgccgucaccgaacuacaacuacuaaugcaaucuacccccgcaacaggcucagguuccgccauagccuccggcgucgccguuugcaaaguccuccaccucgaaggcgaaguaaacaaaaucaaauccgcccuacucucaaccaacaaagcagucgucucccucucaaacggagucucgguccucaccuucaaaguccucgaccucaaaaacuauauagacaaacaacuccuacccauacucaacaaacaguccugcagcauauccaacaucgaaaccgugaucgaguuccaacagaaaaacaacagacuccucgaaaucacucgagaguucuccguaaacgccggcgucacaaccccagucucaacauacaugcucaccaacagcgaacuccuaucacuaaucaacgacaugccuaucacaaaugaucagaagaaacuaaugagcaacaacguccaaaucguccgccaacaaucauacuccaucaugugcaucauaaaagaagaaguccuagccuacgugguccagcuaccccucuacggcguaauugacaccccuugcuggaaacuacacacuucaccccucugcacaaccaacaccaaagaagguucaaacaucugccucacacgaacagaccgcggcugguacugcgacaacgccggauccguauccuucuucccccaagcagaaaccugcaaaguucaauccaaccggguauucugcgacaccaugaacucaagaacccuucccuccgaaguaaaucuaugcaacgucgacauauucaacccaaaauacgacugcaaaaucaugaccuccaaaaccgaugucuccagcagcgucaucaccagccucggcgccaucgucuccugcuacggcaaaacaaaauguacagcauccaacaaaaaccgaggcauaaucaaaaccuucuccaacgggugcgauuacgucagcaacaaaggcgucgacaccgucuccgugggcaacacccuauacuacgucaacaaacaagaaggcaaaucacuguacguaaagggcgaacccaucaucaacuucuaugacccucugguguucccauccgaugaauuugacgcauccauaucucaggucaacgaaaagaucaaccaaucccucgccuucauacgcaaauccgacgaacuccuacacaacgucaacgcugguaaaagcaccaccaacaucaugaucaccacaaucaucaucgucauaaucguuauccuacucucccuuauagcagucggacuccuccucuacugcaaagcccgcuaaggacuagugaagggaacacccaaauuuaauucagccuuaagcacaauuaauuaagagugaaacguaauuguacaagcaguuggucacccaccauagggcaugaucaacaccgcaaccuuuccuuuuucccccagugauucugaaaaaccccucuucccuucagcuugcuuagauguuccaaauuuaguaagcuuaaggcggccuacagaagaaaaagaaaaaaaaggccacaaaaguucccucucacuuucaguaaauaaaauaaaagcagcaacagaaauaaagaaauaaaugaaauucaaaaugaaauaaauauuguguugugcagcauuaaaaaaucaauaaaaauuaaaaaugagcaagaucuaaaaaaaaaaaaaaaaaaaaaaaaaaaaaaaaaaaaaaaaaaaaaaaaaaaaaaaaaaaaaaaaugcaucccccccccccccccccccccccccccccccaaaggcucuuuucagagccaccagaauu

SEQ ID NO: 4444 - RNA, 1910 nt, Artificial Sequence
  mRNA product Design f-2 comprising derived and/or modified sequence from HRSV(A2)__F-del_DSCav1_mut0 (opt1)
gggagagcggcucggccauuuugucccagucaguccggaggcugcggcugcagaaguaccgccugcggaguaacugcaaagaagcuuaccauggagcugcucauccugaaggccaacgccaucaccaccauccugacggcggugaccuucugcuucgccagcggccagaacaucaccgaggaguucuaccaguccacgugcagcgccgucuccaagggguaccucagcgcccugcggaccggcugguacaccuccgugaucaccaucgagcugagcaacaucaaggagaacaagugcaacgggaccgacgccaaggugaagcucaucaagcaggagcuggacaaguacaagaacgcggucacggagcugcagcuccugaugcaguccaccccggcaaccggcuccggcuccgccaucgcgagcggcgucgccgugugcaaggugcugcaccucgagggggaggucaacaagaucaagagcgcccugcuguccaccaacaaggccguggugagccucuccaacggcgucagcgugcugaccuucaaggugcuggaccucaagaacuacaucgacaagcagcugcugcccauccugaacaagcagagcugcuccaucagcaacaucgagacggugaucgaguuccagcagaagaacaaccggcuccuggagaucacccgcgaguucagcgugaacgccggggucaccacccccguguccacguacaugcugaccaacagcgagcuccugucccugaucaacgacaugccgaucaccaacgaccagaagaagcucaugagcaacaacgugcagaucguccggcagcaguccuacagcaucaugugcaucaucaaggaggaggugcuggcguacgugguccagcugccccucuacggcgugaucgacacccccugcuggaagcugcacacgagcccccugugcaccaccaacaccaaggagggguccaacaucugccucacgcgcaccgaccggggcugguacugcgacaacgccggcagcgucuccuucuucccgcaggccgagaccugcaaggugcagagcaaccgcguguucugcgacaccaugaacucccggacgcugcccagcgagguaaaccucugcaacgucgacaucuucaaccccaaguacgacugcaagaucaugaccuccaagaccgacgugagcuccagcgugaucaccucccugggggccaucgucagcugcuacggcaagacgaagugcaccgccagcaacaagaaccgggggaucaucaagaccuucuccaacggcugcgacuacgugagcaacaagggcguggacaccguguccgucgggaacacccuguacuacgugaacaagcaggagggcaagagccucuacgugaagggggagcccaucaucaacuucuacgacccgcuggucuuccccuccgacgaguucgacgcgagcaucucccaggugaacgagaagaucaaccagagccuggccuucauccgcaaguccgacgagcugcuccacaacgugaacgccggcaagagcacgaccaacaucaugaucaccaccaucaucaucgucaucaucgugauccugcugucccucaucgccguggggcugcugcucuacugcaaggcccggugaggacuaguggaagcauuuuccuggcugauuaaaagaaauuacucagcuauggucaucuguuccuguuagaaggcuaugcagcauauuauauacuaugcgcauguuaugaaaugcauaauaaaaaauuuuaaaaaaucuaaaagaucuaaaaaaaaaaaaaaaaaaaaaaaaaaaaaaaaaaaaaaaaaaaaaaaaaaaaaaaaaaaaaaaaugcaucccccccccccccccccccccccccccccccaaaggcucuuuucagagccaccagaauu

SEQ ID NO: 4445 - RNA, 1910 nt, Artificial Sequence
  mRNA product Design f-2 comprising derived and/or modified sequence from HRSV(A2)__F-del_DSCav1_mut0 (opt1)
gggagagcggcucggccauuuugucccagucaguccggaggcugcggcugcagaaguaccgccugcggaguaacugcaaagaagcuuaccauggagcugcucauccugaaggccaacgccaucaccaccauccugacggcggugaccuucugcuucgccagcggccagaacaucaccgaggaguucuaccaguccacgugcagcgccgucuccaagggguaccucagcgcccugcgcaccggcugguacaccuccgugaucaccaucgagcugagcaacaucaaggagaacaagugcaacgggaccgacgccaaggugaagcucaucaagcaggagcuggacaaguacaagaacgcggucacggagcugcagcuccugaugcaguccacccccgccaccggcagcggguccgccaucgccagcggcguggcggugugcaagguccugcaccucgagggcgaggugaacaagaucaaguccgcccugcugagcaccaacaaggccguggucucccucagcaacgggguguccgugcugacguucaagguccuggaccucaagaacuacaucgacaagcagcugcugccgauccucaacaagcagagcugcuccaucagcaacaucgagaccgugaucgaguuccagcagaagaacaaccggcugcuggagaucacccgcgaguucuccgugaacgccggcgucaccacgcccgugagcaccuacaugcucaccaacagcgagcugcugucccucaucaacgacaugcccaucaccaacgaccagaagaagcugaugagcaacaacgugcagaucguccggcagcaguccuacagcaucaugugcaucaucaaggaggaggugcuggccuacgugguccagcucccccuguacggggugaucgacacgccgugcuggaagcugcacaccagcccccucugcaccaccaacacgaaggagggcuccaacaucugccugacccgcaccgaccgggggugguacugcgacaacgcgggcuccgugagcuucuucccccaggccgagaccugcaagguccaguccaaccgcguguucugcgacacgaugaacagccggacccuccccuccgaggucaaccugugcaacguggacaucuucaacccgaaguacgacugcaagaucaugaccagcaagaccgacguguccagcuccgucaucacgagccugggcgccaucguguccugcuacgggaagaccaagugcaccgccagcaacaagaaccggggcaucaucaagaccuucuccaacgggugcgacuacgugagcaacaagggcgucgacacggugagcgugggcaacacccucuacuacgucaacaagcaggaggggaagucccuguacgugaagggcgagcccaucaucaacuucuacgacccccugguguuccccagcgacgaguucgacgccuccaucagccaggucaacgagaagaucaaccagucccucgcguucauccgcaagagcgacgagcugcugcacaacgugaacgccgggaaguccaccaccaacaucaugaucaccacgaucaucaucgugaucaucgucauccuccugagccugaucgccgugggccuccugcuguacugcaaggcccggugaggacuaguggaagcauuuuccuggcugauuaaaagaaauuacucagcuauggucaucuguuccuguuagaaggcuaugcagcauauuauauacuaugcgcauguuaugaaaugcauaauaaaaaauuuuaaaaaaucuaaaagaucuaaaaaaaaaaaaaaaaaaaaaaaaaaaaaaaaaaaaaaaaaaaaaaaaaaaaaaaaaaaaaaaaugcaucccccccccccccccccccccccccccccccaaaggcucuuuucagagccaccagaauu

SEQ ID NO: 4446 - RNA, 1910 nt, Artificial Sequence
  mRNA product Design f-2 comprising derived and/or modified sequence from HRSV(A2)__F-del_DSCav1_mut0 (opt2)
gggagagcggcucggccauuuugucccagucaguccggaggcugcggcugcagaaguaccgccugcggaguaacugcaaagaagcuuaccauggagcuccucauccucaaggccaacgccaucaccaccauccucaccgccgucaccuucugcuucgccuccggccagaacaucaccgaggaguucuaccaguccaccugcuccgccgucuccaagggcuaccucuccgcccuccgcaccggcugguacaccuccgucaucaccaucgagcucuccaacaucaaggagaacaagugcaacggcaccgacgccaaggucaagcucaucaagcaggagcucgacaaguacaagaacgccgucaccgagcuccagcuccucaugcaguccacccccgccaccggcuccggcuccgccaucgccuccggcgucgccgucugcaagguccuccaccucgagggcgaggucaacaagaucaaguccgcccuccucuccaccaacaaggccgucgucucccucuccaacggcgucuccguccucaccuucaagguccucgaccucaagaacuacaucgacaagcagcuccuccccauccucaacaagcaguccugcuccaucuccaacaucgagaccgucaucgaguuccagcagaagaacaaccgccuccucgagaucacccgcgaguucuccgucaacgccggcgucaccacccccgucuccaccuacaugcucaccaacuccgagcuccucucccucaucaacgacaugcccaucaccaacgaccagaagaagcucauguccaacaacguccagaucguccgccagcaguccuacuccaucaugugcaucaucaaggaggagguccucgccuacgucguccagcucccccucuacggcgucaucgacacccccugcuggaagcuccacaccuccccccucugcaccaccaacaccaaggagggcuccaacaucugccucacccgcaccgaccgcggcugguacugcgacaacgccggcuccgucuccuucuucccccaggccgagaccugcaagguccaguccaaccgcgucuucugcgacaccaugaacucccgcacccuccccuccgaggucaaccucugcaacgucgacaucuucaaccccaaguacgacugcaagaucaugaccuccaagaccgacgucuccuccuccgucaucaccucccucggcgccaucgucuccugcuacggcaagaccaagugcaccgccuccaacaagaaccgcggcaucaucaagaccuucuccaacggcugcgacuacgucuccaacaagggcgucgacaccgucuccgucggcaacacccucuacuacgucaacaagcaggagggcaagucccucuacgucaagggcgagcccaucaucaacuucuacgacccccucgucuuccccuccgacgaguucgacgccuccaucucccaggucaacgagaagaucaaccagucccucgccuucauccgcaaguccgacgagcuccuccacaacgucaacgccggcaaguccaccaccaacaucaugaucaccaccaucaucaucgucaucaucgucauccuccucucccucaucgccgucggccuccuccucuacugcaaggcccgcugaggacuaguggaagcauuuuccuggcugauuaaaagaaauuacucagcuauggucaucuguuccuguuagaaggcuaugcagcauauuauauacuaugcgcauguuaugaaaugcauaauaaaaaauuuuaaaaaaucuaaaagaucuaaaaaaaaaaaaaaaaaaaaaaaaaaaaaaaaaaaaaaaaaaaaaaaaaaaaaaaaaaaaaaaaugcaucccccccccccccccccccccccccccccccaaaggcucuuuucagagccaccagaauu

SEQ ID NO: 4447 - RNA, 1910 nt, Artificial Sequence
  mRNA product Design f-2 comprising derived and/or modified sequence from HRSV(A2)__F-del_DSCav1_mut0 (opt3)
gggagagcggcucggccauuuugucccagucaguccggaggcugcggcugcagaaguaccgccugcggaguaacugcaaagaagcuuaccauggagcugcucauccuuaaggccaacgcuauuaccacaauacugacugcagugacguucugcuuugccagcggccagaauaucaccgaagaguucuaccaauccacauguucugcggucucaaaaggguauuugagugcuuuaagaacuggaugguacaccagcguuauuacaaucgaacuguccaacauuaaggagaauaaaugcaacgguaccgacgccaaggugaaacuaaucaagcaggaacucgauaaguauaaaaaugcaguaacugagcugcagcuucugaugcagucuacacccgccaccggcucggggucagcuauagcaagcggaguggccgucuguaagguguugcaccucgagggcgaaguuaacaaaaucaagagugcucugcuguccacgaauaaagccguggucucucucagcaacgguguguccguauuaacuuuuaagguucuggaccuuaagaauuacauugauaaacaauugcugccuauccuaaacaagcagucaugcaguauuagcaauaucgagaccgugauagaguuccagcagaaaaacaauaggcuccuggaaauuacacgggaguuuucugucaacgcgggggugacuaccccaguguccacauauaugcuuaccaauucagaacuguugagccucaucaacgacaugccgauuacgaacgaucaaaagaaacugaugaguaauaacguccagaucguucgccagcagucuuacuccaucauguguauuauaaaggaggaaguguuagcauauguagugcaacugccccucuacggagucaucgacacuccuugcuggaaacuucauacaagcccacuguguaccacuaauacaaaggagggcucgaacauuugcuugacccgaacggaucguggcugguacugugacaaugccgggucuguguccuucuuuccccaggcugaaaccugcaagguucagucaaacagaguguucugugauacaaugaauaguagaacucugccuagcgaggucaaccucugcaauguggacaucuuuaacccaaaauaugauugcaagauaaugaccuccaaaacagacguaucuagcucaguuauuaccagucugggagccaucguguccuguuacgguaagacuaaaugcacagcaagcaauaagaacaggggcaucauuaagaccuucucuaaugggugugauuaugucucaaacaaaggaguggacacugucagugugggcaauacgcuuuacuauguuaacaagcaagaggguaaaagccuguacgugaagggggaacccaucauuaacuuuuaugacccuuugguauucccauccgaugaguuugacgcuucuauaucgcaggucaaugagaaaaucaaccagagccucgccuucauucggaaguccgaugaacuguuacacaaugugaacgcgggaaagucaacaaccaauaucaugaucacuaccauuauaaucguuauuaucgugauucugcuaagucucaucgccgucggccugcuuuuguacugcaaagcacgcugaggacuaguggaagcauuuuccuggcugauuaaaagaaauuacucagcuauggucaucuguuccuguuagaaggcuaugcagcauauuauauacuaugcgcauguuaugaaaugcauaauaaaaaauuuuaaaaaaucuaaaagaucuaaaaaaaaaaaaaaaaaaaaaaaaaaaaaaaaaaaaaaaaaaaaaaaaaaaaaaaaaaaaaaaaugcaucccccccccccccccccccccccccccccccaaaggcucuuuucagagccaccagaauu

SEQ ID NO: 4448 - RNA, 1910 nt, Artificial Sequence
  mRNA product Design f-2 comprising derived and/or modified sequence from HRSV(A2)__F-del_DSCav1_mut0 (opt4)
gggagagcggcucggccauuuugucccagucaguccggaggcugcggcugcagaaguaccgccugcggaguaacugcaaagaagcuuaccauggagcugcugauccugaaggccaacgccaucaccaccauccugaccgccgugaccuucugcuucgccagcggccagaacaucaccgaggaguucuaccagagcaccugcagcgccgugagcaagggcuaccugagcgcccugagaaccggcugguacaccagcgugaucaccaucgagcugagcaacaucaaggagaacaagugcaacggcaccgacgccaaggugaagcugaucaagcaggagcuggacaaguacaagaacgccgugaccgagcugcagcugcugaugcagagcacccccgccaccggcagcggcagcgccaucgccagcggcguggccgugugcaaggugcugcaccuggagggcgaggugaacaagaucaagagcgcccugcugagcaccaacaaggccguggugagccugagcaacggcgugagcgugcugaccuucaaggugcuggaccugaagaacuacaucgacaagcagcugcugcccauccugaacaagcagagcugcagcaucagcaacaucgagaccgugaucgaguuccagcagaagaacaacagacugcuggagaucaccagagaguucagcgugaacgccggcgugaccacccccgugagcaccuacaugcugaccaacagcgagcugcugagccugaucaacgacaugcccaucaccaacgaccagaagaagcugaugagcaacaacgugcagaucgugagacagcagagcuacagcaucaugugcaucaucaaggaggaggugcuggccuacguggugcagcugccccuguacggcgugaucgacacccccugcuggaagcugcacaccagcccccugugcaccaccaacaccaaggagggcagcaacaucugccugaccagaaccgacagaggcugguacugcgacaacgccggcagcgugagcuucuucccccaggccgagaccugcaaggugcagagcaacagaguguucugcgacaccaugaacagcagaacccugcccagcgaggugaaccugugcaacguggacaucuucaaccccaaguacgacugcaagaucaugaccagcaagaccgacgugagcagcagcgugaucaccagccugggcgccaucgugagcugcuacggcaagaccaagugcaccgccagcaacaagaacagaggcaucaucaagaccuucagcaacggcugcgacuacgugagcaacaagggcguggacaccgugagcgugggcaacacccuguacuacgugaacaagcaggagggcaagagccuguacgugaagggcgagcccaucaucaacuucuacgacccccugguguuccccagcgacgaguucgacgccagcaucagccaggugaacgagaagaucaaccagagccuggccuucaucagaaagagcgacgagcugcugcacaacgugaacgccggcaagagcaccaccaacaucaugaucaccaccaucaucaucgugaucaucgugauccugcugagccugaucgccgugggccugcugcuguacugcaaggccagaugaggacuaguggaagcauuuuccuggcugauuaaaagaaauuacucagcuauggucaucuguuccuguuagaaggcuaugcagcauauuauauacuaugcgcauguuaugaaaugcauaauaaaaaauuuuaaaaaaucuaaaagaucuaaaaaaaaaaaaaaaaaaaaaaaaaaaaaaaaaaaaaaaaaaaaaaaaaaaaaaaaaaaaaaaaugcaucccccccccccccccccccccccccccccccaaaggcucuuuucagagccaccagaauu

SEQ ID NO: 4449 - RNA, 1910 nt, Artificial Sequence
  mRNA product Design f-2 comprising derived and/or modified sequence from HRSV(A2)__F-del_DSCav1_mut0 (opt5)
gggagagcggcucggccauuuugucccagucaguccggaggcugcggcugcagaaguaccgccugcggaguaacugcaaagaagcuuaccauggagcugcucauccugaaggccaacgcuauuaccacaauccuuacggccgugaccuucugcuuugcgagcggccagaauauuacagaagaguucuaccaauccaccuguucugcugucagcaaaggguaucuguccgcccucagaacaggaugguacaccucuguuaucacaauugaacugagcaacaucaaggagaauaaaugcaacggcaccgacgccaaggugaaacuuaucaagcaggaacuggauaaguauaaaaaugcugugacggagcuccagcugcugaugcaguccacccccgccacagggucuggaagcgcuauugccuccggcgucgcgguguguaagguucuccaccuggagggggaagugaacaaaaucaagagcgcccuucugucuaccaauaaagcugucgugucccucagcaacggaguuucugugcugacauuuaagguccuugaccugaagaauuacauugauaaacaacuccugccuauccugaacaagcaguccugcagcauuucuaauaucgagaccgugauugaguuccagcagaaaaacaaucggcuccuggaaaucacgcgcgaguuuuccgugaacgccggcgucacaaccccgguuagcacauauaugcuuaccaauuccgaacugcucucucugaucaacgacaugcccauuaccaacgaucaaaagaaacuuaugagcaauaacgugcagaucgugagacagcaguccuacagcauuauguguaucauuaaggaggaaguccuggcuuaugugguucaacucccucuguacggcgugaucgacacacccugcuggaaacugcauacgucuccucucuguaccacaaauaccaaggagggguccaacaucugccugacacggaccgaucgcggaugguacugugacaaugccggcagcgucucuuucuuuccccaggcggaaacgugcaaggugcagagcaacagaguuuucugugauacaaugaacuccagaacccugccuucugaggugaaucucugcaaugucgacauuuuuaacccgaaauaugauugcaagaucaugaccagcaaaacagacguguccagcucugucauuaccucccugggggccaucgugagcuguuacggaaagacaaaaugcacggcuucuaauaagaaccggggcauuaucaagaccuucuccaaugggugugauuauguuagcaacaaaggaguggacacagucuccgugggcaauacccuuuacuauguuaacaagcaagagggcaaaucucuguacgugaagggggaacccaucauuaacuuuuaugacccucucgucuuccccagcgaugaguuugacgccuccaucucucaggugaaugagaaaauuaaccagagccuggcuuucauccgcaaguccgaugaacugcuccacaaugugaacgccggaaagagcacaaccaauauuaugaucacgaccauuaucaucguuauuaucgucauucugcuuucucugaucgccgugggccuccugcuguacugcaaagcuagaugaggacuaguggaagcauuuuccuggcugauuaaaagaaauuacucagcuauggucaucuguuccuguuagaaggcuaugcagcauauuauauacuaugcgcauguuaugaaaugcauaauaaaaaauuuuaaaaaaucuaaaagaucuaaaaaaaaaaaaaaaaaaaaaaaaaaaaaaaaaaaaaaaaaaaaaaaaaaaaaaaaaaaaaaaaugcaucccccccccccccccccccccccccccccccaaaggcucuuuucagagccaccagaauu

SEQ ID NO: 4450 - RNA, 1910 nt, Artificial Sequence
  mRNA product Design f-2 comprising derived and/or modified sequence from HRSV(A2)__F-del_DSCav1_mut0 (opt6)
gggagagcggcucggccauuuugucccagucaguccggaggcugcggcugcagaaguaccgccugcggaguaacugcaaagaagcuuaccauggaauuacucauccucaaagcaaacgcaauaacaacaauacuaacagcagucacuuucugcuucgcauccggacaaaauaucacagaagaauuuuaccaauccaccugcucugcugucuccaaaggauaccuaucugcccucagaaccgguugguauacaucugucauaaccauagaacuaucaaacauuaaagaaaacaaauguaacggaacagacgcaaaagucaaacuuauaaaacaagaauuagacaaauacaaaaacgcagucacagaauuacaacuacuaaugcaaucaaccccagcaaccggaucaggauccgcaauagcuucaggaguagcaguauguaaaguucuacacuuagaaggagaagucaacaaaauuaaauccgcacuauuaucaaccaacaaagcagucguaucuuuaucaaacggaguaucuguacuuacauucaaaguacuagaccuaaaaaauuacauugauaaacaauuacuaccaauacuaaacaaacaaucauguuccaucucuaacauagaaacaguaauagaauuucaacaaaaaaauaacagauuacuugaaaucacccgagaauuuucaguaaacgcaggaguaaccacacccguaucuacauacaugcuaacaaacucugaacuucugagccuaauaaaugacaugccaauaaccaacgaccaaaaaaaacuaauguccaacaacguacaaauaguacgacaacaaucuuacucaaucaugugcauaaucaaagaagaaguacuagcuuauguaguccaacuuccacucuacggaguaauagacacccccugcuggaaacuacacacaucaccacuaugcacaacaaacacaaaagaaggcucaaacauaugccuaacaagaacugacagaggaugguauugugacaaugcaggcucugucucauucuuuccacaagccgaaacaugcaaaguucaaucaaaccgaguuuucugugacacaaugaacucuagaacucucccaucagaagucaacuuaugcaacguugacauauucaacccaaaauaugacuguaaaauaaugacuuccaaaacugauguaucauccuccgucauaacaucccuaggagcuauuguaucauguuacgggaaaaccaaaugcacagccucaaacaaaaaccgcgguaucauaaaaacauuuucaaacggaugugauuacguaagcaauaaaggaguagacaccguaucaguaggaaauacacuauacuauguaaauaaacaagaaggaaaaucacuauaugucaaaggagaaccaaucauaaauuucuaugacccacuuguauucccauccgaugaauuugacgcaagcauuucacaggucaacgaaaaaauaaaccaaucacuagccuucaucagaaaaucagacgaacuacuacauaacguaaacgccggaaaaucaacaaccaacauaaugauaacaacaaucauaauaguuaucauaguaauacuacuaucucuaauagcugucggacucuuacuauauugcaaagcccgauaaggacuaguggaagcauuuuccuggcugauuaaaagaaauuacucagcuauggucaucuguuccuguuagaaggcuaugcagcauauuauauacuaugcgcauguuaugaaaugcauaauaaaaaauuuuaaaaaaucuaaaagaucuaaaaaaaaaaaaaaaaaaaaaaaaaaaaaaaaaaaaaaaaaaaaaaaaaaaaaaaaaaaaaaaaugcaucccccccccccccccccccccccccccccccaaaggcucuuuucagagccaccagaauu

SEQ ID NO: 4451 - RNA, 1910 nt, Artificial Sequence
  mRNA product Design f-2 comprising derived and/or modified sequence from HRSV(A2)__F-del_DSCav1_mut0 (opt11)
gggagagcggcucggccauuuugucccagucaguccggaggcugcggcugcagaaguaccgccugcggaguaacugcaaagaagcuuaccauggaacuacuaauccugaaagccaacgccauaaccacaauccuuaccgcagucaccuucugcuucgccuccggucaaaacaucacagaagaguucuaccaauccaccuguuccgcagucagcaaaggcuaccucuccgcacuccgaaccggaugguacaccagcgucaucaccaucgaacuauccaacauaaaggaaaauaagugcaaugguacagaugccaaggucaaacucauaaagcaagaacucgacaaauacaaaaacgccgucaccgaacuacaacuacuaaugcaaucuacccccgcaacaggcucagguuccgccauagccuccggcgucgccguuugcaaaguccuccaccucgaaggcgaaguaaacaaaaucaaauccgcccuacucucaaccaacaaagcagucgucucccucucaaacggagucucgguccucaccuucaaaguccucgaccucaaaaacuauauagacaaacaacuccuacccauacucaacaaacaguccugcagcauauccaacaucgaaaccgugaucgaguuccaacagaaaaacaacagacuccucgaaaucacucgagaguucuccguaaacgccggcgucacaaccccagucucaacauacaugcucaccaacagcgaacuccuaucacuaaucaacgacaugccuaucacaaaugaucagaagaaacuaaugagcaacaacguccaaaucguccgccaacaaucauacuccaucaugugcaucauaaaagaagaaguccuagccuacgugguccagcuaccccucuacggcguaauugacaccccuugcuggaaacuacacacuucaccccucugcacaaccaacaccaaagaagguucaaacaucugccucacacgaacagaccgcggcugguacugcgacaacgccggauccguauccuucuucccccaagcagaaaccugcaaaguucaauccaaccggguauucugcgacaccaugaacucaagaacccuucccuccgaaguaaaucuaugcaacgucgacauauucaacccaaaauacgacugcaaaaucaugaccuccaaaaccgaugucuccagcagcgucaucaccagccucggcgccaucgucuccugcuacggcaaaacaaaauguacagcauccaacaaaaaccgaggcauaaucaaaaccuucuccaacgggugcgauuacgucagcaacaaaggcgucgacaccgucuccgugggcaacacccuauacuacgucaacaaacaagaaggcaaaucacuguacguaaagggcgaacccaucaucaacuucuaugacccucugguguucccauccgaugaauuugacgcauccauaucucaggucaacgaaaagaucaaccaaucccucgccuucauacgcaaauccgacgaacuccuacacaacgucaacgcugguaaaagcaccaccaacaucaugaucaccacaaucaucaucgucauaaucguuauccuacucucccuuauagcagucggacuccuccucuacugcaaagcccgcuaaggacuaguggaagcauuuuccuggcugauuaaaagaaauuacucagcuauggucaucuguuccuguuagaaggcuaugcagcauauuauauacuaugcgcauguuaugaaaugcauaauaaaaaauuuuaaaaaaucuaaaagaucuaaaaaaaaaaaaaaaaaaaaaaaaaaaaaaaaaaaaaaaaaaaaaaaaaaaaaaaaaaaaaaaaugcaucccccccccccccccccccccccccccccccaaaggcucuuuucagagccaccagaauu

SEQ ID NO: 4452 - RNA, 1901 nt, Artificial Sequence
  mRNA product Design f-3 comprising derived and/or modified sequence from HRSV(A2)__F-del_DSCav1_mut0 (opt1)
gggagagucccgcagucggcguccagcggcucugcuuguucgugugugugucguugcaggccuuauucaagcuuaccauggagcugcucauccugaaggccaacgccaucaccaccauccugacggcggugaccuucugcuucgccagcggccagaacaucaccgaggaguucuaccaguccacgugcagcgccgucuccaagggguaccucagcgcccugcggaccggcugguacaccuccgugaucaccaucgagcugagcaacaucaaggagaacaagugcaacgggaccgacgccaaggugaagcucaucaagcaggagcuggacaaguacaagaacgcggucacggagcugcagcuccugaugcaguccaccccggcaaccggcuccggcuccgccaucgcgagcggcgucgccgugugcaaggugcugcaccucgagggggaggucaacaagaucaagagcgcccugcuguccaccaacaaggccguggugagccucuccaacggcgucagcgugcugaccuucaaggugcuggaccucaagaacuacaucgacaagcagcugcugcccauccugaacaagcagagcugcuccaucagcaacaucgagacggugaucgaguuccagcagaagaacaaccggcuccuggagaucacccgcgaguucagcgugaacgccggggucaccacccccguguccacguacaugcugaccaacagcgagcuccugucccugaucaacgacaugccgaucaccaacgaccagaagaagcucaugagcaacaacgugcagaucguccggcagcaguccuacagcaucaugugcaucaucaaggaggaggugcuggcguacgugguccagcugccccucuacggcgugaucgacacccccugcuggaagcugcacacgagcccccugugcaccaccaacaccaaggagggguccaacaucugccucacgcgcaccgaccggggcugguacugcgacaacgccggcagcgucuccuucuucccgcaggccgagaccugcaaggugcagagcaaccgcguguucugcgacaccaugaacucccggacgcugcccagcgagguaaaccucugcaacgucgacaucuucaaccccaaguacgacugcaagaucaugaccuccaagaccgacgugagcuccagcgugaucaccucccugggggccaucgucagcugcuacggcaagacgaagugcaccgccagcaacaagaaccgggggaucaucaagaccuucuccaacggcugcgacuacgugagcaacaagggcguggacaccguguccgucgggaacacccuguacuacgugaacaagcaggagggcaagagccucuacgugaagggggagcccaucaucaacuucuacgacccgcuggucuuccccuccgacgaguucgacgcgagcaucucccaggugaacgagaagaucaaccagagccuggccuucauccgcaaguccgacgagcugcuccacaacgugaacgccggcaagagcacgaccaacaucaugaucaccaccaucaucaucgucaucaucgugauccugcugucccucaucgccguggggcugcugcucuacugcaaggcccggugaggacuaguacuggcugcaucucccuuuccucuguccuccauccuucucccaggauggugaagggggaccugguacccagugauccccaccccaggauccuaaaucaugacuuaccugcuaauaaaaacucauuggaaaagugagaagaucuaaaaaaaaaaaaaaaaaaaaaaaaaaaaaaaaaaaaaaaaaaaaaaaaaaaaaaaaaaaaaaaaugcaucccccccccccccccccccccccccccccccaaaggcucuuuucagagccaccagaauu

SEQ ID NO: 4453 - RNA, 1901 nt, Artificial Sequence
  mRNA product Design f-3 comprising derived and/or modified sequence from HRSV(A2)__F-del_DSCav1_mut0 (opt1)
gggagagucccgcagucggcguccagcggcucugcuuguucgugugugugucguugcaggccuuauucaagcuuaccauggagcugcucauccugaaggccaacgccaucaccaccauccugacggcggugaccuucugcuucgccagcggccagaacaucaccgaggaguucuaccaguccacgugcagcgccgucuccaagggguaccucagcgcccugcgcaccggcugguacaccuccgugaucaccaucgagcugagcaacaucaaggagaacaagugcaacgggaccgacgccaaggugaagcucaucaagcaggagcuggacaaguacaagaacgcggucacggagcugcagcuccugaugcaguccacccccgccaccggcagcggguccgccaucgccagcggcguggcggugugcaagguccugcaccucgagggcgaggugaacaagaucaaguccgcccugcugagcaccaacaaggccguggucucccucagcaacgggguguccgugcugacguucaagguccuggaccucaagaacuacaucgacaagcagcugcugccgauccucaacaagcagagcugcuccaucagcaacaucgagaccgugaucgaguuccagcagaagaacaaccggcugcuggagaucacccgcgaguucuccgugaacgccggcgucaccacgcccgugagcaccuacaugcucaccaacagcgagcugcugucccucaucaacgacaugcccaucaccaacgaccagaagaagcugaugagcaacaacgugcagaucguccggcagcaguccuacagcaucaugugcaucaucaaggaggaggugcuggccuacgugguccagcucccccuguacggggugaucgacacgccgugcuggaagcugcacaccagcccccucugcaccaccaacacgaaggagggcuccaacaucugccugacccgcaccgaccgggggugguacugcgacaacgcgggcuccgugagcuucuucccccaggccgagaccugcaagguccaguccaaccgcguguucugcgacacgaugaacagccggacccuccccuccgaggucaaccugugcaacguggacaucuucaacccgaaguacgacugcaagaucaugaccagcaagaccgacguguccagcuccgucaucacgagccugggcgccaucguguccugcuacgggaagaccaagugcaccgccagcaacaagaaccggggcaucaucaagaccuucuccaacgggugcgacuacgugagcaacaagggcgucgacacggugagcgugggcaacacccucuacuacgucaacaagcaggaggggaagucccuguacgugaagggcgagcccaucaucaacuucuacgacccccugguguuccccagcgacgaguucgacgccuccaucagccaggucaacgagaagaucaaccagucccucgcguucauccgcaagagcgacgagcugcugcacaacgugaacgccgggaaguccaccaccaacaucaugaucaccacgaucaucaucgugaucaucgucauccuccugagccugaucgccgugggccuccugcuguacugcaaggcccggugaggacuaguacuggcugcaucucccuuuccucuguccuccauccuucucccaggauggugaagggggaccugguacccagugauccccaccccaggauccuaaaucaugacuuaccugcuaauaaaaacucauuggaaaagugagaagaucuaaaaaaaaaaaaaaaaaaaaaaaaaaaaaaaaaaaaaaaaaaaaaaaaaaaaaaaaaaaaaaaaugcaucccccccccccccccccccccccccccccccaaaggcucuuuucagagccaccagaauu

SEQ ID NO: 4454 - RNA, 1901 nt, Artificial Sequence
  mRNA product Design f-3 comprising derived and/or modified sequence from HRSV(A2)__F-del_DSCav1_mut0 (opt2)
gggagagucccgcagucggcguccagcggcucugcuuguucgugugugugucguugcaggccuuauucaagcuuaccauggagcuccucauccucaaggccaacgccaucaccaccauccucaccgccgucaccuucugcuucgccuccggccagaacaucaccgaggaguucuaccaguccaccugcuccgccgucuccaagggcuaccucuccgcccuccgcaccggcugguacaccuccgucaucaccaucgagcucuccaacaucaaggagaacaagugcaacggcaccgacgccaaggucaagcucaucaagcaggagcucgacaaguacaagaacgccgucaccgagcuccagcuccucaugcaguccacccccgccaccggcuccggcuccgccaucgccuccggcgucgccgucugcaagguccuccaccucgagggcgaggucaacaagaucaaguccgcccuccucuccaccaacaaggccgucgucucccucuccaacggcgucuccguccucaccuucaagguccucgaccucaagaacuacaucgacaagcagcuccuccccauccucaacaagcaguccugcuccaucuccaacaucgagaccgucaucgaguuccagcagaagaacaaccgccuccucgagaucacccgcgaguucuccgucaacgccggcgucaccacccccgucuccaccuacaugcucaccaacuccgagcuccucucccucaucaacgacaugcccaucaccaacgaccagaagaagcucauguccaacaacguccagaucguccgccagcaguccuacuccaucaugugcaucaucaaggaggagguccucgccuacgucguccagcucccccucuacggcgucaucgacacccccugcuggaagcuccacaccuccccccucugcaccaccaacaccaaggagggcuccaacaucugccucacccgcaccgaccgcggcugguacugcgacaacgccggcuccgucuccuucuucccccaggccgagaccugcaagguccaguccaaccgcgucuucugcgacaccaugaacucccgcacccuccccuccgaggucaaccucugcaacgucgacaucuucaaccccaaguacgacugcaagaucaugaccuccaagaccgacgucuccuccuccgucaucaccucccucggcgccaucgucuccugcuacggcaagaccaagugcaccgccuccaacaagaaccgcggcaucaucaagaccuucuccaacggcugcgacuacgucuccaacaagggcgucgacaccgucuccgucggcaacacccucuacuacgucaacaagcaggagggcaagucccucuacgucaagggcgagcccaucaucaacuucuacgacccccucgucuuccccuccgacgaguucgacgccuccaucucccaggucaacgagaagaucaaccagucccucgccuucauccgcaaguccgacgagcuccuccacaacgucaacgccggcaaguccaccaccaacaucaugaucaccaccaucaucaucgucaucaucgucauccuccucucccucaucgccgucggccuccuccucuacugcaaggcccgcugaggacuaguacuggcugcaucucccuuuccucuguccuccauccuucucccaggauggugaagggggaccugguacccagugauccccaccccaggauccuaaaucaugacuuaccugcuaauaaaaacucauuggaaaagugagaagaucuaaaaaaaaaaaaaaaaaaaaaaaaaaaaaaaaaaaaaaaaaaaaaaaaaaaaaaaaaaaaaaaaugcaucccccccccccccccccccccccccccccccaaaggcucuuuucagagccaccagaauu

SEQ ID NO: 4455 - RNA, 1901 nt, Artificial Sequence
  mRNA product Design f-3 comprising derived and/or modified sequence from HRSV(A2)__F-del_DSCav1_mut0 (opt3)
gggagagucccgcagucggcguccagcggcucugcuuguucgugugugugucguugcaggccuuauucaagcuuaccauggagcugcucauccuuaaggccaacgcuauuaccacaauacugacugcagugacguucugcuuugccagcggccagaauaucaccgaagaguucuaccaauccacauguucugcggucucaaaaggguauuugagugcuuuaagaacuggaugguacaccagcguuauuacaaucgaacuguccaacauuaaggagaauaaaugcaacgguaccgacgccaaggugaaacuaaucaagcaggaacucgauaaguauaaaaaugcaguaacugagcugcagcuucugaugcagucuacacccgccaccggcucggggucagcuauagcaagcggaguggccgucuguaagguguugcaccucgagggcgaaguuaacaaaaucaagagugcucugcuguccacgaauaaagccguggucucucucagcaacgguguguccguauuaacuuuuaagguucuggaccuuaagaauuacauugauaaacaauugcugccuauccuaaacaagcagucaugcaguauuagcaauaucgagaccgugauagaguuccagcagaaaaacaauaggcuccuggaaauuacacgggaguuuucugucaacgcgggggugacuaccccaguguccacauauaugcuuaccaauucagaacuguugagccucaucaacgacaugccgauuacgaacgaucaaaagaaacugaugaguaauaacguccagaucguucgccagcagucuuacuccaucauguguauuauaaaggaggaaguguuagcauauguagugcaacugccccucuacggagucaucgacacuccuugcuggaaacuucauacaagcccacuguguaccacuaauacaaaggagggcucgaacauuugcuugacccgaacggaucguggcugguacugugacaaugccgggucuguguccuucuuuccccaggcugaaaccugcaagguucagucaaacagaguguucugugauacaaugaauaguagaacucugccuagcgaggucaaccucugcaauguggacaucuuuaacccaaaauaugauugcaagauaaugaccuccaaaacagacguaucuagcucaguuauuaccagucugggagccaucguguccuguuacgguaagacuaaaugcacagcaagcaauaagaacaggggcaucauuaagaccuucucuaaugggugugauuaugucucaaacaaaggaguggacacugucagugugggcaauacgcuuuacuauguuaacaagcaagaggguaaaagccuguacgugaagggggaacccaucauuaacuuuuaugacccuuugguauucccauccgaugaguuugacgcuucuauaucgcaggucaaugagaaaaucaaccagagccucgccuucauucggaaguccgaugaacuguuacacaaugugaacgcgggaaagucaacaaccaauaucaugaucacuaccauuauaaucguuauuaucgugauucugcuaagucucaucgccgucggccugcuuuuguacugcaaagcacgcugaggacuaguacuggcugcaucucccuuuccucuguccuccauccuucucccaggauggugaagggggaccugguacccagugauccccaccccaggauccuaaaucaugacuuaccugcuaauaaaaacucauuggaaaagugagaagaucuaaaaaaaaaaaaaaaaaaaaaaaaaaaaaaaaaaaaaaaaaaaaaaaaaaaaaaaaaaaaaaaaugcaucccccccccccccccccccccccccccccccaaaggcucuuuucagagccaccagaauu

SEQ ID NO: 4456 - RNA, 1901 nt, Artificial Sequence
  mRNA product Design f-3 comprising derived and/or modified sequence from HRSV(A2)__F-del_DSCav1_mut0 (opt4)
gggagagucccgcagucggcguccagcggcucugcuuguucgugugugugucguugcaggccuuauucaagcuuaccauggagcugcugauccugaaggccaacgccaucaccaccauccugaccgccgugaccuucugcuucgccagcggccagaacaucaccgaggaguucuaccagagcaccugcagcgccgugagcaagggcuaccugagcgcccugagaaccggcugguacaccagcgugaucaccaucgagcugagcaacaucaaggagaacaagugcaacggcaccgacgccaaggugaagcugaucaagcaggagcuggacaaguacaagaacgccgugaccgagcugcagcugcugaugcagagcacccccgccaccggcagcggcagcgccaucgccagcggcguggccgugugcaaggugcugcaccuggagggcgaggugaacaagaucaagagcgcccugcugagcaccaacaaggccguggugagccugagcaacggcgugagcgugcugaccuucaaggugcuggaccugaagaacuacaucgacaagcagcugcugcccauccugaacaagcagagcugcagcaucagcaacaucgagaccgugaucgaguuccagcagaagaacaacagacugcuggagaucaccagagaguucagcgugaacgccggcgugaccacccccgugagcaccuacaugcugaccaacagcgagcugcugagccugaucaacgacaugcccaucaccaacgaccagaagaagcugaugagcaacaacgugcagaucgugagacagcagagcuacagcaucaugugcaucaucaaggaggaggugcuggccuacguggugcagcugccccuguacggcgugaucgacacccccugcuggaagcugcacaccagcccccugugcaccaccaacaccaaggagggcagcaacaucugccugaccagaaccgacagaggcugguacugcgacaacgccggcagcgugagcuucuucccccaggccgagaccugcaaggugcagagcaacagaguguucugcgacaccaugaacagcagaacccugcccagcgaggugaaccugugcaacguggacaucuucaaccccaaguacgacugcaagaucaugaccagcaagaccgacgugagcagcagcgugaucaccagccugggcgccaucgugagcugcuacggcaagaccaagugcaccgccagcaacaagaacagaggcaucaucaagaccuucagcaacggcugcgacuacgugagcaacaagggcguggacaccgugagcgugggcaacacccuguacuacgugaacaagcaggagggcaagagccuguacgugaagggcgagcccaucaucaacuucuacgacccccugguguuccccagcgacgaguucgacgccagcaucagccaggugaacgagaagaucaaccagagccuggccuucaucagaaagagcgacgagcugcugcacaacgugaacgccggcaagagcaccaccaacaucaugaucaccaccaucaucaucgugaucaucgugauccugcugagccugaucgccgugggccugcugcuguacugcaaggccagaugaggacuaguacuggcugcaucucccuuuccucuguccuccauccuucucccaggauggugaagggggaccugguacccagugauccccaccccaggauccuaaaucaugacuuaccugcuaauaaaaacucauuggaaaagugagaagaucuaaaaaaaaaaaaaaaaaaaaaaaaaaaaaaaaaaaaaaaaaaaaaaaaaaaaaaaaaaaaaaaaugcaucccccccccccccccccccccccccccccccaaaggcucuuuucagagccaccagaauu

SEQ ID NO: 4457 - RNA, 1901 nt, Artificial Sequence
  mRNA product Design f-3 comprising derived and/or modified sequence from HRSV(A2)__F-del_DSCav1_mut0 (opt5)
gggagagucccgcagucggcguccagcggcucugcuuguucgugugugugucguugcaggccuuauucaagcuuaccauggagcugcucauccugaaggccaacgcuauuaccacaauccuuacggccgugaccuucugcuuugcgagcggccagaauauuacagaagaguucuaccaauccaccuguucugcugucagcaaaggguaucuguccgcccucagaacaggaugguacaccucuguuaucacaauugaacugagcaacaucaaggagaauaaaugcaacggcaccgacgccaaggugaaacuuaucaagcaggaacuggauaaguauaaaaaugcugugacggagcuccagcugcugaugcaguccacccccgccacagggucuggaagcgcuauugccuccggcgucgcgguguguaagguucuccaccuggagggggaagugaacaaaaucaagagcgcccuucugucuaccaauaaagcugucgugucccucagcaacggaguuucugugcugacauuuaagguccuugaccugaagaauuacauugauaaacaacuccugccuauccugaacaagcaguccugcagcauuucuaauaucgagaccgugauugaguuccagcagaaaaacaaucggcuccuggaaaucacgcgcgaguuuuccgugaacgccggcgucacaaccccgguuagcacauauaugcuuaccaauuccgaacugcucucucugaucaacgacaugcccauuaccaacgaucaaaagaaacuuaugagcaauaacgugcagaucgugagacagcaguccuacagcauuauguguaucauuaaggaggaaguccuggcuuaugugguucaacucccucuguacggcgugaucgacacacccugcuggaaacugcauacgucuccucucuguaccacaaauaccaaggagggguccaacaucugccugacacggaccgaucgcggaugguacugugacaaugccggcagcgucucuuucuuuccccaggcggaaacgugcaaggugcagagcaacagaguuuucugugauacaaugaacuccagaacccugccuucugaggugaaucucugcaaugucgacauuuuuaacccgaaauaugauugcaagaucaugaccagcaaaacagacguguccagcucugucauuaccucccugggggccaucgugagcuguuacggaaagacaaaaugcacggcuucuaauaagaaccggggcauuaucaagaccuucuccaaugggugugauuauguuagcaacaaaggaguggacacagucuccgugggcaauacccuuuacuauguuaacaagcaagagggcaaaucucuguacgugaagggggaacccaucauuaacuuuuaugacccucucgucuuccccagcgaugaguuugacgccuccaucucucaggugaaugagaaaauuaaccagagccuggcuuucauccgcaaguccgaugaacugcuccacaaugugaacgccggaaagagcacaaccaauauuaugaucacgaccauuaucaucguuauuaucgucauucugcuuucucugaucgccgugggccuccugcuguacugcaaagcuagaugaggacuaguacuggcugcaucucccuuuccucuguccuccauccuucucccaggauggugaagggggaccugguacccagugauccccaccccaggauccuaaaucaugacuuaccugcuaauaaaaacucauuggaaaagugagaagaucuaaaaaaaaaaaaaaaaaaaaaaaaaaaaaaaaaaaaaaaaaaaaaaaaaaaaaaaaaaaaaaaaugcaucccccccccccccccccccccccccccccccaaaggcucuuuucagagccaccagaauu

SEQ ID NO: 4458 - RNA, 1901 nt, Artificial Sequence
  mRNA product Design f-3 comprising derived and/or modified sequence from HRSV(A2)__F-del_DSCav1_mut0 (opt6)
gggagagucccgcagucggcguccagcggcucugcuuguucgugugugugucguugcaggccuuauucaagcuuaccauggaauuacucauccucaaagcaaacgcaauaacaacaauacuaacagcagucacuuucugcuucgcauccggacaaaauaucacagaagaauuuuaccaauccaccugcucugcugucuccaaaggauaccuaucugcccucagaaccgguugguauacaucugucauaaccauagaacuaucaaacauuaaagaaaacaaauguaacggaacagacgcaaaagucaaacuuauaaaacaagaauuagacaaauacaaaaacgcagucacagaauuacaacuacuaaugcaaucaaccccagcaaccggaucaggauccgcaauagcuucaggaguagcaguauguaaaguucuacacuuagaaggagaagucaacaaaauuaaauccgcacuauuaucaaccaacaaagcagucguaucuuuaucaaacggaguaucuguacuuacauucaaaguacuagaccuaaaaaauuacauugauaaacaauuacuaccaauacuaaacaaacaaucauguuccaucucuaacauagaaacaguaauagaauuucaacaaaaaaauaacagauuacuugaaaucacccgagaauuuucaguaaacgcaggaguaaccacacccguaucuacauacaugcuaacaaacucugaacuucugagccuaauaaaugacaugccaauaaccaacgaccaaaaaaaacuaauguccaacaacguacaaauaguacgacaacaaucuuacucaaucaugugcauaaucaaagaagaaguacuagcuuauguaguccaacuuccacucuacggaguaauagacacccccugcuggaaacuacacacaucaccacuaugcacaacaaacacaaaagaaggcucaaacauaugccuaacaagaacugacagaggaugguauugugacaaugcaggcucugucucauucuuuccacaagccgaaacaugcaaaguucaaucaaaccgaguuuucugugacacaaugaacucuagaacucucccaucagaagucaacuuaugcaacguugacauauucaacccaaaauaugacuguaaaauaaugacuuccaaaacugauguaucauccuccgucauaacaucccuaggagcuauuguaucauguuacgggaaaaccaaaugcacagccucaaacaaaaaccgcgguaucauaaaaacauuuucaaacggaugugauuacguaagcaauaaaggaguagacaccguaucaguaggaaauacacuauacuauguaaauaaacaagaaggaaaaucacuauaugucaaaggagaaccaaucauaaauuucuaugacccacuuguauucccauccgaugaauuugacgcaagcauuucacaggucaacgaaaaaauaaaccaaucacuagccuucaucagaaaaucagacgaacuacuacauaacguaaacgccggaaaaucaacaaccaacauaaugauaacaacaaucauaauaguuaucauaguaauacuacuaucucuaauagcugucggacucuuacuauauugcaaagcccgauaaggacuaguacuggcugcaucucccuuuccucuguccuccauccuucucccaggauggugaagggggaccugguacccagugauccccaccccaggauccuaaaucaugacuuaccugcuaauaaaaacucauuggaaaagugagaagaucuaaaaaaaaaaaaaaaaaaaaaaaaaaaaaaaaaaaaaaaaaaaaaaaaaaaaaaaaaaaaaaaaugcaucccccccccccccccccccccccccccccccaaaggcucuuuucagagccaccagaauu

SEQ ID NO: 4459 - RNA, 1901 nt, Artificial Sequence
  mRNA product Design f-3 comprising derived and/or modified sequence from HRSV(A2)__F-del_DSCav1_mut0 (opt11)
gggagagucccgcagucggcguccagcggcucugcuuguucgugugugugucguugcaggccuuauucaagcuuaccauggaacuacuaauccugaaagccaacgccauaaccacaauccuuaccgcagucaccuucugcuucgccuccggucaaaacaucacagaagaguucuaccaauccaccuguuccgcagucagcaaaggcuaccucuccgcacuccgaaccggaugguacaccagcgucaucaccaucgaacuauccaacauaaaggaaaauaagugcaaugguacagaugccaaggucaaacucauaaagcaagaacucgacaaauacaaaaacgccgucaccgaacuacaacuacuaaugcaaucuacccccgcaacaggcucagguuccgccauagccuccggcgucgccguuugcaaaguccuccaccucgaaggcgaaguaaacaaaaucaaauccgcccuacucucaaccaacaaagcagucgucucccucucaaacggagucucgguccucaccuucaaaguccucgaccucaaaaacuauauagacaaacaacuccuacccauacucaacaaacaguccugcagcauauccaacaucgaaaccgugaucgaguuccaacagaaaaacaacagacuccucgaaaucacucgagaguucuccguaaacgccggcgucacaaccccagucucaacauacaugcucaccaacagcgaacuccuaucacuaaucaacgacaugccuaucacaaaugaucagaagaaacuaaugagcaacaacguccaaaucguccgccaacaaucauacuccaucaugugcaucauaaaagaagaaguccuagccuacgugguccagcuaccccucuacggcguaauugacaccccuugcuggaaacuacacacuucaccccucugcacaaccaacaccaaagaagguucaaacaucugccucacacgaacagaccgcggcugguacugcgacaacgccggauccguauccuucuucccccaagcagaaaccugcaaaguucaauccaaccggguauucugcgacaccaugaacucaagaacccuucccuccgaaguaaaucuaugcaacgucgacauauucaacccaaaauacgacugcaaaaucaugaccuccaaaaccgaugucuccagcagcgucaucaccagccucggcgccaucgucuccugcuacggcaaaacaaaauguacagcauccaacaaaaaccgaggcauaaucaaaaccuucuccaacgggugcgauuacgucagcaacaaaggcgucgacaccgucuccgugggcaacacccuauacuacgucaacaaacaagaaggcaaaucacuguacguaaagggcgaacccaucaucaacuucuaugacccucugguguucccauccgaugaauuugacgcauccauaucucaggucaacgaaaagaucaaccaaucccucgccuucauacgcaaauccgacgaacuccuacacaacgucaacgcugguaaaagcaccaccaacaucaugaucaccacaaucaucaucgucauaaucguuauccuacucucccuuauagcagucggacuccuccucuacugcaaagcccgcuaaggacuaguacuggcugcaucucccuuuccucuguccuccauccuucucccaggauggugaagggggaccugguacccagugauccccaccccaggauccuaaaucaugacuuaccugcuaauaaaaacucauuggaaaagugagaagaucuaaaaaaaaaaaaaaaaaaaaaaaaaaaaaaaaaaaaaaaaaaaaaaaaaaaaaaaaaaaaaaaaugcaucccccccccccccccccccccccccccccccaaaggcucuuuucagagccaccagaauu

SEQ ID NO: 4460 - RNA, 2117 nt, Artificial Sequence
  mRNA product Design f-4 comprising derived and/or modified sequence from HRSV(A2)__F-del_DSCav1_mut0 (opt1)
gggagagucccgcagucggcguccagcggcucugcuuguucgugugugugucguugcaggccuuauucaagcuuaccauggagcugcucauccugaaggccaacgccaucaccaccauccugacggcggugaccuucugcuucgccagcggccagaacaucaccgaggaguucuaccaguccacgugcagcgccgucuccaagggguaccucagcgcccugcggaccggcugguacaccuccgugaucaccaucgagcugagcaacaucaaggagaacaagugcaacgggaccgacgccaaggugaagcucaucaagcaggagcuggacaaguacaagaacgcggucacggagcugcagcuccugaugcaguccaccccggcaaccggcuccggcuccgccaucgcgagcggcgucgccgugugcaaggugcugcaccucgagggggaggucaacaagaucaagagcgcccugcuguccaccaacaaggccguggugagccucuccaacggcgucagcgugcugaccuucaaggugcuggaccucaagaacuacaucgacaagcagcugcugcccauccugaacaagcagagcugcuccaucagcaacaucgagacggugaucgaguuccagcagaagaacaaccggcuccuggagaucacccgcgaguucagcgugaacgccggggucaccacccccguguccacguacaugcugaccaacagcgagcuccugucccugaucaacgacaugccgaucaccaacgaccagaagaagcucaugagcaacaacgugcagaucguccggcagcaguccuacagcaucaugugcaucaucaaggaggaggugcuggcguacgugguccagcugccccucuacggcgugaucgacacccccugcuggaagcugcacacgagcccccugugcaccaccaacaccaaggagggguccaacaucugccucacgcgcaccgaccggggcugguacugcgacaacgccggcagcgucuccuucuucccgcaggccgagaccugcaaggugcagagcaaccgcguguucugcgacaccaugaacucccggacgcugcccagcgagguaaaccucugcaacgucgacaucuucaaccccaaguacgacugcaagaucaugaccuccaagaccgacgugagcuccagcgugaucaccucccugggggccaucgucagcugcuacggcaagacgaagugcaccgccagcaacaagaaccgggggaucaucaagaccuucuccaacggcugcgacuacgugagcaacaagggcguggacaccguguccgucgggaacacccuguacuacgugaacaagcaggagggcaagagccucuacgugaagggggagcccaucaucaacuucuacgacccgcuggucuuccccuccgacgaguucgacgcgagcaucucccaggugaacgagaagaucaaccagagccuggccuucauccgcaaguccgacgagcugcuccacaacgugaacgccggcaagagcacgaccaacaucaugaucaccaccaucaucaucgucaucaucgugauccugcugucccucaucgccguggggcugcugcucuacugcaaggcccggugaggacuagugaagggaacacccaaauuuaauucagccuuaagcacaauuaauuaagagugaaacguaauuguacaagcaguuggucacccaccauagggcaugaucaacaccgcaaccuuuccuuuuucccccagugauucugaaaaaccccucuucccuucagcuugcuuagauguuccaaauuuaguaagcuuaaggcggccuacagaagaaaaagaaaaaaaaggccacaaaaguucccucucacuuucaguaaauaaaauaaaagcagcaacagaaauaaagaaauaaaugaaauucaaaaugaaauaaauauuguguugugcagcauuaaaaaaucaauaaaaauuaaaaaugagcaagaucuaaaaaaaaaaaaaaaaaaaaaaaaaaaaaaaaaaaaaaaaaaaaaaaaaaaaaaaaaaaaaaaaugcaucccccccccccccccccccccccccccccccaaaggcucuuuucagagccaccagaauu

SEQ ID NO: 4461 - RNA, 2117 nt, Artificial Sequence
  mRNA product Design f-4 comprising derived and/or modified sequence from HRSV(A2)__F-del_DSCav1_mut0 (opt1)
gggagagucccgcagucggcguccagcggcucugcuuguucgugugugugucguugcaggccuuauucaagcuuaccauggagcugcucauccugaaggccaacgccaucaccaccauccugacggcggugaccuucugcuucgccagcggccagaacaucaccgaggaguucuaccaguccacgugcagcgccgucuccaagggguaccucagcgcccugcgcaccggcugguacaccuccgugaucaccaucgagcugagcaacaucaaggagaacaagugcaacgggaccgacgccaaggugaagcucaucaagcaggagcuggacaaguacaagaacgcggucacggagcugcagcuccugaugcaguccacccccgccaccggcagcggguccgccaucgccagcggcguggcggugugcaagguccugcaccucgagggcgaggugaacaagaucaaguccgcccugcugagcaccaacaaggccguggucucccucagcaacgggguguccgugcugacguucaagguccuggaccucaagaacuacaucgacaagcagcugcugccgauccucaacaagcagagcugcuccaucagcaacaucgagaccgugaucgaguuccagcagaagaacaaccggcugcuggagaucacccgcgaguucuccgugaacgccggcgucaccacgcccgugagcaccuacaugcucaccaacagcgagcugcugucccucaucaacgacaugcccaucaccaacgaccagaagaagcugaugagcaacaacgugcagaucguccggcagcaguccuacagcaucaugugcaucaucaaggaggaggugcuggccuacgugguccagcucccccuguacggggugaucgacacgccgugcuggaagcugcacaccagcccccucugcaccaccaacacgaaggagggcuccaacaucugccugacccgcaccgaccgggggugguacugcgacaacgcgggcuccgugagcuucuucccccaggccgagaccugcaagguccaguccaaccgcguguucugcgacacgaugaacagccggacccuccccuccgaggucaaccugugcaacguggacaucuucaacccgaaguacgacugcaagaucaugaccagcaagaccgacguguccagcuccgucaucacgagccugggcgccaucguguccugcuacgggaagaccaagugcaccgccagcaacaagaaccggggcaucaucaagaccuucuccaacgggugcgacuacgugagcaacaagggcgucgacacggugagcgugggcaacacccucuacuacgucaacaagcaggaggggaagucccuguacgugaagggcgagcccaucaucaacuucuacgacccccugguguuccccagcgacgaguucgacgccuccaucagccaggucaacgagaagaucaaccagucccucgcguucauccgcaagagcgacgagcugcugcacaacgugaacgccgggaaguccaccaccaacaucaugaucaccacgaucaucaucgugaucaucgucauccuccugagccugaucgccgugggccuccugcuguacugcaaggcccggugaggacuagugaagggaacacccaaauuuaauucagccuuaagcacaauuaauuaagagugaaacguaauuguacaagcaguuggucacccaccauagggcaugaucaacaccgcaaccuuuccuuuuucccccagugauucugaaaaaccccucuucccuucagcuugcuuagauguuccaaauuuaguaagcuuaaggcggccuacagaagaaaaagaaaaaaaaggccacaaaaguucccucucacuuucaguaaauaaaauaaaagcagcaacagaaauaaagaaauaaaugaaauucaaaaugaaauaaauauuguguugugcagcauuaaaaaaucaauaaaaauuaaaaaugagcaagaucuaaaaaaaaaaaaaaaaaaaaaaaaaaaaaaaaaaaaaaaaaaaaaaaaaaaaaaaaaaaaaaaaugcaucccccccccccccccccccccccccccccccaaaggcucuuuucagagccaccagaauu

SEQ ID NO: 4462 - RNA, 2117 nt, Artificial Sequence
  mRNA product Design f-4 comprising derived and/or modified sequence from HRSV(A2)__F-del_DSCav1_mut0 (opt2)
gggagagucccgcagucggcguccagcggcucugcuuguucgugugugugucguugcaggccuuauucaagcuuaccauggagcuccucauccucaaggccaacgccaucaccaccauccucaccgccgucaccuucugcuucgccuccggccagaacaucaccgaggaguucuaccaguccaccugcuccgccgucuccaagggcuaccucuccgcccuccgcaccggcugguacaccuccgucaucaccaucgagcucuccaacaucaaggagaacaagugcaacggcaccgacgccaaggucaagcucaucaagcaggagcucgacaaguacaagaacgccgucaccgagcuccagcuccucaugcaguccacccccgccaccggcuccggcuccgccaucgccuccggcgucgccgucugcaagguccuccaccucgagggcgaggucaacaagaucaaguccgcccuccucuccaccaacaaggccgucgucucccucuccaacggcgucuccguccucaccuucaagguccucgaccucaagaacuacaucgacaagcagcuccuccccauccucaacaagcaguccugcuccaucuccaacaucgagaccgucaucgaguuccagcagaagaacaaccgccuccucgagaucacccgcgaguucuccgucaacgccggcgucaccacccccgucuccaccuacaugcucaccaacuccgagcuccucucccucaucaacgacaugcccaucaccaacgaccagaagaagcucauguccaacaacguccagaucguccgccagcaguccuacuccaucaugugcaucaucaaggaggagguccucgccuacgucguccagcucccccucuacggcgucaucgacacccccugcuggaagcuccacaccuccccccucugcaccaccaacaccaaggagggcuccaacaucugccucacccgcaccgaccgcggcugguacugcgacaacgccggcuccgucuccuucuucccccaggccgagaccugcaagguccaguccaaccgcgucuucugcgacaccaugaacucccgcacccuccccuccgaggucaaccucugcaacgucgacaucuucaaccccaaguacgacugcaagaucaugaccuccaagaccgacgucuccuccuccgucaucaccucccucggcgccaucgucuccugcuacggcaagaccaagugcaccgccuccaacaagaaccgcggcaucaucaagaccuucuccaacggcugcgacuacgucuccaacaagggcgucgacaccgucuccgucggcaacacccucuacuacgucaacaagcaggagggcaagucccucuacgucaagggcgagcccaucaucaacuucuacgacccccucgucuuccccuccgacgaguucgacgccuccaucucccaggucaacgagaagaucaaccagucccucgccuucauccgcaaguccgacgagcuccuccacaacgucaacgccggcaaguccaccaccaacaucaugaucaccaccaucaucaucgucaucaucgucauccuccucucccucaucgccgucggccuccuccucuacugcaaggcccgcugaggacuagugaagggaacacccaaauuuaauucagccuuaagcacaauuaauuaagagugaaacguaauuguacaagcaguuggucacccaccauagggcaugaucaacaccgcaaccuuuccuuuuucccccagugauucugaaaaaccccucuucccuucagcuugcuuagauguuccaaauuuaguaagcuuaaggcggccuacagaagaaaaagaaaaaaaaggccacaaaaguucccucucacuuucaguaaauaaaauaaaagcagcaacagaaauaaagaaauaaaugaaauucaaaaugaaauaaauauuguguugugcagcauuaaaaaaucaauaaaaauuaaaaaugagcaagaucuaaaaaaaaaaaaaaaaaaaaaaaaaaaaaaaaaaaaaaaaaaaaaaaaaaaaaaaaaaaaaaaaugcaucccccccccccccccccccccccccccccccaaaggcucuuuucagagccaccagaauu

SEQ ID NO: 4463 - RNA, 2117 nt, Artificial Sequence
  mRNA product Design f-4 comprising derived and/or modified sequence from HRSV(A2)__F-del_DSCav1_mut0 (opt3)
gggagagucccgcagucggcguccagcggcucugcuuguucgugugugugucguugcaggccuuauucaagcuuaccauggagcugcucauccuuaaggccaacgcuauuaccacaauacugacugcagugacguucugcuuugccagcggccagaauaucaccgaagaguucuaccaauccacauguucugcggucucaaaaggguauuugagugcuuuaagaacuggaugguacaccagcguuauuacaaucgaacuguccaacauuaaggagaauaaaugcaacgguaccgacgccaaggugaaacuaaucaagcaggaacucgauaaguauaaaaaugcaguaacugagcugcagcuucugaugcagucuacacccgccaccggcucggggucagcuauagcaagcggaguggccgucuguaagguguugcaccucgagggcgaaguuaacaaaaucaagagugcucugcuguccacgaauaaagccguggucucucucagcaacgguguguccguauuaacuuuuaagguucuggaccuuaagaauuacauugauaaacaauugcugccuauccuaaacaagcagucaugcaguauuagcaauaucgagaccgugauagaguuccagcagaaaaacaauaggcuccuggaaauuacacgggaguuuucugucaacgcgggggugacuaccccaguguccacauauaugcuuaccaauucagaacuguugagccucaucaacgacaugccgauuacgaacgaucaaaagaaacugaugaguaauaacguccagaucguucgccagcagucuuacuccaucauguguauuauaaaggaggaaguguuagcauauguagugcaacugccccucuacggagucaucgacacuccuugcuggaaacuucauacaagcccacuguguaccacuaauacaaaggagggcucgaacauuugcuugacccgaacggaucguggcugguacugugacaaugccgggucuguguccuucuuuccccaggcugaaaccugcaagguucagucaaacagaguguucugugauacaaugaauaguagaacucugccuagcgaggucaaccucugcaauguggacaucuuuaacccaaaauaugauugcaagauaaugaccuccaaaacagacguaucuagcucaguuauuaccagucugggagccaucguguccuguuacgguaagacuaaaugcacagcaagcaauaagaacaggggcaucauuaagaccuucucuaaugggugugauuaugucucaaacaaaggaguggacacugucagugugggcaauacgcuuuacuauguuaacaagcaagaggguaaaagccuguacgugaagggggaacccaucauuaacuuuuaugacccuuugguauucccauccgaugaguuugacgcuucuauaucgcaggucaaugagaaaaucaaccagagccucgccuucauucggaaguccgaugaacuguuacacaaugugaacgcgggaaagucaacaaccaauaucaugaucacuaccauuauaaucguuauuaucgugauucugcuaagucucaucgccgucggccugcuuuuguacugcaaagcacgcugaggacuagugaagggaacacccaaauuuaauucagccuuaagcacaauuaauuaagagugaaacguaauuguacaagcaguuggucacccaccauagggcaugaucaacaccgcaaccuuuccuuuuucccccagugauucugaaaaaccccucuucccuucagcuugcuuagauguuccaaauuuaguaagcuuaaggcggccuacagaagaaaaagaaaaaaaaggccacaaaaguucccucucacuuucaguaaauaaaauaaaagcagcaacagaaauaaagaaauaaaugaaauucaaaaugaaauaaauauuguguugugcagcauuaaaaaaucaauaaaaauuaaaaaugagcaagaucuaaaaaaaaaaaaaaaaaaaaaaaaaaaaaaaaaaaaaaaaaaaaaaaaaaaaaaaaaaaaaaaaugcaucccccccccccccccccccccccccccccccaaaggcucuuuucagagccaccagaauu

SEQ ID NO: 4464 - RNA, 2117 nt, Artificial Sequence
  mRNA product Design f-4 comprising derived and/or modified sequence from HRSV(A2)__F-del_DSCav1_mut0 (opt4)
gggagagucccgcagucggcguccagcggcucugcuuguucgugugugugucguugcaggccuuauucaagcuuaccauggagcugcugauccugaaggccaacgccaucaccaccauccugaccgccgugaccuucugcuucgccagcggccagaacaucaccgaggaguucuaccagagcaccugcagcgccgugagcaagggcuaccugagcgcccugagaaccggcugguacaccagcgugaucaccaucgagcugagcaacaucaaggagaacaagugcaacggcaccgacgccaaggugaagcugaucaagcaggagcuggacaaguacaagaacgccgugaccgagcugcagcugcugaugcagagcacccccgccaccggcagcggcagcgccaucgccagcggcguggccgugugcaaggugcugcaccuggagggcgaggugaacaagaucaagagcgcccugcugagcaccaacaaggccguggugagccugagcaacggcgugagcgugcugaccuucaaggugcuggaccugaagaacuacaucgacaagcagcugcugcccauccugaacaagcagagcugcagcaucagcaacaucgagaccgugaucgaguuccagcagaagaacaacagacugcuggagaucaccagagaguucagcgugaacgccggcgugaccacccccgugagcaccuacaugcugaccaacagcgagcugcugagccugaucaacgacaugcccaucaccaacgaccagaagaagcugaugagcaacaacgugcagaucgugagacagcagagcuacagcaucaugugcaucaucaaggaggaggugcuggccuacguggugcagcugccccuguacggcgugaucgacacccccugcuggaagcugcacaccagcccccugugcaccaccaacaccaaggagggcagcaacaucugccugaccagaaccgacagaggcugguacugcgacaacgccggcagcgugagcuucuucccccaggccgagaccugcaaggugcagagcaacagaguguucugcgacaccaugaacagcagaacccugcccagcgaggugaaccugugcaacguggacaucuucaaccccaaguacgacugcaagaucaugaccagcaagaccgacgugagcagcagcgugaucaccagccugggcgccaucgugagcugcuacggcaagaccaagugcaccgccagcaacaagaacagaggcaucaucaagaccuucagcaacggcugcgacuacgugagcaacaagggcguggacaccgugagcgugggcaacacccuguacuacgugaacaagcaggagggcaagagccuguacgugaagggcgagcccaucaucaacuucuacgacccccugguguuccccagcgacgaguucgacgccagcaucagccaggugaacgagaagaucaaccagagccuggccuucaucagaaagagcgacgagcugcugcacaacgugaacgccggcaagagcaccaccaacaucaugaucaccaccaucaucaucgugaucaucgugauccugcugagccugaucgccgugggccugcugcuguacugcaaggccagaugaggacuagugaagggaacacccaaauuuaauucagccuuaagcacaauuaauuaagagugaaacguaauuguacaagcaguuggucacccaccauagggcaugaucaacaccgcaaccuuuccuuuuucccccagugauucugaaaaaccccucuucccuucagcuugcuuagauguuccaaauuuaguaagcuuaaggcggccuacagaagaaaaagaaaaaaaaggccacaaaaguucccucucacuuucaguaaauaaaauaaaagcagcaacagaaauaaagaaauaaaugaaauucaaaaugaaauaaauauuguguugugcagcauuaaaaaaucaauaaaaauuaaaaaugagcaagaucuaaaaaaaaaaaaaaaaaaaaaaaaaaaaaaaaaaaaaaaaaaaaaaaaaaaaaaaaaaaaaaaaugcaucccccccccccccccccccccccccccccccaaaggcucuuuucagagccaccagaauu

SEQ ID NO: 4465 - RNA, 2117 nt, Artificial Sequence
  mRNA product Design f-4 comprising derived and/or modified sequence from HRSV(A2)__F-del_DSCav1_mut0 (opt5)
gggagagucccgcagucggcguccagcggcucugcuuguucgugugugugucguugcaggccuuauucaagcuuaccauggagcugcucauccugaaggccaacgcuauuaccacaauccuuacggccgugaccuucugcuuugcgagcggccagaauauuacagaagaguucuaccaauccaccuguucugcugucagcaaaggguaucuguccgcccucagaacaggaugguacaccucuguuaucacaauugaacugagcaacaucaaggagaauaaaugcaacggcaccgacgccaaggugaaacuuaucaagcaggaacuggauaaguauaaaaaugcugugacggagcuccagcugcugaugcaguccacccccgccacagggucuggaagcgcuauugccuccggcgucgcgguguguaagguucuccaccuggagggggaagugaacaaaaucaagagcgcccuucugucuaccaauaaagcugucgugucccucagcaacggaguuucugugcugacauuuaagguccuugaccugaagaauuacauugauaaacaacuccugccuauccugaacaagcaguccugcagcauuucuaauaucgagaccgugauugaguuccagcagaaaaacaaucggcuccuggaaaucacgcgcgaguuuuccgugaacgccggcgucacaaccccgguuagcacauauaugcuuaccaauuccgaacugcucucucugaucaacgacaugcccauuaccaacgaucaaaagaaacuuaugagcaauaacgugcagaucgugagacagcaguccuacagcauuauguguaucauuaaggaggaaguccuggcuuaugugguucaacucccucuguacggcgugaucgacacacccugcuggaaacugcauacgucuccucucuguaccacaaauaccaaggagggguccaacaucugccugacacggaccgaucgcggaugguacugugacaaugccggcagcgucucuuucuuuccccaggcggaaacgugcaaggugcagagcaacagaguuuucugugauacaaugaacuccagaacccugccuucugaggugaaucucugcaaugucgacauuuuuaacccgaaauaugauugcaagaucaugaccagcaaaacagacguguccagcucugucauuaccucccugggggccaucgugagcuguuacggaaagacaaaaugcacggcuucuaauaagaaccggggcauuaucaagaccuucuccaaugggugugauuauguuagcaacaaaggaguggacacagucuccgugggcaauacccuuuacuauguuaacaagcaagagggcaaaucucuguacgugaagggggaacccaucauuaacuuuuaugacccucucgucuuccccagcgaugaguuugacgccuccaucucucaggugaaugagaaaauuaaccagagccuggcuuucauccgcaaguccgaugaacugcuccacaaugugaacgccggaaagagcacaaccaauauuaugaucacgaccauuaucaucguuauuaucgucauucugcuuucucugaucgccgugggccuccugcuguacugcaaagcuagaugaggacuagugaagggaacacccaaauuuaauucagccuuaagcacaauuaauuaagagugaaacguaauuguacaagcaguuggucacccaccauagggcaugaucaacaccgcaaccuuuccuuuuucccccagugauucugaaaaaccccucuucccuucagcuugcuuagauguuccaaauuuaguaagcuuaaggcggccuacagaagaaaaagaaaaaaaaggccacaaaaguucccucucacuuucaguaaauaaaauaaaagcagcaacagaaauaaagaaauaaaugaaauucaaaaugaaauaaauauuguguugugcagcauuaaaaaaucaauaaaaauuaaaaaugagcaagaucuaaaaaaaaaaaaaaaaaaaaaaaaaaaaaaaaaaaaaaaaaaaaaaaaaaaaaaaaaaaaaaaaugcaucccccccccccccccccccccccccccccccaaaggcucuuuucagagccaccagaauu

SEQ ID NO: 4466 - RNA, 2117 nt, Artificial Sequence
  mRNA product Design f-4 comprising derived and/or modified sequence from HRSV(A2)__F-del_DSCav1_mut0 (opt6)
gggagagucccgcagucggcguccagcggcucugcuuguucgugugugugucguugcaggccuuauucaagcuuaccauggaauuacucauccucaaagcaaacgcaauaacaacaauacuaacagcagucacuuucugcuucgcauccggacaaaauaucacagaagaauuuuaccaauccaccugcucugcugucuccaaaggauaccuaucugcccucagaaccgguugguauacaucugucauaaccauagaacuaucaaacauuaaagaaaacaaauguaacggaacagacgcaaaagucaaacuuauaaaacaagaauuagacaaauacaaaaacgcagucacagaauuacaacuacuaaugcaaucaaccccagcaaccggaucaggauccgcaauagcuucaggaguagcaguauguaaaguucuacacuuagaaggagaagucaacaaaauuaaauccgcacuauuaucaaccaacaaagcagucguaucuuuaucaaacggaguaucuguacuuacauucaaaguacuagaccuaaaaaauuacauugauaaacaauuacuaccaauacuaaacaaacaaucauguuccaucucuaacauagaaacaguaauagaauuucaacaaaaaaauaacagauuacuugaaaucacccgagaauuuucaguaaacgcaggaguaaccacacccguaucuacauacaugcuaacaaacucugaacuucugagccuaauaaaugacaugccaauaaccaacgaccaaaaaaaacuaauguccaacaacguacaaauaguacgacaacaaucuuacucaaucaugugcauaaucaaagaagaaguacuagcuuauguaguccaacuuccacucuacggaguaauagacacccccugcuggaaacuacacacaucaccacuaugcacaacaaacacaaaagaaggcucaaacauaugccuaacaagaacugacagaggaugguauugugacaaugcaggcucugucucauucuuuccacaagccgaaacaugcaaaguucaaucaaaccgaguuuucugugacacaaugaacucuagaacucucccaucagaagucaacuuaugcaacguugacauauucaacccaaaauaugacuguaaaauaaugacuuccaaaacugauguaucauccuccgucauaacaucccuaggagcuauuguaucauguuacgggaaaaccaaaugcacagccucaaacaaaaaccgcgguaucauaaaaacauuuucaaacggaugugauuacguaagcaauaaaggaguagacaccguaucaguaggaaauacacuauacuauguaaauaaacaagaaggaaaaucacuauaugucaaaggagaaccaaucauaaauuucuaugacccacuuguauucccauccgaugaauuugacgcaagcauuucacaggucaacgaaaaaauaaaccaaucacuagccuucaucagaaaaucagacgaacuacuacauaacguaaacgccggaaaaucaacaaccaacauaaugauaacaacaaucauaauaguuaucauaguaauacuacuaucucuaauagcugucggacucuuacuauauugcaaagcccgauaaggacuagugaagggaacacccaaauuuaauucagccuuaagcacaauuaauuaagagugaaacguaauuguacaagcaguuggucacccaccauagggcaugaucaacaccgcaaccuuuccuuuuucccccagugauucugaaaaaccccucuucccuucagcuugcuuagauguuccaaauuuaguaagcuuaaggcggccuacagaagaaaaagaaaaaaaaggccacaaaaguucccucucacuuucaguaaauaaaauaaaagcagcaacagaaauaaagaaauaaaugaaauucaaaaugaaauaaauauuguguugugcagcauuaaaaaaucaauaaaaauuaaaaaugagcaagaucuaaaaaaaaaaaaaaaaaaaaaaaaaaaaaaaaaaaaaaaaaaaaaaaaaaaaaaaaaaaaaaaaugcaucccccccccccccccccccccccccccccccaaaggcucuuuucagagccaccagaauu

SEQ ID NO: 4467 - RNA, 2117 nt, Artificial Sequence
  mRNA product Design f-4 comprising derived and/or modified sequence from HRSV(A2)__F-del_DSCav1_mut0 (opt11)
gggagagucccgcagucggcguccagcggcucugcuuguucgugugugugucguugcaggccuuauucaagcuuaccauggaacuacuaauccugaaagccaacgccauaaccacaauccuuaccgcagucaccuucugcuucgccuccggucaaaacaucacagaagaguucuaccaauccaccuguuccgcagucagcaaaggcuaccucuccgcacuccgaaccggaugguacaccagcgucaucaccaucgaacuauccaacauaaaggaaaauaagugcaaugguacagaugccaaggucaaacucauaaagcaagaacucgacaaauacaaaaacgccgucaccgaacuacaacuacuaaugcaaucuacccccgcaacaggcucagguuccgccauagccuccggcgucgccguuugcaaaguccuccaccucgaaggcgaaguaaacaaaaucaaauccgcccuacucucaaccaacaaagcagucgucucccucucaaacggagucucgguccucaccuucaaaguccucgaccucaaaaacuauauagacaaacaacuccuacccauacucaacaaacaguccugcagcauauccaacaucgaaaccgugaucgaguuccaacagaaaaacaacagacuccucgaaaucacucgagaguucuccguaaacgccggcgucacaaccccagucucaacauacaugcucaccaacagcgaacuccuaucacuaaucaacgacaugccuaucacaaaugaucagaagaaacuaaugagcaacaacguccaaaucguccgccaacaaucauacuccaucaugugcaucauaaaagaagaaguccuagccuacgugguccagcuaccccucuacggcguaauugacaccccuugcuggaaacuacacacuucaccccucugcacaaccaacaccaaagaagguucaaacaucugccucacacgaacagaccgcggcugguacugcgacaacgccggauccguauccuucuucccccaagcagaaaccugcaaaguucaauccaaccggguauucugcgacaccaugaacucaagaacccuucccuccgaaguaaaucuaugcaacgucgacauauucaacccaaaauacgacugcaaaaucaugaccuccaaaaccgaugucuccagcagcgucaucaccagccucggcgccaucgucuccugcuacggcaaaacaaaauguacagcauccaacaaaaaccgaggcauaaucaaaaccuucuccaacgggugcgauuacgucagcaacaaaggcgucgacaccgucuccgugggcaacacccuauacuacgucaacaaacaagaaggcaaaucacuguacguaaagggcgaacccaucaucaacuucuaugacccucugguguucccauccgaugaauuugacgcauccauaucucaggucaacgaaaagaucaaccaaucccucgccuucauacgcaaauccgacgaacuccuacacaacgucaacgcugguaaaagcaccaccaacaucaugaucaccacaaucaucaucgucauaaucguuauccuacucucccuuauagcagucggacuccuccucuacugcaaagcccgcuaaggacuagugaagggaacacccaaauuuaauucagccuuaagcacaauuaauuaagagugaaacguaauuguacaagcaguuggucacccaccauagggcaugaucaacaccgcaaccuuuccuuuuucccccagugauucugaaaaaccccucuucccuucagcuugcuuagauguuccaaauuuaguaagcuuaaggcggccuacagaagaaaaagaaaaaaaaggccacaaaaguucccucucacuuucaguaaauaaaauaaaagcagcaacagaaauaaagaaauaaaugaaauucaaaaugaaauaaauauuguguugugcagcauuaaaaaaucaauaaaaauuaaaaaugagcaagaucuaaaaaaaaaaaaaaaaaaaaaaaaaaaaaaaaaaaaaaaaaaaaaaaaaaaaaaaaaaaaaaaaugcaucccccccccccccccccccccccccccccccaaaggcucuuuucagagccaccagaauu

SEQ ID NO: 4468 - RNA, 1893 nt, Artificial Sequence
  mRNA product Design f-5 comprising derived and/or modified sequence from HRSV(A2)__F-del_DSCav1_mut0 (opt1)
gggagacuuucccauucuguagcagaauuugguguugccuguggucuuggucccgcggagaagcuuaccauggagcugcucauccugaaggccaacgccaucaccaccauccugacggcggugaccuucugcuucgccagcggccagaacaucaccgaggaguucuaccaguccacgugcagcgccgucuccaagggguaccucagcgcccugcggaccggcugguacaccuccgugaucaccaucgagcugagcaacaucaaggagaacaagugcaacgggaccgacgccaaggugaagcucaucaagcaggagcuggacaaguacaagaacgcggucacggagcugcagcuccugaugcaguccaccccggcaaccggcuccggcuccgccaucgcgagcggcgucgccgugugcaaggugcugcaccucgagggggaggucaacaagaucaagagcgcccugcuguccaccaacaaggccguggugagccucuccaacggcgucagcgugcugaccuucaaggugcuggaccucaagaacuacaucgacaagcagcugcugcccauccugaacaagcagagcugcuccaucagcaacaucgagacggugaucgaguuccagcagaagaacaaccggcuccuggagaucacccgcgaguucagcgugaacgccggggucaccacccccguguccacguacaugcugaccaacagcgagcuccugucccugaucaacgacaugccgaucaccaacgaccagaagaagcucaugagcaacaacgugcagaucguccggcagcaguccuacagcaucaugugcaucaucaaggaggaggugcuggcguacgugguccagcugccccucuacggcgugaucgacacccccugcuggaagcugcacacgagcccccugugcaccaccaacaccaaggagggguccaacaucugccucacgcgcaccgaccggggcugguacugcgacaacgccggcagcgucuccuucuucccgcaggccgagaccugcaaggugcagagcaaccgcguguucugcgacaccaugaacucccggacgcugcccagcgagguaaaccucugcaacgucgacaucuucaaccccaaguacgacugcaagaucaugaccuccaagaccgacgugagcuccagcgugaucaccucccugggggccaucgucagcugcuacggcaagacgaagugcaccgccagcaacaagaaccgggggaucaucaagaccuucuccaacggcugcgacuacgugagcaacaagggcguggacaccguguccgucgggaacacccuguacuacgugaacaagcaggagggcaagagccucuacgugaagggggagcccaucaucaacuucuacgacccgcuggucuuccccuccgacgaguucgacgcgagcaucucccaggugaacgagaagaucaaccagagccuggccuucauccgcaaguccgacgagcugcuccacaacgugaacgccggcaagagcacgaccaacaucaugaucaccaccaucaucaucgucaucaucgugauccugcugucccucaucgccguggggcugcugcucuacugcaaggcccggugaggacuaguacuggcugcaucucccuuuccucuguccuccauccuucucccaggauggugaagggggaccugguacccagugauccccaccccaggauccuaaaucaugacuuaccugcuaauaaaaacucauuggaaaagugagaagaucuaaaaaaaaaaaaaaaaaaaaaaaaaaaaaaaaaaaaaaaaaaaaaaaaaaaaaaaaaaaaaaaaugcaucccccccccccccccccccccccccccccccaaaggcucuuuucagagccaccagaauu

SEQ ID NO: 4469 - RNA, 1893 nt, Artificial Sequence
  mRNA product Design f-5 comprising derived and/or modified sequence from HRSV(A2)__F-del_DSCav1_mut0 (opt1)
gggagacuuucccauucuguagcagaauuugguguugccuguggucuuggucccgcggagaagcuuaccauggagcugcucauccugaaggccaacgccaucaccaccauccugacggcggugaccuucugcuucgccagcggccagaacaucaccgaggaguucuaccaguccacgugcagcgccgucuccaagggguaccucagcgcccugcgcaccggcugguacaccuccgugaucaccaucgagcugagcaacaucaaggagaacaagugcaacgggaccgacgccaaggugaagcucaucaagcaggagcuggacaaguacaagaacgcggucacggagcugcagcuccugaugcaguccacccccgccaccggcagcggguccgccaucgccagcggcguggcggugugcaagguccugcaccucgagggcgaggugaacaagaucaaguccgcccugcugagcaccaacaaggccguggucucccucagcaacgggguguccgugcugacguucaagguccuggaccucaagaacuacaucgacaagcagcugcugccgauccucaacaagcagagcugcuccaucagcaacaucgagaccgugaucgaguuccagcagaagaacaaccggcugcuggagaucacccgcgaguucuccgugaacgccggcgucaccacgcccgugagcaccuacaugcucaccaacagcgagcugcugucccucaucaacgacaugcccaucaccaacgaccagaagaagcugaugagcaacaacgugcagaucguccggcagcaguccuacagcaucaugugcaucaucaaggaggaggugcuggccuacgugguccagcucccccuguacggggugaucgacacgccgugcuggaagcugcacaccagcccccucugcaccaccaacacgaaggagggcuccaacaucugccugacccgcaccgaccgggggugguacugcgacaacgcgggcuccgugagcuucuucccccaggccgagaccugcaagguccaguccaaccgcguguucugcgacacgaugaacagccggacccuccccuccgaggucaaccugugcaacguggacaucuucaacccgaaguacgacugcaagaucaugaccagcaagaccgacguguccagcuccgucaucacgagccugggcgccaucguguccugcuacgggaagaccaagugcaccgccagcaacaagaaccggggcaucaucaagaccuucuccaacgggugcgacuacgugagcaacaagggcgucgacacggugagcgugggcaacacccucuacuacgucaacaagcaggaggggaagucccuguacgugaagggcgagcccaucaucaacuucuacgacccccugguguuccccagcgacgaguucgacgccuccaucagccaggucaacgagaagaucaaccagucccucgcguucauccgcaagagcgacgagcugcugcacaacgugaacgccgggaaguccaccaccaacaucaugaucaccacgaucaucaucgugaucaucgucauccuccugagccugaucgccgugggccuccugcuguacugcaaggcccggugaggacuaguacuggcugcaucucccuuuccucuguccuccauccuucucccaggauggugaagggggaccugguacccagugauccccaccccaggauccuaaaucaugacuuaccugcuaauaaaaacucauuggaaaagugagaagaucuaaaaaaaaaaaaaaaaaaaaaaaaaaaaaaaaaaaaaaaaaaaaaaaaaaaaaaaaaaaaaaaaugcaucccccccccccccccccccccccccccccccaaaggcucuuuucagagccaccagaauu

SEQ ID NO: 4470 - RNA, 1893 nt, Artificial Sequence
  mRNA product Design f-5 comprising derived and/or modified sequence from HRSV(A2)__F-del_DSCav1_mut0 (opt2)
gggagacuuucccauucuguagcagaauuugguguugccuguggucuuggucccgcggagaagcuuaccauggagcuccucauccucaaggccaacgccaucaccaccauccucaccgccgucaccuucugcuucgccuccggccagaacaucaccgaggaguucuaccaguccaccugcuccgccgucuccaagggcuaccucuccgcccuccgcaccggcugguacaccuccgucaucaccaucgagcucuccaacaucaaggagaacaagugcaacggcaccgacgccaaggucaagcucaucaagcaggagcucgacaaguacaagaacgccgucaccgagcuccagcuccucaugcaguccacccccgccaccggcuccggcuccgccaucgccuccggcgucgccgucugcaagguccuccaccucgagggcgaggucaacaagaucaaguccgcccuccucuccaccaacaaggccgucgucucccucuccaacggcgucuccguccucaccuucaagguccucgaccucaagaacuacaucgacaagcagcuccuccccauccucaacaagcaguccugcuccaucuccaacaucgagaccgucaucgaguuccagcagaagaacaaccgccuccucgagaucacccgcgaguucuccgucaacgccggcgucaccacccccgucuccaccuacaugcucaccaacuccgagcuccucucccucaucaacgacaugcccaucaccaacgaccagaagaagcucauguccaacaacguccagaucguccgccagcaguccuacuccaucaugugcaucaucaaggaggagguccucgccuacgucguccagcucccccucuacggcgucaucgacacccccugcuggaagcuccacaccuccccccucugcaccaccaacaccaaggagggcuccaacaucugccucacccgcaccgaccgcggcugguacugcgacaacgccggcuccgucuccuucuucccccaggccgagaccugcaagguccaguccaaccgcgucuucugcgacaccaugaacucccgcacccuccccuccgaggucaaccucugcaacgucgacaucuucaaccccaaguacgacugcaagaucaugaccuccaagaccgacgucuccuccuccgucaucaccucccucggcgccaucgucuccugcuacggcaagaccaagugcaccgccuccaacaagaaccgcggcaucaucaagaccuucuccaacggcugcgacuacgucuccaacaagggcgucgacaccgucuccgucggcaacacccucuacuacgucaacaagcaggagggcaagucccucuacgucaagggcgagcccaucaucaacuucuacgacccccucgucuuccccuccgacgaguucgacgccuccaucucccaggucaacgagaagaucaaccagucccucgccuucauccgcaaguccgacgagcuccuccacaacgucaacgccggcaaguccaccaccaacaucaugaucaccaccaucaucaucgucaucaucgucauccuccucucccucaucgccgucggccuccuccucuacugcaaggcccgcugaggacuaguacuggcugcaucucccuuuccucuguccuccauccuucucccaggauggugaagggggaccugguacccagugauccccaccccaggauccuaaaucaugacuuaccugcuaauaaaaacucauuggaaaagugagaagaucuaaaaaaaaaaaaaaaaaaaaaaaaaaaaaaaaaaaaaaaaaaaaaaaaaaaaaaaaaaaaaaaaugcaucccccccccccccccccccccccccccccccaaaggcucuuuucagagccaccagaauu

SEQ ID NO: 4471 - RNA, 1893 nt, Artificial Sequence
  mRNA product Design f-5 comprising derived and/or modified sequence from HRSV(A2)__F-del_DSCav1_mut0 (opt3)
gggagacuuucccauucuguagcagaauuugguguugccuguggucuuggucccgcggagaagcuuaccauggagcugcucauccuuaaggccaacgcuauuaccacaauacugacugcagugacguucugcuuugccagcggccagaauaucaccgaagaguucuaccaauccacauguucugcggucucaaaaggguauuugagugcuuuaagaacuggaugguacaccagcguuauuacaaucgaacuguccaacauuaaggagaauaaaugcaacgguaccgacgccaaggugaaacuaaucaagcaggaacucgauaaguauaaaaaugcaguaacugagcugcagcuucugaugcagucuacacccgccaccggcucggggucagcuauagcaagcggaguggccgucuguaagguguugcaccucgagggcgaaguuaacaaaaucaagagugcucugcuguccacgaauaaagccguggucucucucagcaacgguguguccguauuaacuuuuaagguucuggaccuuaagaauuacauugauaaacaauugcugccuauccuaaacaagcagucaugcaguauuagcaauaucgagaccgugauagaguuccagcagaaaaacaauaggcuccuggaaauuacacgggaguuuucugucaacgcgggggugacuaccccaguguccacauauaugcuuaccaauucagaacuguugagccucaucaacgacaugccgauuacgaacgaucaaaagaaacugaugaguaauaacguccagaucguucgccagcagucuuacuccaucauguguauuauaaaggaggaaguguuagcauauguagugcaacugccccucuacggagucaucgacacuccuugcuggaaacuucauacaagcccacuguguaccacuaauacaaaggagggcucgaacauuugcuugacccgaacggaucguggcugguacugugacaaugccgggucuguguccuucuuuccccaggcugaaaccugcaagguucagucaaacagaguguucugugauacaaugaauaguagaacucugccuagcgaggucaaccucugcaauguggacaucuuuaacccaaaauaugauugcaagauaaugaccuccaaaacagacguaucuagcucaguuauuaccagucugggagccaucguguccuguuacgguaagacuaaaugcacagcaagcaauaagaacaggggcaucauuaagaccuucucuaaugggugugauuaugucucaaacaaaggaguggacacugucagugugggcaauacgcuuuacuauguuaacaagcaagaggguaaaagccuguacgugaagggggaacccaucauuaacuuuuaugacccuuugguauucccauccgaugaguuugacgcuucuauaucgcaggucaaugagaaaaucaaccagagccucgccuucauucggaaguccgaugaacuguuacacaaugugaacgcgggaaagucaacaaccaauaucaugaucacuaccauuauaaucguuauuaucgugauucugcuaagucucaucgccgucggccugcuuuuguacugcaaagcacgcugaggacuaguacuggcugcaucucccuuuccucuguccuccauccuucucccaggauggugaagggggaccugguacccagugauccccaccccaggauccuaaaucaugacuuaccugcuaauaaaaacucauuggaaaagugagaagaucuaaaaaaaaaaaaaaaaaaaaaaaaaaaaaaaaaaaaaaaaaaaaaaaaaaaaaaaaaaaaaaaaugcaucccccccccccccccccccccccccccccccaaaggcucuuuucagagccaccagaauu

SEQ ID NO: 4472 - RNA, 1893 nt, Artificial Sequence
  mRNA product Design f-5 comprising derived and/or modified sequence from HRSV(A2)__F-del_DSCav1_mut0 (opt4)
gggagacuuucccauucuguagcagaauuugguguugccuguggucuuggucccgcggagaagcuuaccauggagcugcugauccugaaggccaacgccaucaccaccauccugaccgccgugaccuucugcuucgccagcggccagaacaucaccgaggaguucuaccagagcaccugcagcgccgugagcaagggcuaccugagcgcccugagaaccggcugguacaccagcgugaucaccaucgagcugagcaacaucaaggagaacaagugcaacggcaccgacgccaaggugaagcugaucaagcaggagcuggacaaguacaagaacgccgugaccgagcugcagcugcugaugcagagcacccccgccaccggcagcggcagcgccaucgccagcggcguggccgugugcaaggugcugcaccuggagggcgaggugaacaagaucaagagcgcccugcugagcaccaacaaggccguggugagccugagcaacggcgugagcgugcugaccuucaaggugcuggaccugaagaacuacaucgacaagcagcugcugcccauccugaacaagcagagcugcagcaucagcaacaucgagaccgugaucgaguuccagcagaagaacaacagacugcuggagaucaccagagaguucagcgugaacgccggcgugaccacccccgugagcaccuacaugcugaccaacagcgagcugcugagccugaucaacgacaugcccaucaccaacgaccagaagaagcugaugagcaacaacgugcagaucgugagacagcagagcuacagcaucaugugcaucaucaaggaggaggugcuggccuacguggugcagcugccccuguacggcgugaucgacacccccugcuggaagcugcacaccagcccccugugcaccaccaacaccaaggagggcagcaacaucugccugaccagaaccgacagaggcugguacugcgacaacgccggcagcgugagcuucuucccccaggccgagaccugcaaggugcagagcaacagaguguucugcgacaccaugaacagcagaacccugcccagcgaggugaaccugugcaacguggacaucuucaaccccaaguacgacugcaagaucaugaccagcaagaccgacgugagcagcagcgugaucaccagccugggcgccaucgugagcugcuacggcaagaccaagugcaccgccagcaacaagaacagaggcaucaucaagaccuucagcaacggcugcgacuacgugagcaacaagggcguggacaccgugagcgugggcaacacccuguacuacgugaacaagcaggagggcaagagccuguacgugaagggcgagcccaucaucaacuucuacgacccccugguguuccccagcgacgaguucgacgccagcaucagccaggugaacgagaagaucaaccagagccuggccuucaucagaaagagcgacgagcugcugcacaacgugaacgccggcaagagcaccaccaacaucaugaucaccaccaucaucaucgugaucaucgugauccugcugagccugaucgccgugggccugcugcuguacugcaaggccagaugaggacuaguacuggcugcaucucccuuuccucuguccuccauccuucucccaggauggugaagggggaccugguacccagugauccccaccccaggauccuaaaucaugacuuaccugcuaauaaaaacucauuggaaaagugagaagaucuaaaaaaaaaaaaaaaaaaaaaaaaaaaaaaaaaaaaaaaaaaaaaaaaaaaaaaaaaaaaaaaaugcaucccccccccccccccccccccccccccccccaaaggcucuuuucagagccaccagaauu

SEQ ID NO: 4473 - RNA, 1893 nt, Artificial Sequence
  mRNA product Design f-5 comprising derived and/or modified sequence from HRSV(A2)__F-del_DSCav1_mut0 (opt5)
gggagacuuucccauucuguagcagaauuugguguugccuguggucuuggucccgcggagaagcuuaccauggagcugcucauccugaaggccaacgcuauuaccacaauccuuacggccgugaccuucugcuuugcgagcggccagaauauuacagaagaguucuaccaauccaccuguucugcugucagcaaaggguaucuguccgcccucagaacaggaugguacaccucuguuaucacaauugaacugagcaacaucaaggagaauaaaugcaacggcaccgacgccaaggugaaacuuaucaagcaggaacuggauaaguauaaaaaugcugugacggagcuccagcugcugaugcaguccacccccgccacagggucuggaagcgcuauugccuccggcgucgcgguguguaagguucuccaccuggagggggaagugaacaaaaucaagagcgcccuucugucuaccaauaaagcugucgugucccucagcaacggaguuucugugcugacauuuaagguccuugaccugaagaauuacauugauaaacaacuccugccuauccugaacaagcaguccugcagcauuucuaauaucgagaccgugauugaguuccagcagaaaaacaaucggcuccuggaaaucacgcgcgaguuuuccgugaacgccggcgucacaaccccgguuagcacauauaugcuuaccaauuccgaacugcucucucugaucaacgacaugcccauuaccaacgaucaaaagaaacuuaugagcaauaacgugcagaucgugagacagcaguccuacagcauuauguguaucauuaaggaggaaguccuggcuuaugugguucaacucccucuguacggcgugaucgacacacccugcuggaaacugcauacgucuccucucuguaccacaaauaccaaggagggguccaacaucugccugacacggaccgaucgcggaugguacugugacaaugccggcagcgucucuuucuuuccccaggcggaaacgugcaaggugcagagcaacagaguuuucugugauacaaugaacuccagaacccugccuucugaggugaaucucugcaaugucgacauuuuuaacccgaaauaugauugcaagaucaugaccagcaaaacagacguguccagcucugucauuaccucccugggggccaucgugagcuguuacggaaagacaaaaugcacggcuucuaauaagaaccggggcauuaucaagaccuucuccaaugggugugauuauguuagcaacaaaggaguggacacagucuccgugggcaauacccuuuacuauguuaacaagcaagagggcaaaucucuguacgugaagggggaacccaucauuaacuuuuaugacccucucgucuuccccagcgaugaguuugacgccuccaucucucaggugaaugagaaaauuaaccagagccuggcuuucauccgcaaguccgaugaacugcuccacaaugugaacgccggaaagagcacaaccaauauuaugaucacgaccauuaucaucguuauuaucgucauucugcuuucucugaucgccgugggccuccugcuguacugcaaagcuagaugaggacuaguacuggcugcaucucccuuuccucuguccuccauccuucucccaggauggugaagggggaccugguacccagugauccccaccccaggauccuaaaucaugacuuaccugcuaauaaaaacucauuggaaaagugagaagaucuaaaaaaaaaaaaaaaaaaaaaaaaaaaaaaaaaaaaaaaaaaaaaaaaaaaaaaaaaaaaaaaaugcaucccccccccccccccccccccccccccccccaaaggcucuuuucagagccaccagaauu

SEQ ID NO: 4474 - RNA, 1893 nt, Artificial Sequence
  mRNA product Design f-5 comprising derived and/or modified sequence from HRSV(A2)__F-del_DSCav1_mut0 (opt6)
gggagacuuucccauucuguagcagaauuugguguugccuguggucuuggucccgcggagaagcuuaccauggaauuacucauccucaaagcaaacgcaauaacaacaauacuaacagcagucacuuucugcuucgcauccggacaaaauaucacagaagaauuuuaccaauccaccugcucugcugucuccaaaggauaccuaucugcccucagaaccgguugguauacaucugucauaaccauagaacuaucaaacauuaaagaaaacaaauguaacggaacagacgcaaaagucaaacuuauaaaacaagaauuagacaaauacaaaaacgcagucacagaauuacaacuacuaaugcaaucaaccccagcaaccggaucaggauccgcaauagcuucaggaguagcaguauguaaaguucuacacuuagaaggagaagucaacaaaauuaaauccgcacuauuaucaaccaacaaagcagucguaucuuuaucaaacggaguaucuguacuuacauucaaaguacuagaccuaaaaaauuacauugauaaacaauuacuaccaauacuaaacaaacaaucauguuccaucucuaacauagaaacaguaauagaauuucaacaaaaaaauaacagauuacuugaaaucacccgagaauuuucaguaaacgcaggaguaaccacacccguaucuacauacaugcuaacaaacucugaacuucugagccuaauaaaugacaugccaauaaccaacgaccaaaaaaaacuaauguccaacaacguacaaauaguacgacaacaaucuuacucaaucaugugcauaaucaaagaagaaguacuagcuuauguaguccaacuuccacucuacggaguaauagacacccccugcuggaaacuacacacaucaccacuaugcacaacaaacacaaaagaaggcucaaacauaugccuaacaagaacugacagaggaugguauugugacaaugcaggcucugucucauucuuuccacaagccgaaacaugcaaaguucaaucaaaccgaguuuucugugacacaaugaacucuagaacucucccaucagaagucaacuuaugcaacguugacauauucaacccaaaauaugacuguaaaauaaugacuuccaaaacugauguaucauccuccgucauaacaucccuaggagcuauuguaucauguuacgggaaaaccaaaugcacagccucaaacaaaaaccgcgguaucauaaaaacauuuucaaacggaugugauuacguaagcaauaaaggaguagacaccguaucaguaggaaauacacuauacuauguaaauaaacaagaaggaaaaucacuauaugucaaaggagaaccaaucauaaauuucuaugacccacuuguauucccauccgaugaauuugacgcaagcauuucacaggucaacgaaaaaauaaaccaaucacuagccuucaucagaaaaucagacgaacuacuacauaacguaaacgccggaaaaucaacaaccaacauaaugauaacaacaaucauaauaguuaucauaguaauacuacuaucucuaauagcugucggacucuuacuauauugcaaagcccgauaaggacuaguacuggcugcaucucccuuuccucuguccuccauccuucucccaggauggugaagggggaccugguacccagugauccccaccccaggauccuaaaucaugacuuaccugcuaauaaaaacucauuggaaaagugagaagaucuaaaaaaaaaaaaaaaaaaaaaaaaaaaaaaaaaaaaaaaaaaaaaaaaaaaaaaaaaaaaaaaaugcaucccccccccccccccccccccccccccccccaaaggcucuuuucagagccaccagaauu

SEQ ID NO: 4475 - RNA, 1893 nt, Artificial Sequence
  mRNA product Design f-5 comprising derived and/or modified sequence from HRSV(A2)__F-del_DSCav1_mut0 (opt11)
gggagacuuucccauucuguagcagaauuugguguugccuguggucuuggucccgcggagaagcuuaccauggaacuacuaauccugaaagccaacgccauaaccacaauccuuaccgcagucaccuucugcuucgccuccggucaaaacaucacagaagaguucuaccaauccaccuguuccgcagucagcaaaggcuaccucuccgcacuccgaaccggaugguacaccagcgucaucaccaucgaacuauccaacauaaaggaaaauaagugcaaugguacagaugccaaggucaaacucauaaagcaagaacucgacaaauacaaaaacgccgucaccgaacuacaacuacuaaugcaaucuacccccgcaacaggcucagguuccgccauagccuccggcgucgccguuugcaaaguccuccaccucgaaggcgaaguaaacaaaaucaaauccgcccuacucucaaccaacaaagcagucgucucccucucaaacggagucucgguccucaccuucaaaguccucgaccucaaaaacuauauagacaaacaacuccuacccauacucaacaaacaguccugcagcauauccaacaucgaaaccgugaucgaguuccaacagaaaaacaacagacuccucgaaaucacucgagaguucuccguaaacgccggcgucacaaccccagucucaacauacaugcucaccaacagcgaacuccuaucacuaaucaacgacaugccuaucacaaaugaucagaagaaacuaaugagcaacaacguccaaaucguccgccaacaaucauacuccaucaugugcaucauaaaagaagaaguccuagccuacgugguccagcuaccccucuacggcguaauugacaccccuugcuggaaacuacacacuucaccccucugcacaaccaacaccaaagaagguucaaacaucugccucacacgaacagaccgcggcugguacugcgacaacgccggauccguauccuucuucccccaagcagaaaccugcaaaguucaauccaaccggguauucugcgacaccaugaacucaagaacccuucccuccgaaguaaaucuaugcaacgucgacauauucaacccaaaauacgacugcaaaaucaugaccuccaaaaccgaugucuccagcagcgucaucaccagccucggcgccaucgucuccugcuacggcaaaacaaaauguacagcauccaacaaaaaccgaggcauaaucaaaaccuucuccaacgggugcgauuacgucagcaacaaaggcgucgacaccgucuccgugggcaacacccuauacuacgucaacaaacaagaaggcaaaucacuguacguaaagggcgaacccaucaucaacuucuaugacccucugguguucccauccgaugaauuugacgcauccauaucucaggucaacgaaaagaucaaccaaucccucgccuucauacgcaaauccgacgaacuccuacacaacgucaacgcugguaaaagcaccaccaacaucaugaucaccacaaucaucaucgucauaaucguuauccuacucucccuuauagcagucggacuccuccucuacugcaaagcccgcuaaggacuaguacuggcugcaucucccuuuccucuguccuccauccuucucccaggauggugaagggggaccugguacccagugauccccaccccaggauccuaaaucaugacuuaccugcuaauaaaaacucauuggaaaagugagaagaucuaaaaaaaaaaaaaaaaaaaaaaaaaaaaaaaaaaaaaaaaaaaaaaaaaaaaaaaaaaaaaaaaugcaucccccccccccccccccccccccccccccccaaaggcucuuuucagagccaccagaauu

SEQ ID NO: 4476 - RNA, 1889 nt, Artificial Sequence
  mRNA product Design g-1 comprising derived and/or modified sequence from HRSV(A2)__F-del_DSCav1_mut0 (opt1)
gggagacuuucccauucuguagcagaauuugguguugccuguggucuuggucccgcggagaagcuuaccauggagcugcucauccugaaggccaacgccaucaccaccauccugacggcggugaccuucugcuucgccagcggccagaacaucaccgaggaguucuaccaguccacgugcagcgccgucuccaagggguaccucagcgcccugcggaccggcugguacaccuccgugaucaccaucgagcugagcaacaucaaggagaacaagugcaacgggaccgacgccaaggugaagcucaucaagcaggagcuggacaaguacaagaacgcggucacggagcugcagcuccugaugcaguccaccccggcaaccggcuccggcuccgccaucgcgagcggcgucgccgugugcaaggugcugcaccucgagggggaggucaacaagaucaagagcgcccugcuguccaccaacaaggccguggugagccucuccaacggcgucagcgugcugaccuucaaggugcuggaccucaagaacuacaucgacaagcagcugcugcccauccugaacaagcagagcugcuccaucagcaacaucgagacggugaucgaguuccagcagaagaacaaccggcuccuggagaucacccgcgaguucagcgugaacgccggggucaccacccccguguccacguacaugcugaccaacagcgagcuccugucccugaucaacgacaugccgaucaccaacgaccagaagaagcucaugagcaacaacgugcagaucguccggcagcaguccuacagcaucaugugcaucaucaaggaggaggugcuggcguacgugguccagcugccccucuacggcgugaucgacacccccugcuggaagcugcacacgagcccccugugcaccaccaacaccaaggagggguccaacaucugccucacgcgcaccgaccggggcugguacugcgacaacgccggcagcgucuccuucuucccgcaggccgagaccugcaaggugcagagcaaccgcguguucugcgacaccaugaacucccggacgcugcccagcgagguaaaccucugcaacgucgacaucuucaaccccaaguacgacugcaagaucaugaccuccaagaccgacgugagcuccagcgugaucaccucccugggggccaucgucagcugcuacggcaagacgaagugcaccgccagcaacaagaaccgggggaucaucaagaccuucuccaacggcugcgacuacgugagcaacaagggcguggacaccguguccgucgggaacacccuguacuacgugaacaagcaggagggcaagagccucuacgugaagggggagcccaucaucaacuucuacgacccgcuggucuuccccuccgacgaguucgacgcgagcaucucccaggugaacgagaagaucaaccagagccuggccuucauccgcaaguccgacgagcugcuccacaacgugaacgccggcaagagcacgaccaacaucaugaucaccaccaucaucaucgucaucaucgugauccugcugucccucaucgccguggggcugcugcucuacugcaaggcccggugaggacuaguggaagcauuuuccuggcugauuaaaagaaauuacucagcuauggucaucuguuccuguuagaaggcuaugcagcauauuauauacuaugcgcauguuaugaaaugcauaauaaaaaauuuuaaaaaaucuaaaagaucuaaaaaaaaaaaaaaaaaaaaaaaaaaaaaaaaaaaaaaaaaaaaaaaaaaaaaaaaaaaaaaaaugcaucccccccccccccccccccccccccccccccaaaggcucuuuucagagccaccagaauu

SEQ ID NO: 4477 - RNA, 1889 nt, Artificial Sequence
  mRNA product Design g-1 comprising derived and/or modified sequence from HRSV(A2)__F-del_DSCav1_mut0 (opt1)
gggagacuuucccauucuguagcagaauuugguguugccuguggucuuggucccgcggagaagcuuaccauggagcugcucauccugaaggccaacgccaucaccaccauccugacggcggugaccuucugcuucgccagcggccagaacaucaccgaggaguucuaccaguccacgugcagcgccgucuccaagggguaccucagcgcccugcgcaccggcugguacaccuccgugaucaccaucgagcugagcaacaucaaggagaacaagugcaacgggaccgacgccaaggugaagcucaucaagcaggagcuggacaaguacaagaacgcggucacggagcugcagcuccugaugcaguccacccccgccaccggcagcggguccgccaucgccagcggcguggcggugugcaagguccugcaccucgagggcgaggugaacaagaucaaguccgcccugcugagcaccaacaaggccguggucucccucagcaacgggguguccgugcugacguucaagguccuggaccucaagaacuacaucgacaagcagcugcugccgauccucaacaagcagagcugcuccaucagcaacaucgagaccgugaucgaguuccagcagaagaacaaccggcugcuggagaucacccgcgaguucuccgugaacgccggcgucaccacgcccgugagcaccuacaugcucaccaacagcgagcugcugucccucaucaacgacaugcccaucaccaacgaccagaagaagcugaugagcaacaacgugcagaucguccggcagcaguccuacagcaucaugugcaucaucaaggaggaggugcuggccuacgugguccagcucccccuguacggggugaucgacacgccgugcuggaagcugcacaccagcccccucugcaccaccaacacgaaggagggcuccaacaucugccugacccgcaccgaccgggggugguacugcgacaacgcgggcuccgugagcuucuucccccaggccgagaccugcaagguccaguccaaccgcguguucugcgacacgaugaacagccggacccuccccuccgaggucaaccugugcaacguggacaucuucaacccgaaguacgacugcaagaucaugaccagcaagaccgacguguccagcuccgucaucacgagccugggcgccaucguguccugcuacgggaagaccaagugcaccgccagcaacaagaaccggggcaucaucaagaccuucuccaacgggugcgacuacgugagcaacaagggcgucgacacggugagcgugggcaacacccucuacuacgucaacaagcaggaggggaagucccuguacgugaagggcgagcccaucaucaacuucuacgacccccugguguuccccagcgacgaguucgacgccuccaucagccaggucaacgagaagaucaaccagucccucgcguucauccgcaagagcgacgagcugcugcacaacgugaacgccgggaaguccaccaccaacaucaugaucaccacgaucaucaucgugaucaucgucauccuccugagccugaucgccgugggccuccugcuguacugcaaggcccggugaggacuaguggaagcauuuuccuggcugauuaaaagaaauuacucagcuauggucaucuguuccuguuagaaggcuaugcagcauauuauauacuaugcgcauguuaugaaaugcauaauaaaaaauuuuaaaaaaucuaaaagaucuaaaaaaaaaaaaaaaaaaaaaaaaaaaaaaaaaaaaaaaaaaaaaaaaaaaaaaaaaaaaaaaaugcaucccccccccccccccccccccccccccccccaaaggcucuuuucagagccaccagaauu

SEQ ID NO: 4478 - RNA, 1889 nt, Artificial Sequence
  mRNA product Design g-1 comprising derived and/or modified sequence from HRSV(A2)__F-del_DSCav1_mut0 (opt2)
gggagacuuucccauucuguagcagaauuugguguugccuguggucuuggucccgcggagaagcuuaccauggagcuccucauccucaaggccaacgccaucaccaccauccucaccgccgucaccuucugcuucgccuccggccagaacaucaccgaggaguucuaccaguccaccugcuccgccgucuccaagggcuaccucuccgcccuccgcaccggcugguacaccuccgucaucaccaucgagcucuccaacaucaaggagaacaagugcaacggcaccgacgccaaggucaagcucaucaagcaggagcucgacaaguacaagaacgccgucaccgagcuccagcuccucaugcaguccacccccgccaccggcuccggcuccgccaucgccuccggcgucgccgucugcaagguccuccaccucgagggcgaggucaacaagaucaaguccgcccuccucuccaccaacaaggccgucgucucccucuccaacggcgucuccguccucaccuucaagguccucgaccucaagaacuacaucgacaagcagcuccuccccauccucaacaagcaguccugcuccaucuccaacaucgagaccgucaucgaguuccagcagaagaacaaccgccuccucgagaucacccgcgaguucuccgucaacgccggcgucaccacccccgucuccaccuacaugcucaccaacuccgagcuccucucccucaucaacgacaugcccaucaccaacgaccagaagaagcucauguccaacaacguccagaucguccgccagcaguccuacuccaucaugugcaucaucaaggaggagguccucgccuacgucguccagcucccccucuacggcgucaucgacacccccugcuggaagcuccacaccuccccccucugcaccaccaacaccaaggagggcuccaacaucugccucacccgcaccgaccgcggcugguacugcgacaacgccggcuccgucuccuucuucccccaggccgagaccugcaagguccaguccaaccgcgucuucugcgacaccaugaacucccgcacccuccccuccgaggucaaccucugcaacgucgacaucuucaaccccaaguacgacugcaagaucaugaccuccaagaccgacgucuccuccuccgucaucaccucccucggcgccaucgucuccugcuacggcaagaccaagugcaccgccuccaacaagaaccgcggcaucaucaagaccuucuccaacggcugcgacuacgucuccaacaagggcgucgacaccgucuccgucggcaacacccucuacuacgucaacaagcaggagggcaagucccucuacgucaagggcgagcccaucaucaacuucuacgacccccucgucuuccccuccgacgaguucgacgccuccaucucccaggucaacgagaagaucaaccagucccucgccuucauccgcaaguccgacgagcuccuccacaacgucaacgccggcaaguccaccaccaacaucaugaucaccaccaucaucaucgucaucaucgucauccuccucucccucaucgccgucggccuccuccucuacugcaaggcccgcugaggacuaguggaagcauuuuccuggcugauuaaaagaaauuacucagcuauggucaucuguuccuguuagaaggcuaugcagcauauuauauacuaugcgcauguuaugaaaugcauaauaaaaaauuuuaaaaaaucuaaaagaucuaaaaaaaaaaaaaaaaaaaaaaaaaaaaaaaaaaaaaaaaaaaaaaaaaaaaaaaaaaaaaaaaugcaucccccccccccccccccccccccccccccccaaaggcucuuuucagagccaccagaauu

SEQ ID NO: 4479 - RNA, 1889 nt, Artificial Sequence
  mRNA product Design g-1 comprising derived and/or modified sequence from HRSV(A2)__F-del_DSCav1_mut0 (opt3)
gggagacuuucccauucuguagcagaauuugguguugccuguggucuuggucccgcggagaagcuuaccauggagcugcucauccuuaaggccaacgcuauuaccacaauacugacugcagugacguucugcuuugccagcggccagaauaucaccgaagaguucuaccaauccacauguucugcggucucaaaaggguauuugagugcuuuaagaacuggaugguacaccagcguuauuacaaucgaacuguccaacauuaaggagaauaaaugcaacgguaccgacgccaaggugaaacuaaucaagcaggaacucgauaaguauaaaaaugcaguaacugagcugcagcuucugaugcagucuacacccgccaccggcucggggucagcuauagcaagcggaguggccgucuguaagguguugcaccucgagggcgaaguuaacaaaaucaagagugcucugcuguccacgaauaaagccguggucucucucagcaacgguguguccguauuaacuuuuaagguucuggaccuuaagaauuacauugauaaacaauugcugccuauccuaaacaagcagucaugcaguauuagcaauaucgagaccgugauagaguuccagcagaaaaacaauaggcuccuggaaauuacacgggaguuuucugucaacgcgggggugacuaccccaguguccacauauaugcuuaccaauucagaacuguugagccucaucaacgacaugccgauuacgaacgaucaaaagaaacugaugaguaauaacguccagaucguucgccagcagucuuacuccaucauguguauuauaaaggaggaaguguuagcauauguagugcaacugccccucuacggagucaucgacacuccuugcuggaaacuucauacaagcccacuguguaccacuaauacaaaggagggcucgaacauuugcuugacccgaacggaucguggcugguacugugacaaugccgggucuguguccuucuuuccccaggcugaaaccugcaagguucagucaaacagaguguucugugauacaaugaauaguagaacucugccuagcgaggucaaccucugcaauguggacaucuuuaacccaaaauaugauugcaagauaaugaccuccaaaacagacguaucuagcucaguuauuaccagucugggagccaucguguccuguuacgguaagacuaaaugcacagcaagcaauaagaacaggggcaucauuaagaccuucucuaaugggugugauuaugucucaaacaaaggaguggacacugucagugugggcaauacgcuuuacuauguuaacaagcaagaggguaaaagccuguacgugaagggggaacccaucauuaacuuuuaugacccuuugguauucccauccgaugaguuugacgcuucuauaucgcaggucaaugagaaaaucaaccagagccucgccuucauucggaaguccgaugaacuguuacacaaugugaacgcgggaaagucaacaaccaauaucaugaucacuaccauuauaaucguuauuaucgugauucugcuaagucucaucgccgucggccugcuuuuguacugcaaagcacgcugaggacuaguggaagcauuuuccuggcugauuaaaagaaauuacucagcuauggucaucuguuccuguuagaaggcuaugcagcauauuauauacuaugcgcauguuaugaaaugcauaauaaaaaauuuuaaaaaaucuaaaagaucuaaaaaaaaaaaaaaaaaaaaaaaaaaaaaaaaaaaaaaaaaaaaaaaaaaaaaaaaaaaaaaaaugcaucccccccccccccccccccccccccccccccaaaggcucuuuucagagccaccagaauu

SEQ ID NO: 4480 - RNA, 1889 nt, Artificial Sequence
  mRNA product Design g-1 comprising derived and/or modified sequence from HRSV(A2)__F-del_DSCav1_mut0 (opt4)
gggagacuuucccauucuguagcagaauuugguguugccuguggucuuggucccgcggagaagcuuaccauggagcugcugauccugaaggccaacgccaucaccaccauccugaccgccgugaccuucugcuucgccagcggccagaacaucaccgaggaguucuaccagagcaccugcagcgccgugagcaagggcuaccugagcgcccugagaaccggcugguacaccagcgugaucaccaucgagcugagcaacaucaaggagaacaagugcaacggcaccgacgccaaggugaagcugaucaagcaggagcuggacaaguacaagaacgccgugaccgagcugcagcugcugaugcagagcacccccgccaccggcagcggcagcgccaucgccagcggcguggccgugugcaaggugcugcaccuggagggcgaggugaacaagaucaagagcgcccugcugagcaccaacaaggccguggugagccugagcaacggcgugagcgugcugaccuucaaggugcuggaccugaagaacuacaucgacaagcagcugcugcccauccugaacaagcagagcugcagcaucagcaacaucgagaccgugaucgaguuccagcagaagaacaacagacugcuggagaucaccagagaguucagcgugaacgccggcgugaccacccccgugagcaccuacaugcugaccaacagcgagcugcugagccugaucaacgacaugcccaucaccaacgaccagaagaagcugaugagcaacaacgugcagaucgugagacagcagagcuacagcaucaugugcaucaucaaggaggaggugcuggccuacguggugcagcugccccuguacggcgugaucgacacccccugcuggaagcugcacaccagcccccugugcaccaccaacaccaaggagggcagcaacaucugccugaccagaaccgacagaggcugguacugcgacaacgccggcagcgugagcuucuucccccaggccgagaccugcaaggugcagagcaacagaguguucugcgacaccaugaacagcagaacccugcccagcgaggugaaccugugcaacguggacaucuucaaccccaaguacgacugcaagaucaugaccagcaagaccgacgugagcagcagcgugaucaccagccugggcgccaucgugagcugcuacggcaagaccaagugcaccgccagcaacaagaacagaggcaucaucaagaccuucagcaacggcugcgacuacgugagcaacaagggcguggacaccgugagcgugggcaacacccuguacuacgugaacaagcaggagggcaagagccuguacgugaagggcgagcccaucaucaacuucuacgacccccugguguuccccagcgacgaguucgacgccagcaucagccaggugaacgagaagaucaaccagagccuggccuucaucagaaagagcgacgagcugcugcacaacgugaacgccggcaagagcaccaccaacaucaugaucaccaccaucaucaucgugaucaucgugauccugcugagccugaucgccgugggccugcugcuguacugcaaggccagaugaggacuaguggaagcauuuuccuggcugauuaaaagaaauuacucagcuauggucaucuguuccuguuagaaggcuaugcagcauauuauauacuaugcgcauguuaugaaaugcauaauaaaaaauuuuaaaaaaucuaaaagaucuaaaaaaaaaaaaaaaaaaaaaaaaaaaaaaaaaaaaaaaaaaaaaaaaaaaaaaaaaaaaaaaaugcaucccccccccccccccccccccccccccccccaaaggcucuuuucagagccaccagaauu

SEQ ID NO: 4481 - RNA, 1889 nt, Artificial Sequence
  mRNA product Design g-1 comprising derived and/or modified sequence from HRSV(A2)__F-del_DSCav1_mut0 (opt5)
gggagacuuucccauucuguagcagaauuugguguugccuguggucuuggucccgcggagaagcuuaccauggagcugcucauccugaaggccaacgcuauuaccacaauccuuacggccgugaccuucugcuuugcgagcggccagaauauuacagaagaguucuaccaauccaccuguucugcugucagcaaaggguaucuguccgcccucagaacaggaugguacaccucuguuaucacaauugaacugagcaacaucaaggagaauaaaugcaacggcaccgacgccaaggugaaacuuaucaagcaggaacuggauaaguauaaaaaugcugugacggagcuccagcugcugaugcaguccacccccgccacagggucuggaagcgcuauugccuccggcgucgcgguguguaagguucuccaccuggagggggaagugaacaaaaucaagagcgcccuucugucuaccaauaaagcugucgugucccucagcaacggaguuucugugcugacauuuaagguccuugaccugaagaauuacauugauaaacaacuccugccuauccugaacaagcaguccugcagcauuucuaauaucgagaccgugauugaguuccagcagaaaaacaaucggcuccuggaaaucacgcgcgaguuuuccgugaacgccggcgucacaaccccgguuagcacauauaugcuuaccaauuccgaacugcucucucugaucaacgacaugcccauuaccaacgaucaaaagaaacuuaugagcaauaacgugcagaucgugagacagcaguccuacagcauuauguguaucauuaaggaggaaguccuggcuuaugugguucaacucccucuguacggcgugaucgacacacccugcuggaaacugcauacgucuccucucuguaccacaaauaccaaggagggguccaacaucugccugacacggaccgaucgcggaugguacugugacaaugccggcagcgucucuuucuuuccccaggcggaaacgugcaaggugcagagcaacagaguuuucugugauacaaugaacuccagaacccugccuucugaggugaaucucugcaaugucgacauuuuuaacccgaaauaugauugcaagaucaugaccagcaaaacagacguguccagcucugucauuaccucccugggggccaucgugagcuguuacggaaagacaaaaugcacggcuucuaauaagaaccggggcauuaucaagaccuucuccaaugggugugauuauguuagcaacaaaggaguggacacagucuccgugggcaauacccuuuacuauguuaacaagcaagagggcaaaucucuguacgugaagggggaacccaucauuaacuuuuaugacccucucgucuuccccagcgaugaguuugacgccuccaucucucaggugaaugagaaaauuaaccagagccuggcuuucauccgcaaguccgaugaacugcuccacaaugugaacgccggaaagagcacaaccaauauuaugaucacgaccauuaucaucguuauuaucgucauucugcuuucucugaucgccgugggccuccugcuguacugcaaagcuagaugaggacuaguggaagcauuuuccuggcugauuaaaagaaauuacucagcuauggucaucuguuccuguuagaaggcuaugcagcauauuauauacuaugcgcauguuaugaaaugcauaauaaaaaauuuuaaaaaaucuaaaagaucuaaaaaaaaaaaaaaaaaaaaaaaaaaaaaaaaaaaaaaaaaaaaaaaaaaaaaaaaaaaaaaaaugcaucccccccccccccccccccccccccccccccaaaggcucuuuucagagccaccagaauu

SEQ ID NO: 4482 - RNA, 1889 nt, Artificial Sequence
  mRNA product Design g-1 comprising derived and/or modified sequence from HRSV(A2)__F-del_DSCav1_mut0 (opt6)
gggagacuuucccauucuguagcagaauuugguguugccuguggucuuggucccgcggagaagcuuaccauggaauuacucauccucaaagcaaacgcaauaacaacaauacuaacagcagucacuuucugcuucgcauccggacaaaauaucacagaagaauuuuaccaauccaccugcucugcugucuccaaaggauaccuaucugcccucagaaccgguugguauacaucugucauaaccauagaacuaucaaacauuaaagaaaacaaauguaacggaacagacgcaaaagucaaacuuauaaaacaagaauuagacaaauacaaaaacgcagucacagaauuacaacuacuaaugcaaucaaccccagcaaccggaucaggauccgcaauagcuucaggaguagcaguauguaaaguucuacacuuagaaggagaagucaacaaaauuaaauccgcacuauuaucaaccaacaaagcagucguaucuuuaucaaacggaguaucuguacuuacauucaaaguacuagaccuaaaaaauuacauugauaaacaauuacuaccaauacuaaacaaacaaucauguuccaucucuaacauagaaacaguaauagaauuucaacaaaaaaauaacagauuacuugaaaucacccgagaauuuucaguaaacgcaggaguaaccacacccguaucuacauacaugcuaacaaacucugaacuucugagccuaauaaaugacaugccaauaaccaacgaccaaaaaaaacuaauguccaacaacguacaaauaguacgacaacaaucuuacucaaucaugugcauaaucaaagaagaaguacuagcuuauguaguccaacuuccacucuacggaguaauagacacccccugcuggaaacuacacacaucaccacuaugcacaacaaacacaaaagaaggcucaaacauaugccuaacaagaacugacagaggaugguauugugacaaugcaggcucugucucauucuuuccacaagccgaaacaugcaaaguucaaucaaaccgaguuuucugugacacaaugaacucuagaacucucccaucagaagucaacuuaugcaacguugacauauucaacccaaaauaugacuguaaaauaaugacuuccaaaacugauguaucauccuccgucauaacaucccuaggagcuauuguaucauguuacgggaaaaccaaaugcacagccucaaacaaaaaccgcgguaucauaaaaacauuuucaaacggaugugauuacguaagcaauaaaggaguagacaccguaucaguaggaaauacacuauacuauguaaauaaacaagaaggaaaaucacuauaugucaaaggagaaccaaucauaaauuucuaugacccacuuguauucccauccgaugaauuugacgcaagcauuucacaggucaacgaaaaaauaaaccaaucacuagccuucaucagaaaaucagacgaacuacuacauaacguaaacgccggaaaaucaacaaccaacauaaugauaacaacaaucauaauaguuaucauaguaauacuacuaucucuaauagcugucggacucuuacuauauugcaaagcccgauaaggacuaguggaagcauuuuccuggcugauuaaaagaaauuacucagcuauggucaucuguuccuguuagaaggcuaugcagcauauuauauacuaugcgcauguuaugaaaugcauaauaaaaaauuuuaaaaaaucuaaaagaucuaaaaaaaaaaaaaaaaaaaaaaaaaaaaaaaaaaaaaaaaaaaaaaaaaaaaaaaaaaaaaaaaugcaucccccccccccccccccccccccccccccccaaaggcucuuuucagagccaccagaauu

SEQ ID NO: 4483 - RNA, 1889 nt, Artificial Sequence
  mRNA product Design g-1 comprising derived and/or modified sequence from HRSV(A2)__F-del_DSCav1_mut0 (opt11)
gggagacuuucccauucuguagcagaauuugguguugccuguggucuuggucccgcggagaagcuuaccauggaacuacuaauccugaaagccaacgccauaaccacaauccuuaccgcagucaccuucugcuucgccuccggucaaaacaucacagaagaguucuaccaauccaccuguuccgcagucagcaaaggcuaccucuccgcacuccgaaccggaugguacaccagcgucaucaccaucgaacuauccaacauaaaggaaaauaagugcaaugguacagaugccaaggucaaacucauaaagcaagaacucgacaaauacaaaaacgccgucaccgaacuacaacuacuaaugcaaucuacccccgcaacaggcucagguuccgccauagccuccggcgucgccguuugcaaaguccuccaccucgaaggcgaaguaaacaaaaucaaauccgcccuacucucaaccaacaaagcagucgucucccucucaaacggagucucgguccucaccuucaaaguccucgaccucaaaaacuauauagacaaacaacuccuacccauacucaacaaacaguccugcagcauauccaacaucgaaaccgugaucgaguuccaacagaaaaacaacagacuccucgaaaucacucgagaguucuccguaaacgccggcgucacaaccccagucucaacauacaugcucaccaacagcgaacuccuaucacuaaucaacgacaugccuaucacaaaugaucagaagaaacuaaugagcaacaacguccaaaucguccgccaacaaucauacuccaucaugugcaucauaaaagaagaaguccuagccuacgugguccagcuaccccucuacggcguaauugacaccccuugcuggaaacuacacacuucaccccucugcacaaccaacaccaaagaagguucaaacaucugccucacacgaacagaccgcggcugguacugcgacaacgccggauccguauccuucuucccccaagcagaaaccugcaaaguucaauccaaccggguauucugcgacaccaugaacucaagaacccuucccuccgaaguaaaucuaugcaacgucgacauauucaacccaaaauacgacugcaaaaucaugaccuccaaaaccgaugucuccagcagcgucaucaccagccucggcgccaucgucuccugcuacggcaaaacaaaauguacagcauccaacaaaaaccgaggcauaaucaaaaccuucuccaacgggugcgauuacgucagcaacaaaggcgucgacaccgucuccgugggcaacacccuauacuacgucaacaaacaagaaggcaaaucacuguacguaaagggcgaacccaucaucaacuucuaugacccucugguguucccauccgaugaauuugacgcauccauaucucaggucaacgaaaagaucaaccaaucccucgccuucauacgcaaauccgacgaacuccuacacaacgucaacgcugguaaaagcaccaccaacaucaugaucaccacaaucaucaucgucauaaucguuauccuacucucccuuauagcagucggacuccuccucuacugcaaagcccgcuaaggacuaguggaagcauuuuccuggcugauuaaaagaaauuacucagcuauggucaucuguuccuguuagaaggcuaugcagcauauuauauacuaugcgcauguuaugaaaugcauaauaaaaaauuuuaaaaaaucuaaaagaucuaaaaaaaaaaaaaaaaaaaaaaaaaaaaaaaaaaaaaaaaaaaaaaaaaaaaaaaaaaaaaaaaugcaucccccccccccccccccccccccccccccccaaaggcucuuuucagagccaccagaauu

SEQ ID NO: 4484 - RNA, 1904 nt, Artificial Sequence
  mRNA product Design g-2 comprising derived and/or modified sequence from HRSV(A2)__F-del_DSCav1_mut0 (opt1)
gggagaguccgcucagccagguugcagaagcggcuuagcguguguccuaaucuucucucugcguguagguaggccugugccgcaaacaagcuuaccauggagcugcucauccugaaggccaacgccaucaccaccauccugacggcggugaccuucugcuucgccagcggccagaacaucaccgaggaguucuaccaguccacgugcagcgccgucuccaagggguaccucagcgcccugcggaccggcugguacaccuccgugaucaccaucgagcugagcaacaucaaggagaacaagugcaacgggaccgacgccaaggugaagcucaucaagcaggagcuggacaaguacaagaacgcggucacggagcugcagcuccugaugcaguccaccccggcaaccggcuccggcuccgccaucgcgagcggcgucgccgugugcaaggugcugcaccucgagggggaggucaacaagaucaagagcgcccugcuguccaccaacaaggccguggugagccucuccaacggcgucagcgugcugaccuucaaggugcuggaccucaagaacuacaucgacaagcagcugcugcccauccugaacaagcagagcugcuccaucagcaacaucgagacggugaucgaguuccagcagaagaacaaccggcuccuggagaucacccgcgaguucagcgugaacgccggggucaccacccccguguccacguacaugcugaccaacagcgagcuccugucccugaucaacgacaugccgaucaccaacgaccagaagaagcucaugagcaacaacgugcagaucguccggcagcaguccuacagcaucaugugcaucaucaaggaggaggugcuggcguacgugguccagcugccccucuacggcgugaucgacacccccugcuggaagcugcacacgagcccccugugcaccaccaacaccaaggagggguccaacaucugccucacgcgcaccgaccggggcugguacugcgacaacgccggcagcgucuccuucuucccgcaggccgagaccugcaaggugcagagcaaccgcguguucugcgacaccaugaacucccggacgcugcccagcgagguaaaccucugcaacgucgacaucuucaaccccaaguacgacugcaagaucaugaccuccaagaccgacgugagcuccagcgugaucaccucccugggggccaucgucagcugcuacggcaagacgaagugcaccgccagcaacaagaaccgggggaucaucaagaccuucuccaacggcugcgacuacgugagcaacaagggcguggacaccguguccgucgggaacacccuguacuacgugaacaagcaggagggcaagagccucuacgugaagggggagcccaucaucaacuucuacgacccgcuggucuuccccuccgacgaguucgacgcgagcaucucccaggugaacgagaagaucaaccagagccuggccuucauccgcaaguccgacgagcugcuccacaacgugaacgccggcaagagcacgaccaacaucaugaucaccaccaucaucaucgucaucaucgugauccugcugucccucaucgccguggggcugcugcucuacugcaaggcccggugaggacuaguaauaaggaaacuguaugaaugucugugggcaggaagugaagagauccuucuguaaagguuuuuggaauuaugucugcugaauaauaaacuuuuuugaaauaauaaaucugguagaaaaaugagaucuaaaaaaaaaaaaaaaaaaaaaaaaaaaaaaaaaaaaaaaaaaaaaaaaaaaaaaaaaaaaaaaaugcaucccccccccccccccccccccccccccccccaaaggcucuuuucagagccaccagaauu

SEQ ID NO: 4485 - RNA, 1904 nt, Artificial Sequence
  mRNA product Design g-2 comprising derived and/or modified sequence from HRSV(A2)__F-del_DSCav1_mut0 (opt1)
gggagaguccgcucagccagguugcagaagcggcuuagcguguguccuaaucuucucucugcguguagguaggccugugccgcaaacaagcuuaccauggagcugcucauccugaaggccaacgccaucaccaccauccugacggcggugaccuucugcuucgccagcggccagaacaucaccgaggaguucuaccaguccacgugcagcgccgucuccaagggguaccucagcgcccugcgcaccggcugguacaccuccgugaucaccaucgagcugagcaacaucaaggagaacaagugcaacgggaccgacgccaaggugaagcucaucaagcaggagcuggacaaguacaagaacgcggucacggagcugcagcuccugaugcaguccacccccgccaccggcagcggguccgccaucgccagcggcguggcggugugcaagguccugcaccucgagggcgaggugaacaagaucaaguccgcccugcugagcaccaacaaggccguggucucccucagcaacgggguguccgugcugacguucaagguccuggaccucaagaacuacaucgacaagcagcugcugccgauccucaacaagcagagcugcuccaucagcaacaucgagaccgugaucgaguuccagcagaagaacaaccggcugcuggagaucacccgcgaguucuccgugaacgccggcgucaccacgcccgugagcaccuacaugcucaccaacagcgagcugcugucccucaucaacgacaugcccaucaccaacgaccagaagaagcugaugagcaacaacgugcagaucguccggcagcaguccuacagcaucaugugcaucaucaaggaggaggugcuggccuacgugguccagcucccccuguacggggugaucgacacgccgugcuggaagcugcacaccagcccccucugcaccaccaacacgaaggagggcuccaacaucugccugacccgcaccgaccgggggugguacugcgacaacgcgggcuccgugagcuucuucccccaggccgagaccugcaagguccaguccaaccgcguguucugcgacacgaugaacagccggacccuccccuccgaggucaaccugugcaacguggacaucuucaacccgaaguacgacugcaagaucaugaccagcaagaccgacguguccagcuccgucaucacgagccugggcgccaucguguccugcuacgggaagaccaagugcaccgccagcaacaagaaccggggcaucaucaagaccuucuccaacgggugcgacuacgugagcaacaagggcgucgacacggugagcgugggcaacacccucuacuacgucaacaagcaggaggggaagucccuguacgugaagggcgagcccaucaucaacuucuacgacccccugguguuccccagcgacgaguucgacgccuccaucagccaggucaacgagaagaucaaccagucccucgcguucauccgcaagagcgacgagcugcugcacaacgugaacgccgggaaguccaccaccaacaucaugaucaccacgaucaucaucgugaucaucgucauccuccugagccugaucgccgugggccuccugcuguacugcaaggcccggugaggacuaguaauaaggaaacuguaugaaugucugugggcaggaagugaagagauccuucuguaaagguuuuuggaauuaugucugcugaauaauaaacuuuuuugaaauaauaaaucugguagaaaaaugagaucuaaaaaaaaaaaaaaaaaaaaaaaaaaaaaaaaaaaaaaaaaaaaaaaaaaaaaaaaaaaaaaaaugcaucccccccccccccccccccccccccccccccaaaggcucuuuucagagccaccagaauu

SEQ ID NO: 4486 - RNA, 1904 nt, Artificial Sequence
  mRNA product Design g-2 comprising derived and/or modified sequence from HRSV(A2)__F-del_DSCav1_mut0 (opt2)
gggagaguccgcucagccagguugcagaagcggcuuagcguguguccuaaucuucucucugcguguagguaggccugugccgcaaacaagcuuaccauggagcuccucauccucaaggccaacgccaucaccaccauccucaccgccgucaccuucugcuucgccuccggccagaacaucaccgaggaguucuaccaguccaccugcuccgccgucuccaagggcuaccucuccgcccuccgcaccggcugguacaccuccgucaucaccaucgagcucuccaacaucaaggagaacaagugcaacggcaccgacgccaaggucaagcucaucaagcaggagcucgacaaguacaagaacgccgucaccgagcuccagcuccucaugcaguccacccccgccaccggcuccggcuccgccaucgccuccggcgucgccgucugcaagguccuccaccucgagggcgaggucaacaagaucaaguccgcccuccucuccaccaacaaggccgucgucucccucuccaacggcgucuccguccucaccuucaagguccucgaccucaagaacuacaucgacaagcagcuccuccccauccucaacaagcaguccugcuccaucuccaacaucgagaccgucaucgaguuccagcagaagaacaaccgccuccucgagaucacccgcgaguucuccgucaacgccggcgucaccacccccgucuccaccuacaugcucaccaacuccgagcuccucucccucaucaacgacaugcccaucaccaacgaccagaagaagcucauguccaacaacguccagaucguccgccagcaguccuacuccaucaugugcaucaucaaggaggagguccucgccuacgucguccagcucccccucuacggcgucaucgacacccccugcuggaagcuccacaccuccccccucugcaccaccaacaccaaggagggcuccaacaucugccucacccgcaccgaccgcggcugguacugcgacaacgccggcuccgucuccuucuucccccaggccgagaccugcaagguccaguccaaccgcgucuucugcgacaccaugaacucccgcacccuccccuccgaggucaaccucugcaacgucgacaucuucaaccccaaguacgacugcaagaucaugaccuccaagaccgacgucuccuccuccgucaucaccucccucggcgccaucgucuccugcuacggcaagaccaagugcaccgccuccaacaagaaccgcggcaucaucaagaccuucuccaacggcugcgacuacgucuccaacaagggcgucgacaccgucuccgucggcaacacccucuacuacgucaacaagcaggagggcaagucccucuacgucaagggcgagcccaucaucaacuucuacgacccccucgucuuccccuccgacgaguucgacgccuccaucucccaggucaacgagaagaucaaccagucccucgccuucauccgcaaguccgacgagcuccuccacaacgucaacgccggcaaguccaccaccaacaucaugaucaccaccaucaucaucgucaucaucgucauccuccucucccucaucgccgucggccuccuccucuacugcaaggcccgcugaggacuaguaauaaggaaacuguaugaaugucugugggcaggaagugaagagauccuucuguaaagguuuuuggaauuaugucugcugaauaauaaacuuuuuugaaauaauaaaucugguagaaaaaugagaucuaaaaaaaaaaaaaaaaaaaaaaaaaaaaaaaaaaaaaaaaaaaaaaaaaaaaaaaaaaaaaaaaugcaucccccccccccccccccccccccccccccccaaaggcucuuuucagagccaccagaauu

SEQ ID NO: 4487 - RNA, 1904 nt, Artificial Sequence
  mRNA product Design g-2 comprising derived and/or modified sequence from HRSV(A2)__F-del_DSCav1_mut0 (opt3)
gggagaguccgcucagccagguugcagaagcggcuuagcguguguccuaaucuucucucugcguguagguaggccugugccgcaaacaagcuuaccauggagcugcucauccuuaaggccaacgcuauuaccacaauacugacugcagugacguucugcuuugccagcggccagaauaucaccgaagaguucuaccaauccacauguucugcggucucaaaaggguauuugagugcuuuaagaacuggaugguacaccagcguuauuacaaucgaacuguccaacauuaaggagaauaaaugcaacgguaccgacgccaaggugaaacuaaucaagcaggaacucgauaaguauaaaaaugcaguaacugagcugcagcuucugaugcagucuacacccgccaccggcucggggucagcuauagcaagcggaguggccgucuguaagguguugcaccucgagggcgaaguuaacaaaaucaagagugcucugcuguccacgaauaaagccguggucucucucagcaacgguguguccguauuaacuuuuaagguucuggaccuuaagaauuacauugauaaacaauugcugccuauccuaaacaagcagucaugcaguauuagcaauaucgagaccgugauagaguuccagcagaaaaacaauaggcuccuggaaauuacacgggaguuuucugucaacgcgggggugacuaccccaguguccacauauaugcuuaccaauucagaacuguugagccucaucaacgacaugccgauuacgaacgaucaaaagaaacugaugaguaauaacguccagaucguucgccagcagucuuacuccaucauguguauuauaaaggaggaaguguuagcauauguagugcaacugccccucuacggagucaucgacacuccuugcuggaaacuucauacaagcccacuguguaccacuaauacaaaggagggcucgaacauuugcuugacccgaacggaucguggcugguacugugacaaugccgggucuguguccuucuuuccccaggcugaaaccugcaagguucagucaaacagaguguucugugauacaaugaauaguagaacucugccuagcgaggucaaccucugcaauguggacaucuuuaacccaaaauaugauugcaagauaaugaccuccaaaacagacguaucuagcucaguuauuaccagucugggagccaucguguccuguuacgguaagacuaaaugcacagcaagcaauaagaacaggggcaucauuaagaccuucucuaaugggugugauuaugucucaaacaaaggaguggacacugucagugugggcaauacgcuuuacuauguuaacaagcaagaggguaaaagccuguacgugaagggggaacccaucauuaacuuuuaugacccuuugguauucccauccgaugaguuugacgcuucuauaucgcaggucaaugagaaaaucaaccagagccucgccuucauucggaaguccgaugaacuguuacacaaugugaacgcgggaaagucaacaaccaauaucaugaucacuaccauuauaaucguuauuaucgugauucugcuaagucucaucgccgucggccugcuuuuguacugcaaagcacgcugaggacuaguaauaaggaaacuguaugaaugucugugggcaggaagugaagagauccuucuguaaagguuuuuggaauuaugucugcugaauaauaaacuuuuuugaaauaauaaaucugguagaaaaaugagaucuaaaaaaaaaaaaaaaaaaaaaaaaaaaaaaaaaaaaaaaaaaaaaaaaaaaaaaaaaaaaaaaaugcaucccccccccccccccccccccccccccccccaaaggcucuuuucagagccaccagaauu

SEQ ID NO: 4488 - RNA, 1904 nt, Artificial Sequence
  mRNA product Design g-2 comprising derived and/or modified sequence from HRSV(A2)__F-del_DSCav1_mut0 (opt4)
gggagaguccgcucagccagguugcagaagcggcuuagcguguguccuaaucuucucucugcguguagguaggccugugccgcaaacaagcuuaccauggagcugcugauccugaaggccaacgccaucaccaccauccugaccgccgugaccuucugcuucgccagcggccagaacaucaccgaggaguucuaccagagcaccugcagcgccgugagcaagggcuaccugagcgcccugagaaccggcugguacaccagcgugaucaccaucgagcugagcaacaucaaggagaacaagugcaacggcaccgacgccaaggugaagcugaucaagcaggagcuggacaaguacaagaacgccgugaccgagcugcagcugcugaugcagagcacccccgccaccggcagcggcagcgccaucgccagcggcguggccgugugcaaggugcugcaccuggagggcgaggugaacaagaucaagagcgcccugcugagcaccaacaaggccguggugagccugagcaacggcgugagcgugcugaccuucaaggugcuggaccugaagaacuacaucgacaagcagcugcugcccauccugaacaagcagagcugcagcaucagcaacaucgagaccgugaucgaguuccagcagaagaacaacagacugcuggagaucaccagagaguucagcgugaacgccggcgugaccacccccgugagcaccuacaugcugaccaacagcgagcugcugagccugaucaacgacaugcccaucaccaacgaccagaagaagcugaugagcaacaacgugcagaucgugagacagcagagcuacagcaucaugugcaucaucaaggaggaggugcuggccuacguggugcagcugccccuguacggcgugaucgacacccccugcuggaagcugcacaccagcccccugugcaccaccaacaccaaggagggcagcaacaucugccugaccagaaccgacagaggcugguacugcgacaacgccggcagcgugagcuucuucccccaggccgagaccugcaaggugcagagcaacagaguguucugcgacaccaugaacagcagaacccugcccagcgaggugaaccugugcaacguggacaucuucaaccccaaguacgacugcaagaucaugaccagcaagaccgacgugagcagcagcgugaucaccagccugggcgccaucgugagcugcuacggcaagaccaagugcaccgccagcaacaagaacagaggcaucaucaagaccuucagcaacggcugcgacuacgugagcaacaagggcguggacaccgugagcgugggcaacacccuguacuacgugaacaagcaggagggcaagagccuguacgugaagggcgagcccaucaucaacuucuacgacccccugguguuccccagcgacgaguucgacgccagcaucagccaggugaacgagaagaucaaccagagccuggccuucaucagaaagagcgacgagcugcugcacaacgugaacgccggcaagagcaccaccaacaucaugaucaccaccaucaucaucgugaucaucgugauccugcugagccugaucgccgugggccugcugcuguacugcaaggccagaugaggacuaguaauaaggaaacuguaugaaugucugugggcaggaagugaagagauccuucuguaaagguuuuuggaauuaugucugcugaauaauaaacuuuuuugaaauaauaaaucugguagaaaaaugagaucuaaaaaaaaaaaaaaaaaaaaaaaaaaaaaaaaaaaaaaaaaaaaaaaaaaaaaaaaaaaaaaaaugcaucccccccccccccccccccccccccccccccaaaggcucuuuucagagccaccagaauu

SEQ ID NO: 4489 - RNA, 1904 nt, Artificial Sequence
  mRNA product Design g-2 comprising derived and/or modified sequence from HRSV(A2)__F-del_DSCav1_mut0 (opt5)
gggagaguccgcucagccagguugcagaagcggcuuagcguguguccuaaucuucucucugcguguagguaggccugugccgcaaacaagcuuaccauggagcugcucauccugaaggccaacgcuauuaccacaauccuuacggccgugaccuucugcuuugcgagcggccagaauauuacagaagaguucuaccaauccaccuguucugcugucagcaaaggguaucuguccgcccucagaacaggaugguacaccucuguuaucacaauugaacugagcaacaucaaggagaauaaaugcaacggcaccgacgccaaggugaaacuuaucaagcaggaacuggauaaguauaaaaaugcugugacggagcuccagcugcugaugcaguccacccccgccacagggucuggaagcgcuauugccuccggcgucgcgguguguaagguucuccaccuggagggggaagugaacaaaaucaagagcgcccuucugucuaccaauaaagcugucgugucccucagcaacggaguuucugugcugacauuuaagguccuugaccugaagaauuacauugauaaacaacuccugccuauccugaacaagcaguccugcagcauuucuaauaucgagaccgugauugaguuccagcagaaaaacaaucggcuccuggaaaucacgcgcgaguuuuccgugaacgccggcgucacaaccccgguuagcacauauaugcuuaccaauuccgaacugcucucucugaucaacgacaugcccauuaccaacgaucaaaagaaacuuaugagcaauaacgugcagaucgugagacagcaguccuacagcauuauguguaucauuaaggaggaaguccuggcuuaugugguucaacucccucuguacggcgugaucgacacacccugcuggaaacugcauacgucuccucucuguaccacaaauaccaaggagggguccaacaucugccugacacggaccgaucgcggaugguacugugacaaugccggcagcgucucuuucuuuccccaggcggaaacgugcaaggugcagagcaacagaguuuucugugauacaaugaacuccagaacccugccuucugaggugaaucucugcaaugucgacauuuuuaacccgaaauaugauugcaagaucaugaccagcaaaacagacguguccagcucugucauuaccucccugggggccaucgugagcuguuacggaaagacaaaaugcacggcuucuaauaagaaccggggcauuaucaagaccuucuccaaugggugugauuauguuagcaacaaaggaguggacacagucuccgugggcaauacccuuuacuauguuaacaagcaagagggcaaaucucuguacgugaagggggaacccaucauuaacuuuuaugacccucucgucuuccccagcgaugaguuugacgccuccaucucucaggugaaugagaaaauuaaccagagccuggcuuucauccgcaaguccgaugaacugcuccacaaugugaacgccggaaagagcacaaccaauauuaugaucacgaccauuaucaucguuauuaucgucauucugcuuucucugaucgccgugggccuccugcuguacugcaaagcuagaugaggacuaguaauaaggaaacuguaugaaugucugugggcaggaagugaagagauccuucuguaaagguuuuuggaauuaugucugcugaauaauaaacuuuuuugaaauaauaaaucugguagaaaaaugagaucuaaaaaaaaaaaaaaaaaaaaaaaaaaaaaaaaaaaaaaaaaaaaaaaaaaaaaaaaaaaaaaaaugcaucccccccccccccccccccccccccccccccaaaggcucuuuucagagccaccagaauu

SEQ ID NO: 4490 - RNA, 1904 nt, Artificial Sequence
  mRNA product Design g-2 comprising derived and/or modified sequence from HRSV(A2)__F-del_DSCav1_mut0 (opt6)
gggagaguccgcucagccagguugcagaagcggcuuagcguguguccuaaucuucucucugcguguagguaggccugugccgcaaacaagcuuaccauggaauuacucauccucaaagcaaacgcaauaacaacaauacuaacagcagucacuuucugcuucgcauccggacaaaauaucacagaagaauuuuaccaauccaccugcucugcugucuccaaaggauaccuaucugcccucagaaccgguugguauacaucugucauaaccauagaacuaucaaacauuaaagaaaacaaauguaacggaacagacgcaaaagucaaacuuauaaaacaagaauuagacaaauacaaaaacgcagucacagaauuacaacuacuaaugcaaucaaccccagcaaccggaucaggauccgcaauagcuucaggaguagcaguauguaaaguucuacacuuagaaggagaagucaacaaaauuaaauccgcacuauuaucaaccaacaaagcagucguaucuuuaucaaacggaguaucuguacuuacauucaaaguacuagaccuaaaaaauuacauugauaaacaauuacuaccaauacuaaacaaacaaucauguuccaucucuaacauagaaacaguaauagaauuucaacaaaaaaauaacagauuacuugaaaucacccgagaauuuucaguaaacgcaggaguaaccacacccguaucuacauacaugcuaacaaacucugaacuucugagccuaauaaaugacaugccaauaaccaacgaccaaaaaaaacuaauguccaacaacguacaaauaguacgacaacaaucuuacucaaucaugugcauaaucaaagaagaaguacuagcuuauguaguccaacuuccacucuacggaguaauagacacccccugcuggaaacuacacacaucaccacuaugcacaacaaacacaaaagaaggcucaaacauaugccuaacaagaacugacagaggaugguauugugacaaugcaggcucugucucauucuuuccacaagccgaaacaugcaaaguucaaucaaaccgaguuuucugugacacaaugaacucuagaacucucccaucagaagucaacuuaugcaacguugacauauucaacccaaaauaugacuguaaaauaaugacuuccaaaacugauguaucauccuccgucauaacaucccuaggagcuauuguaucauguuacgggaaaaccaaaugcacagccucaaacaaaaaccgcgguaucauaaaaacauuuucaaacggaugugauuacguaagcaauaaaggaguagacaccguaucaguaggaaauacacuauacuauguaaauaaacaagaaggaaaaucacuauaugucaaaggagaaccaaucauaaauuucuaugacccacuuguauucccauccgaugaauuugacgcaagcauuucacaggucaacgaaaaaauaaaccaaucacuagccuucaucagaaaaucagacgaacuacuacauaacguaaacgccggaaaaucaacaaccaacauaaugauaacaacaaucauaauaguuaucauaguaauacuacuaucucuaauagcugucggacucuuacuauauugcaaagcccgauaaggacuaguaauaaggaaacuguaugaaugucugugggcaggaagugaagagauccuucuguaaagguuuuuggaauuaugucugcugaauaauaaacuuuuuugaaauaauaaaucugguagaaaaaugagaucuaaaaaaaaaaaaaaaaaaaaaaaaaaaaaaaaaaaaaaaaaaaaaaaaaaaaaaaaaaaaaaaaugcaucccccccccccccccccccccccccccccccaaaggcucuuuucagagccaccagaauu

SEQ ID NO: 4491 - RNA, 1904 nt, Artificial Sequence
  mRNA product Design g-2 comprising derived and/or modified sequence from HRSV(A2)__F-del_DSCav1_mut0 (opt11)
gggagaguccgcucagccagguugcagaagcggcuuagcguguguccuaaucuucucucugcguguagguaggccugugccgcaaacaagcuuaccauggaacuacuaauccugaaagccaacgccauaaccacaauccuuaccgcagucaccuucugcuucgccuccggucaaaacaucacagaagaguucuaccaauccaccuguuccgcagucagcaaaggcuaccucuccgcacuccgaaccggaugguacaccagcgucaucaccaucgaacuauccaacauaaaggaaaauaagugcaaugguacagaugccaaggucaaacucauaaagcaagaacucgacaaauacaaaaacgccgucaccgaacuacaacuacuaaugcaaucuacccccgcaacaggcucagguuccgccauagccuccggcgucgccguuugcaaaguccuccaccucgaaggcgaaguaaacaaaaucaaauccgcccuacucucaaccaacaaagcagucgucucccucucaaacggagucucgguccucaccuucaaaguccucgaccucaaaaacuauauagacaaacaacuccuacccauacucaacaaacaguccugcagcauauccaacaucgaaaccgugaucgaguuccaacagaaaaacaacagacuccucgaaaucacucgagaguucuccguaaacgccggcgucacaaccccagucucaacauacaugcucaccaacagcgaacuccuaucacuaaucaacgacaugccuaucacaaaugaucagaagaaacuaaugagcaacaacguccaaaucguccgccaacaaucauacuccaucaugugcaucauaaaagaagaaguccuagccuacgugguccagcuaccccucuacggcguaauugacaccccuugcuggaaacuacacacuucaccccucugcacaaccaacaccaaagaagguucaaacaucugccucacacgaacagaccgcggcugguacugcgacaacgccggauccguauccuucuucccccaagcagaaaccugcaaaguucaauccaaccggguauucugcgacaccaugaacucaagaacccuucccuccgaaguaaaucuaugcaacgucgacauauucaacccaaaauacgacugcaaaaucaugaccuccaaaaccgaugucuccagcagcgucaucaccagccucggcgccaucgucuccugcuacggcaaaacaaaauguacagcauccaacaaaaaccgaggcauaaucaaaaccuucuccaacgggugcgauuacgucagcaacaaaggcgucgacaccgucuccgugggcaacacccuauacuacgucaacaaacaagaaggcaaaucacuguacguaaagggcgaacccaucaucaacuucuaugacccucugguguucccauccgaugaauuugacgcauccauaucucaggucaacgaaaagaucaaccaaucccucgccuucauacgcaaauccgacgaacuccuacacaacgucaacgcugguaaaagcaccaccaacaucaugaucaccacaaucaucaucgucauaaucguuauccuacucucccuuauagcagucggacuccuccucuacugcaaagcccgcuaaggacuaguaauaaggaaacuguaugaaugucugugggcaggaagugaagagauccuucuguaaagguuuuuggaauuaugucugcugaauaauaaacuuuuuugaaauaauaaaucugguagaaaaaugagaucuaaaaaaaaaaaaaaaaaaaaaaaaaaaaaaaaaaaaaaaaaaaaaaaaaaaaaaaaaaaaaaaaugcaucccccccccccccccccccccccccccccccaaaggcucuuuucagagccaccagaauu

SEQ ID NO: 4492 - RNA, 2136 nt, Artificial Sequence
  mRNA product Design g-3 comprising derived and/or modified sequence from HRSV(A2)__F-del_DSCav1_mut0 (opt1)
gggagaguccgcucagccagguugcagaagcggcuuagcguguguccuaaucuucucucugcguguagguaggccugugccgcaaacaagcuuaccauggagcugcucauccugaaggccaacgccaucaccaccauccugacggcggugaccuucugcuucgccagcggccagaacaucaccgaggaguucuaccaguccacgugcagcgccgucuccaagggguaccucagcgcccugcggaccggcugguacaccuccgugaucaccaucgagcugagcaacaucaaggagaacaagugcaacgggaccgacgccaaggugaagcucaucaagcaggagcuggacaaguacaagaacgcggucacggagcugcagcuccugaugcaguccaccccggcaaccggcuccggcuccgccaucgcgagcggcgucgccgugugcaaggugcugcaccucgagggggaggucaacaagaucaagagcgcccugcuguccaccaacaaggccguggugagccucuccaacggcgucagcgugcugaccuucaaggugcuggaccucaagaacuacaucgacaagcagcugcugcccauccugaacaagcagagcugcuccaucagcaacaucgagacggugaucgaguuccagcagaagaacaaccggcuccuggagaucacccgcgaguucagcgugaacgccggggucaccacccccguguccacguacaugcugaccaacagcgagcuccugucccugaucaacgacaugccgaucaccaacgaccagaagaagcucaugagcaacaacgugcagaucguccggcagcaguccuacagcaucaugugcaucaucaaggaggaggugcuggcguacgugguccagcugccccucuacggcgugaucgacacccccugcuggaagcugcacacgagcccccugugcaccaccaacaccaaggagggguccaacaucugccucacgcgcaccgaccggggcugguacugcgacaacgccggcagcgucuccuucuucccgcaggccgagaccugcaaggugcagagcaaccgcguguucugcgacaccaugaacucccggacgcugcccagcgagguaaaccucugcaacgucgacaucuucaaccccaaguacgacugcaagaucaugaccuccaagaccgacgugagcuccagcgugaucaccucccugggggccaucgucagcugcuacggcaagacgaagugcaccgccagcaacaagaaccgggggaucaucaagaccuucuccaacggcugcgacuacgugagcaacaagggcguggacaccguguccgucgggaacacccuguacuacgugaacaagcaggagggcaagagccucuacgugaagggggagcccaucaucaacuucuacgacccgcuggucuuccccuccgacgaguucgacgcgagcaucucccaggugaacgagaagaucaaccagagccuggccuucauccgcaaguccgacgagcugcuccacaacgugaacgccggcaagagcacgaccaacaucaugaucaccaccaucaucaucgucaucaucgugauccugcugucccucaucgccguggggcugcugcucuacugcaaggcccggugaggacuagugaagggaacacccaaauuuaauucagccuuaagcacaauuaauuaagagugaaacguaauuguacaagcaguuggucacccaccauagggcaugaucaacaccgcaaccuuuccuuuuucccccagugauucugaaaaaccccucuucccuucagcuugcuuagauguuccaaauuuaguaagcuuaaggcggccuacagaagaaaaagaaaaaaaaggccacaaaaguucccucucacuuucaguaaauaaaauaaaagcagcaacagaaauaaagaaauaaaugaaauucaaaaugaaauaaauauuguguugugcagcauuaaaaaaucaauaaaaauuaaaaaugagcaagaucuaaaaaaaaaaaaaaaaaaaaaaaaaaaaaaaaaaaaaaaaaaaaaaaaaaaaaaaaaaaaaaaaugcaucccccccccccccccccccccccccccccccaaaggcucuuuucagagccaccagaauu

SEQ ID NO: 4493 - RNA, 2136 nt, Artificial Sequence
  mRNA product Design g-3 comprising derived and/or modified sequence from HRSV(A2)__F-del_DSCav1_mut0 (opt1)
gggagaguccgcucagccagguugcagaagcggcuuagcguguguccuaaucuucucucugcguguagguaggccugugccgcaaacaagcuuaccauggagcugcucauccugaaggccaacgccaucaccaccauccugacggcggugaccuucugcuucgccagcggccagaacaucaccgaggaguucuaccaguccacgugcagcgccgucuccaagggguaccucagcgcccugcgcaccggcugguacaccuccgugaucaccaucgagcugagcaacaucaaggagaacaagugcaacgggaccgacgccaaggugaagcucaucaagcaggagcuggacaaguacaagaacgcggucacggagcugcagcuccugaugcaguccacccccgccaccggcagcggguccgccaucgccagcggcguggcggugugcaagguccugcaccucgagggcgaggugaacaagaucaaguccgcccugcugagcaccaacaaggccguggucucccucagcaacgggguguccgugcugacguucaagguccuggaccucaagaacuacaucgacaagcagcugcugccgauccucaacaagcagagcugcuccaucagcaacaucgagaccgugaucgaguuccagcagaagaacaaccggcugcuggagaucacccgcgaguucuccgugaacgccggcgucaccacgcccgugagcaccuacaugcucaccaacagcgagcugcugucccucaucaacgacaugcccaucaccaacgaccagaagaagcugaugagcaacaacgugcagaucguccggcagcaguccuacagcaucaugugcaucaucaaggaggaggugcuggccuacgugguccagcucccccuguacggggugaucgacacgccgugcuggaagcugcacaccagcccccucugcaccaccaacacgaaggagggcuccaacaucugccugacccgcaccgaccgggggugguacugcgacaacgcgggcuccgugagcuucuucccccaggccgagaccugcaagguccaguccaaccgcguguucugcgacacgaugaacagccggacccuccccuccgaggucaaccugugcaacguggacaucuucaacccgaaguacgacugcaagaucaugaccagcaagaccgacguguccagcuccgucaucacgagccugggcgccaucguguccugcuacgggaagaccaagugcaccgccagcaacaagaaccggggcaucaucaagaccuucuccaacgggugcgacuacgugagcaacaagggcgucgacacggugagcgugggcaacacccucuacuacgucaacaagcaggaggggaagucccuguacgugaagggcgagcccaucaucaacuucuacgacccccugguguuccccagcgacgaguucgacgccuccaucagccaggucaacgagaagaucaaccagucccucgcguucauccgcaagagcgacgagcugcugcacaacgugaacgccgggaaguccaccaccaacaucaugaucaccacgaucaucaucgugaucaucgucauccuccugagccugaucgccgugggccuccugcuguacugcaaggcccggugaggacuagugaagggaacacccaaauuuaauucagccuuaagcacaauuaauuaagagugaaacguaauuguacaagcaguuggucacccaccauagggcaugaucaacaccgcaaccuuuccuuuuucccccagugauucugaaaaaccccucuucccuucagcuugcuuagauguuccaaauuuaguaagcuuaaggcggccuacagaagaaaaagaaaaaaaaggccacaaaaguucccucucacuuucaguaaauaaaauaaaagcagcaacagaaauaaagaaauaaaugaaauucaaaaugaaauaaauauuguguugugcagcauuaaaaaaucaauaaaaauuaaaaaugagcaagaucuaaaaaaaaaaaaaaaaaaaaaaaaaaaaaaaaaaaaaaaaaaaaaaaaaaaaaaaaaaaaaaaaugcaucccccccccccccccccccccccccccccccaaaggcucuuuucagagccaccagaauu

SEQ ID NO: 4494 - RNA, 2136 nt, Artificial Sequence
  mRNA product Design g-3 comprising derived and/or modified sequence from HRSV(A2)__F-del_DSCav1_mut0 (opt2)
gggagaguccgcucagccagguugcagaagcggcuuagcguguguccuaaucuucucucugcguguagguaggccugugccgcaaacaagcuuaccauggagcuccucauccucaaggccaacgccaucaccaccauccucaccgccgucaccuucugcuucgccuccggccagaacaucaccgaggaguucuaccaguccaccugcuccgccgucuccaagggcuaccucuccgcccuccgcaccggcugguacaccuccgucaucaccaucgagcucuccaacaucaaggagaacaagugcaacggcaccgacgccaaggucaagcucaucaagcaggagcucgacaaguacaagaacgccgucaccgagcuccagcuccucaugcaguccacccccgccaccggcuccggcuccgccaucgccuccggcgucgccgucugcaagguccuccaccucgagggcgaggucaacaagaucaaguccgcccuccucuccaccaacaaggccgucgucucccucuccaacggcgucuccguccucaccuucaagguccucgaccucaagaacuacaucgacaagcagcuccuccccauccucaacaagcaguccugcuccaucuccaacaucgagaccgucaucgaguuccagcagaagaacaaccgccuccucgagaucacccgcgaguucuccgucaacgccggcgucaccacccccgucuccaccuacaugcucaccaacuccgagcuccucucccucaucaacgacaugcccaucaccaacgaccagaagaagcucauguccaacaacguccagaucguccgccagcaguccuacuccaucaugugcaucaucaaggaggagguccucgccuacgucguccagcucccccucuacggcgucaucgacacccccugcuggaagcuccacaccuccccccucugcaccaccaacaccaaggagggcuccaacaucugccucacccgcaccgaccgcggcugguacugcgacaacgccggcuccgucuccuucuucccccaggccgagaccugcaagguccaguccaaccgcgucuucugcgacaccaugaacucccgcacccuccccuccgaggucaaccucugcaacgucgacaucuucaaccccaaguacgacugcaagaucaugaccuccaagaccgacgucuccuccuccgucaucaccucccucggcgccaucgucuccugcuacggcaagaccaagugcaccgccuccaacaagaaccgcggcaucaucaagaccuucuccaacggcugcgacuacgucuccaacaagggcgucgacaccgucuccgucggcaacacccucuacuacgucaacaagcaggagggcaagucccucuacgucaagggcgagcccaucaucaacuucuacgacccccucgucuuccccuccgacgaguucgacgccuccaucucccaggucaacgagaagaucaaccagucccucgccuucauccgcaaguccgacgagcuccuccacaacgucaacgccggcaaguccaccaccaacaucaugaucaccaccaucaucaucgucaucaucgucauccuccucucccucaucgccgucggccuccuccucuacugcaaggcccgcugaggacuagugaagggaacacccaaauuuaauucagccuuaagcacaauuaauuaagagugaaacguaauuguacaagcaguuggucacccaccauagggcaugaucaacaccgcaaccuuuccuuuuucccccagugauucugaaaaaccccucuucccuucagcuugcuuagauguuccaaauuuaguaagcuuaaggcggccuacagaagaaaaagaaaaaaaaggccacaaaaguucccucucacuuucaguaaauaaaauaaaagcagcaacagaaauaaagaaauaaaugaaauucaaaaugaaauaaauauuguguugugcagcauuaaaaaaucaauaaaaauuaaaaaugagcaagaucuaaaaaaaaaaaaaaaaaaaaaaaaaaaaaaaaaaaaaaaaaaaaaaaaaaaaaaaaaaaaaaaaugcaucccccccccccccccccccccccccccccccaaaggcucuuuucagagccaccagaauu

SEQ ID NO: 4495 - RNA, 2136 nt, Artificial Sequence
  mRNA product Design g-3 comprising derived and/or modified sequence from HRSV(A2)__F-del_DSCav1_mut0 (opt3)
gggagaguccgcucagccagguugcagaagcggcuuagcguguguccuaaucuucucucugcguguagguaggccugugccgcaaacaagcuuaccauggagcugcucauccuuaaggccaacgcuauuaccacaauacugacugcagugacguucugcuuugccagcggccagaauaucaccgaagaguucuaccaauccacauguucugcggucucaaaaggguauuugagugcuuuaagaacuggaugguacaccagcguuauuacaaucgaacuguccaacauuaaggagaauaaaugcaacgguaccgacgccaaggugaaacuaaucaagcaggaacucgauaaguauaaaaaugcaguaacugagcugcagcuucugaugcagucuacacccgccaccggcucggggucagcuauagcaagcggaguggccgucuguaagguguugcaccucgagggcgaaguuaacaaaaucaagagugcucugcuguccacgaauaaagccguggucucucucagcaacgguguguccguauuaacuuuuaagguucuggaccuuaagaauuacauugauaaacaauugcugccuauccuaaacaagcagucaugcaguauuagcaauaucgagaccgugauagaguuccagcagaaaaacaauaggcuccuggaaauuacacgggaguuuucugucaacgcgggggugacuaccccaguguccacauauaugcuuaccaauucagaacuguugagccucaucaacgacaugccgauuacgaacgaucaaaagaaacugaugaguaauaacguccagaucguucgccagcagucuuacuccaucauguguauuauaaaggaggaaguguuagcauauguagugcaacugccccucuacggagucaucgacacuccuugcuggaaacuucauacaagcccacuguguaccacuaauacaaaggagggcucgaacauuugcuugacccgaacggaucguggcugguacugugacaaugccgggucuguguccuucuuuccccaggcugaaaccugcaagguucagucaaacagaguguucugugauacaaugaauaguagaacucugccuagcgaggucaaccucugcaauguggacaucuuuaacccaaaauaugauugcaagauaaugaccuccaaaacagacguaucuagcucaguuauuaccagucugggagccaucguguccuguuacgguaagacuaaaugcacagcaagcaauaagaacaggggcaucauuaagaccuucucuaaugggugugauuaugucucaaacaaaggaguggacacugucagugugggcaauacgcuuuacuauguuaacaagcaagaggguaaaagccuguacgugaagggggaacccaucauuaacuuuuaugacccuuugguauucccauccgaugaguuugacgcuucuauaucgcaggucaaugagaaaaucaaccagagccucgccuucauucggaaguccgaugaacuguuacacaaugugaacgcgggaaagucaacaaccaauaucaugaucacuaccauuauaaucguuauuaucgugauucugcuaagucucaucgccgucggccugcuuuuguacugcaaagcacgcugaggacuagugaagggaacacccaaauuuaauucagccuuaagcacaauuaauuaagagugaaacguaauuguacaagcaguuggucacccaccauagggcaugaucaacaccgcaaccuuuccuuuuucccccagugauucugaaaaaccccucuucccuucagcuugcuuagauguuccaaauuuaguaagcuuaaggcggccuacagaagaaaaagaaaaaaaaggccacaaaaguucccucucacuuucaguaaauaaaauaaaagcagcaacagaaauaaagaaauaaaugaaauucaaaaugaaauaaauauuguguugugcagcauuaaaaaaucaauaaaaauuaaaaaugagcaagaucuaaaaaaaaaaaaaaaaaaaaaaaaaaaaaaaaaaaaaaaaaaaaaaaaaaaaaaaaaaaaaaaaugcaucccccccccccccccccccccccccccccccaaaggcucuuuucagagccaccagaauu

SEQ ID NO: 4496 - RNA, 2136 nt, Artificial Sequence
  mRNA product Design g-3 comprising derived and/or modified sequence from HRSV(A2)__F-del_DSCav1_mut0 (opt4)
gggagaguccgcucagccagguugcagaagcggcuuagcguguguccuaaucuucucucugcguguagguaggccugugccgcaaacaagcuuaccauggagcugcugauccugaaggccaacgccaucaccaccauccugaccgccgugaccuucugcuucgccagcggccagaacaucaccgaggaguucuaccagagcaccugcagcgccgugagcaagggcuaccugagcgcccugagaaccggcugguacaccagcgugaucaccaucgagcugagcaacaucaaggagaacaagugcaacggcaccgacgccaaggugaagcugaucaagcaggagcuggacaaguacaagaacgccgugaccgagcugcagcugcugaugcagagcacccccgccaccggcagcggcagcgccaucgccagcggcguggccgugugcaaggugcugcaccuggagggcgaggugaacaagaucaagagcgcccugcugagcaccaacaaggccguggugagccugagcaacggcgugagcgugcugaccuucaaggugcuggaccugaagaacuacaucgacaagcagcugcugcccauccugaacaagcagagcugcagcaucagcaacaucgagaccgugaucgaguuccagcagaagaacaacagacugcuggagaucaccagagaguucagcgugaacgccggcgugaccacccccgugagcaccuacaugcugaccaacagcgagcugcugagccugaucaacgacaugcccaucaccaacgaccagaagaagcugaugagcaacaacgugcagaucgugagacagcagagcuacagcaucaugugcaucaucaaggaggaggugcuggccuacguggugcagcugccccuguacggcgugaucgacacccccugcuggaagcugcacaccagcccccugugcaccaccaacaccaaggagggcagcaacaucugccugaccagaaccgacagaggcugguacugcgacaacgccggcagcgugagcuucuucccccaggccgagaccugcaaggugcagagcaacagaguguucugcgacaccaugaacagcagaacccugcccagcgaggugaaccugugcaacguggacaucuucaaccccaaguacgacugcaagaucaugaccagcaagaccgacgugagcagcagcgugaucaccagccugggcgccaucgugagcugcuacggcaagaccaagugcaccgccagcaacaagaacagaggcaucaucaagaccuucagcaacggcugcgacuacgugagcaacaagggcguggacaccgugagcgugggcaacacccuguacuacgugaacaagcaggagggcaagagccuguacgugaagggcgagcccaucaucaacuucuacgacccccugguguuccccagcgacgaguucgacgccagcaucagccaggugaacgagaagaucaaccagagccuggccuucaucagaaagagcgacgagcugcugcacaacgugaacgccggcaagagcaccaccaacaucaugaucaccaccaucaucaucgugaucaucgugauccugcugagccugaucgccgugggccugcugcuguacugcaaggccagaugaggacuagugaagggaacacccaaauuuaauucagccuuaagcacaauuaauuaagagugaaacguaauuguacaagcaguuggucacccaccauagggcaugaucaacaccgcaaccuuuccuuuuucccccagugauucugaaaaaccccucuucccuucagcuugcuuagauguuccaaauuuaguaagcuuaaggcggccuacagaagaaaaagaaaaaaaaggccacaaaaguucccucucacuuucaguaaauaaaauaaaagcagcaacagaaauaaagaaauaaaugaaauucaaaaugaaauaaauauuguguugugcagcauuaaaaaaucaauaaaaauuaaaaaugagcaagaucuaaaaaaaaaaaaaaaaaaaaaaaaaaaaaaaaaaaaaaaaaaaaaaaaaaaaaaaaaaaaaaaaugcaucccccccccccccccccccccccccccccccaaaggcucuuuucagagccaccagaauu

SEQ ID NO: 4497 - RNA, 2136 nt, Artificial Sequence
  mRNA product Design g-3 comprising derived and/or modified sequence from HRSV(A2)__F-del_DSCav1_mut0 (opt5)
gggagaguccgcucagccagguugcagaagcggcuuagcguguguccuaaucuucucucugcguguagguaggccugugccgcaaacaagcuuaccauggagcugcucauccugaaggccaacgcuauuaccacaauccuuacggccgugaccuucugcuuugcgagcggccagaauauuacagaagaguucuaccaauccaccuguucugcugucagcaaaggguaucuguccgcccucagaacaggaugguacaccucuguuaucacaauugaacugagcaacaucaaggagaauaaaugcaacggcaccgacgccaaggugaaacuuaucaagcaggaacuggauaaguauaaaaaugcugugacggagcuccagcugcugaugcaguccacccccgccacagggucuggaagcgcuauugccuccggcgucgcgguguguaagguucuccaccuggagggggaagugaacaaaaucaagagcgcccuucugucuaccaauaaagcugucgugucccucagcaacggaguuucugugcugacauuuaagguccuugaccugaagaauuacauugauaaacaacuccugccuauccugaacaagcaguccugcagcauuucuaauaucgagaccgugauugaguuccagcagaaaaacaaucggcuccuggaaaucacgcgcgaguuuuccgugaacgccggcgucacaaccccgguuagcacauauaugcuuaccaauuccgaacugcucucucugaucaacgacaugcccauuaccaacgaucaaaagaaacuuaugagcaauaacgugcagaucgugagacagcaguccuacagcauuauguguaucauuaaggaggaaguccuggcuuaugugguucaacucccucuguacggcgugaucgacacacccugcuggaaacugcauacgucuccucucuguaccacaaauaccaaggagggguccaacaucugccugacacggaccgaucgcggaugguacugugacaaugccggcagcgucucuuucuuuccccaggcggaaacgugcaaggugcagagcaacagaguuuucugugauacaaugaacuccagaacccugccuucugaggugaaucucugcaaugucgacauuuuuaacccgaaauaugauugcaagaucaugaccagcaaaacagacguguccagcucugucauuaccucccugggggccaucgugagcuguuacggaaagacaaaaugcacggcuucuaauaagaaccggggcauuaucaagaccuucuccaaugggugugauuauguuagcaacaaaggaguggacacagucuccgugggcaauacccuuuacuauguuaacaagcaagagggcaaaucucuguacgugaagggggaacccaucauuaacuuuuaugacccucucgucuuccccagcgaugaguuugacgccuccaucucucaggugaaugagaaaauuaaccagagccuggcuuucauccgcaaguccgaugaacugcuccacaaugugaacgccggaaagagcacaaccaauauuaugaucacgaccauuaucaucguuauuaucgucauucugcuuucucugaucgccgugggccuccugcuguacugcaaagcuagaugaggacuagugaagggaacacccaaauuuaauucagccuuaagcacaauuaauuaagagugaaacguaauuguacaagcaguuggucacccaccauagggcaugaucaacaccgcaaccuuuccuuuuucccccagugauucugaaaaaccccucuucccuucagcuugcuuagauguuccaaauuuaguaagcuuaaggcggccuacagaagaaaaagaaaaaaaaggccacaaaaguucccucucacuuucaguaaauaaaauaaaagcagcaacagaaauaaagaaauaaaugaaauucaaaaugaaauaaauauuguguugugcagcauuaaaaaaucaauaaaaauuaaaaaugagcaagaucuaaaaaaaaaaaaaaaaaaaaaaaaaaaaaaaaaaaaaaaaaaaaaaaaaaaaaaaaaaaaaaaaugcaucccccccccccccccccccccccccccccccaaaggcucuuuucagagccaccagaauu

SEQ ID NO: 4498 - RNA, 2136 nt, Artificial Sequence
  mRNA product Design g-3 comprising derived and/or modified sequence from HRSV(A2)__F-del_DSCav1_mut0 (opt6)
gggagaguccgcucagccagguugcagaagcggcuuagcguguguccuaaucuucucucugcguguagguaggccugugccgcaaacaagcuuaccauggaauuacucauccucaaagcaaacgcaauaacaacaauacuaacagcagucacuuucugcuucgcauccggacaaaauaucacagaagaauuuuaccaauccaccugcucugcugucuccaaaggauaccuaucugcccucagaaccgguugguauacaucugucauaaccauagaacuaucaaacauuaaagaaaacaaauguaacggaacagacgcaaaagucaaacuuauaaaacaagaauuagacaaauacaaaaacgcagucacagaauuacaacuacuaaugcaaucaaccccagcaaccggaucaggauccgcaauagcuucaggaguagcaguauguaaaguucuacacuuagaaggagaagucaacaaaauuaaauccgcacuauuaucaaccaacaaagcagucguaucuuuaucaaacggaguaucuguacuuacauucaaaguacuagaccuaaaaaauuacauugauaaacaauuacuaccaauacuaaacaaacaaucauguuccaucucuaacauagaaacaguaauagaauuucaacaaaaaaauaacagauuacuugaaaucacccgagaauuuucaguaaacgcaggaguaaccacacccguaucuacauacaugcuaacaaacucugaacuucugagccuaauaaaugacaugccaauaaccaacgaccaaaaaaaacuaauguccaacaacguacaaauaguacgacaacaaucuuacucaaucaugugcauaaucaaagaagaaguacuagcuuauguaguccaacuuccacucuacggaguaauagacacccccugcuggaaacuacacacaucaccacuaugcacaacaaacacaaaagaaggcucaaacauaugccuaacaagaacugacagaggaugguauugugacaaugcaggcucugucucauucuuuccacaagccgaaacaugcaaaguucaaucaaaccgaguuuucugugacacaaugaacucuagaacucucccaucagaagucaacuuaugcaacguugacauauucaacccaaaauaugacuguaaaauaaugacuuccaaaacugauguaucauccuccgucauaacaucccuaggagcuauuguaucauguuacgggaaaaccaaaugcacagccucaaacaaaaaccgcgguaucauaaaaacauuuucaaacggaugugauuacguaagcaauaaaggaguagacaccguaucaguaggaaauacacuauacuauguaaauaaacaagaaggaaaaucacuauaugucaaaggagaaccaaucauaaauuucuaugacccacuuguauucccauccgaugaauuugacgcaagcauuucacaggucaacgaaaaaauaaaccaaucacuagccuucaucagaaaaucagacgaacuacuacauaacguaaacgccggaaaaucaacaaccaacauaaugauaacaacaaucauaauaguuaucauaguaauacuacuaucucuaauagcugucggacucuuacuauauugcaaagcccgauaaggacuagugaagggaacacccaaauuuaauucagccuuaagcacaauuaauuaagagugaaacguaauuguacaagcaguuggucacccaccauagggcaugaucaacaccgcaaccuuuccuuuuucccccagugauucugaaaaaccccucuucccuucagcuugcuuagauguuccaaauuuaguaagcuuaaggcggccuacagaagaaaaagaaaaaaaaggccacaaaaguucccucucacuuucaguaaauaaaauaaaagcagcaacagaaauaaagaaauaaaugaaauucaaaaugaaauaaauauuguguugugcagcauuaaaaaaucaauaaaaauuaaaaaugagcaagaucuaaaaaaaaaaaaaaaaaaaaaaaaaaaaaaaaaaaaaaaaaaaaaaaaaaaaaaaaaaaaaaaaugcaucccccccccccccccccccccccccccccccaaaggcucuuuucagagccaccagaauu

SEQ ID NO: 4499 - RNA, 2136 nt, Artificial Sequence
  mRNA product Design g-3 comprising derived and/or modified sequence from HRSV(A2)__F-del_DSCav1_mut0 (opt11)
gggagaguccgcucagccagguugcagaagcggcuuagcguguguccuaaucuucucucugcguguagguaggccugugccgcaaacaagcuuaccauggaacuacuaauccugaaagccaacgccauaaccacaauccuuaccgcagucaccuucugcuucgccuccggucaaaacaucacagaagaguucuaccaauccaccuguuccgcagucagcaaaggcuaccucuccgcacuccgaaccggaugguacaccagcgucaucaccaucgaacuauccaacauaaaggaaaauaagugcaaugguacagaugccaaggucaaacucauaaagcaagaacucgacaaauacaaaaacgccgucaccgaacuacaacuacuaaugcaaucuacccccgcaacaggcucagguuccgccauagccuccggcgucgccguuugcaaaguccuccaccucgaaggcgaaguaaacaaaaucaaauccgcccuacucucaaccaacaaagcagucgucucccucucaaacggagucucgguccucaccuucaaaguccucgaccucaaaaacuauauagacaaacaacuccuacccauacucaacaaacaguccugcagcauauccaacaucgaaaccgugaucgaguuccaacagaaaaacaacagacuccucgaaaucacucgagaguucuccguaaacgccggcgucacaaccccagucucaacauacaugcucaccaacagcgaacuccuaucacuaaucaacgacaugccuaucacaaaugaucagaagaaacuaaugagcaacaacguccaaaucguccgccaacaaucauacuccaucaugugcaucauaaaagaagaaguccuagccuacgugguccagcuaccccucuacggcguaauugacaccccuugcuggaaacuacacacuucaccccucugcacaaccaacaccaaagaagguucaaacaucugccucacacgaacagaccgcggcugguacugcgacaacgccggauccguauccuucuucccccaagcagaaaccugcaaaguucaauccaaccggguauucugcgacaccaugaacucaagaacccuucccuccgaaguaaaucuaugcaacgucgacauauucaacccaaaauacgacugcaaaaucaugaccuccaaaaccgaugucuccagcagcgucaucaccagccucggcgccaucgucuccugcuacggcaaaacaaaauguacagcauccaacaaaaaccgaggcauaaucaaaaccuucuccaacgggugcgauuacgucagcaacaaaggcgucgacaccgucuccgugggcaacacccuauacuacgucaacaaacaagaaggcaaaucacuguacguaaagggcgaacccaucaucaacuucuaugacccucugguguucccauccgaugaauuugacgcauccauaucucaggucaacgaaaagaucaaccaaucccucgccuucauacgcaaauccgacgaacuccuacacaacgucaacgcugguaaaagcaccaccaacaucaugaucaccacaaucaucaucgucauaaucguuauccuacucucccuuauagcagucggacuccuccucuacugcaaagcccgcuaaggacuagugaagggaacacccaaauuuaauucagccuuaagcacaauuaauuaagagugaaacguaauuguacaagcaguuggucacccaccauagggcaugaucaacaccgcaaccuuuccuuuuucccccagugauucugaaaaaccccucuucccuucagcuugcuuagauguuccaaauuuaguaagcuuaaggcggccuacagaagaaaaagaaaaaaaaggccacaaaaguucccucucacuuucaguaaauaaaauaaaagcagcaacagaaauaaagaaauaaaugaaauucaaaaugaaauaaauauuguguugugcagcauuaaaaaaucaauaaaaauuaaaaaugagcaagaucuaaaaaaaaaaaaaaaaaaaaaaaaaaaaaaaaaaaaaaaaaaaaaaaaaaaaaaaaaaaaaaaaugcaucccccccccccccccccccccccccccccccaaaggcucuuuucagagccaccagaauu

SEQ ID NO: 4500 - RNA, 1931 nt, Artificial Sequence
  mRNA product Design g-4 comprising derived and/or modified sequence from HRSV(A2)__F-del_DSCav1_mut0 (opt1)
gggagacuccugucgggcggaaguaggaggaguagaguuuaaaaacaguacucuuuuuccgguucgggacguaguugaagcaacgacaagccggauaaccgcucuugagacaggaagcuuaccauggagcugcucauccugaaggccaacgccaucaccaccauccugacggcggugaccuucugcuucgccagcggccagaacaucaccgaggaguucuaccaguccacgugcagcgccgucuccaagggguaccucagcgcccugcggaccggcugguacaccuccgugaucaccaucgagcugagcaacaucaaggagaacaagugcaacgggaccgacgccaaggugaagcucaucaagcaggagcuggacaaguacaagaacgcggucacggagcugcagcuccugaugcaguccaccccggcaaccggcuccggcuccgccaucgcgagcggcgucgccgugugcaaggugcugcaccucgagggggaggucaacaagaucaagagcgcccugcuguccaccaacaaggccguggugagccucuccaacggcgucagcgugcugaccuucaaggugcuggaccucaagaacuacaucgacaagcagcugcugcccauccugaacaagcagagcugcuccaucagcaacaucgagacggugaucgaguuccagcagaagaacaaccggcuccuggagaucacccgcgaguucagcgugaacgccggggucaccacccccguguccacguacaugcugaccaacagcgagcuccugucccugaucaacgacaugccgaucaccaacgaccagaagaagcucaugagcaacaacgugcagaucguccggcagcaguccuacagcaucaugugcaucaucaaggaggaggugcuggcguacgugguccagcugccccucuacggcgugaucgacacccccugcuggaagcugcacacgagcccccugugcaccaccaacaccaaggagggguccaacaucugccucacgcgcaccgaccggggcugguacugcgacaacgccggcagcgucuccuucuucccgcaggccgagaccugcaaggugcagagcaaccgcguguucugcgacaccaugaacucccggacgcugcccagcgagguaaaccucugcaacgucgacaucuucaaccccaaguacgacugcaagaucaugaccuccaagaccgacgugagcuccagcgugaucaccucccugggggccaucgucagcugcuacggcaagacgaagugcaccgccagcaacaagaaccgggggaucaucaagaccuucuccaacggcugcgacuacgugagcaacaagggcguggacaccguguccgucgggaacacccuguacuacgugaacaagcaggagggcaagagccucuacgugaagggggagcccaucaucaacuucuacgacccgcuggucuuccccuccgacgaguucgacgcgagcaucucccaggugaacgagaagaucaaccagagccuggccuucauccgcaaguccgacgagcugcuccacaacgugaacgccggcaagagcacgaccaacaucaugaucaccaccaucaucaucgucaucaucgugauccugcugucccucaucgccguggggcugcugcucuacugcaaggcccggugaggacuaguaauaaggaaacuguaugaaugucugugggcaggaagugaagagauccuucuguaaagguuuuuggaauuaugucugcugaauaauaaacuuuuuugaaauaauaaaucugguagaaaaaugagaucuaaaaaaaaaaaaaaaaaaaaaaaaaaaaaaaaaaaaaaaaaaaaaaaaaaaaaaaaaaaaaaaaugcaucccccccccccccccccccccccccccccccaaaggcucuuuucagagccaccagaauu

SEQ ID NO: 4501 - RNA, 1931 nt, Artificial Sequence
  mRNA product Design g-4 comprising derived and/or modified sequence from HRSV(A2)__F-del_DSCav1_mut0 (opt1)
gggagacuccugucgggcggaaguaggaggaguagaguuuaaaaacaguacucuuuuuccgguucgggacguaguugaagcaacgacaagccggauaaccgcucuugagacaggaagcuuaccauggagcugcucauccugaaggccaacgccaucaccaccauccugacggcggugaccuucugcuucgccagcggccagaacaucaccgaggaguucuaccaguccacgugcagcgccgucuccaagggguaccucagcgcccugcgcaccggcugguacaccuccgugaucaccaucgagcugagcaacaucaaggagaacaagugcaacgggaccgacgccaaggugaagcucaucaagcaggagcuggacaaguacaagaacgcggucacggagcugcagcuccugaugcaguccacccccgccaccggcagcggguccgccaucgccagcggcguggcggugugcaagguccugcaccucgagggcgaggugaacaagaucaaguccgcccugcugagcaccaacaaggccguggucucccucagcaacgggguguccgugcugacguucaagguccuggaccucaagaacuacaucgacaagcagcugcugccgauccucaacaagcagagcugcuccaucagcaacaucgagaccgugaucgaguuccagcagaagaacaaccggcugcuggagaucacccgcgaguucuccgugaacgccggcgucaccacgcccgugagcaccuacaugcucaccaacagcgagcugcugucccucaucaacgacaugcccaucaccaacgaccagaagaagcugaugagcaacaacgugcagaucguccggcagcaguccuacagcaucaugugcaucaucaaggaggaggugcuggccuacgugguccagcucccccuguacggggugaucgacacgccgugcuggaagcugcacaccagcccccucugcaccaccaacacgaaggagggcuccaacaucugccugacccgcaccgaccgggggugguacugcgacaacgcgggcuccgugagcuucuucccccaggccgagaccugcaagguccaguccaaccgcguguucugcgacacgaugaacagccggacccuccccuccgaggucaaccugugcaacguggacaucuucaacccgaaguacgacugcaagaucaugaccagcaagaccgacguguccagcuccgucaucacgagccugggcgccaucguguccugcuacgggaagaccaagugcaccgccagcaacaagaaccggggcaucaucaagaccuucuccaacgggugcgacuacgugagcaacaagggcgucgacacggugagcgugggcaacacccucuacuacgucaacaagcaggaggggaagucccuguacgugaagggcgagcccaucaucaacuucuacgacccccugguguuccccagcgacgaguucgacgccuccaucagccaggucaacgagaagaucaaccagucccucgcguucauccgcaagagcgacgagcugcugcacaacgugaacgccgggaaguccaccaccaacaucaugaucaccacgaucaucaucgugaucaucgucauccuccugagccugaucgccgugggccuccugcuguacugcaaggcccggugaggacuaguaauaaggaaacuguaugaaugucugugggcaggaagugaagagauccuucuguaaagguuuuuggaauuaugucugcugaauaauaaacuuuuuugaaauaauaaaucugguagaaaaaugagaucuaaaaaaaaaaaaaaaaaaaaaaaaaaaaaaaaaaaaaaaaaaaaaaaaaaaaaaaaaaaaaaaaugcaucccccccccccccccccccccccccccccccaaaggcucuuuucagagccaccagaauu

SEQ ID NO: 4502 - RNA, 1931 nt, Artificial Sequence
  mRNA product Design g-4 comprising derived and/or modified sequence from HRSV(A2)__F-del_DSCav1_mut0 (opt2)
gggagacuccugucgggcggaaguaggaggaguagaguuuaaaaacaguacucuuuuuccgguucgggacguaguugaagcaacgacaagccggauaaccgcucuugagacaggaagcuuaccauggagcuccucauccucaaggccaacgccaucaccaccauccucaccgccgucaccuucugcuucgccuccggccagaacaucaccgaggaguucuaccaguccaccugcuccgccgucuccaagggcuaccucuccgcccuccgcaccggcugguacaccuccgucaucaccaucgagcucuccaacaucaaggagaacaagugcaacggcaccgacgccaaggucaagcucaucaagcaggagcucgacaaguacaagaacgccgucaccgagcuccagcuccucaugcaguccacccccgccaccggcuccggcuccgccaucgccuccggcgucgccgucugcaagguccuccaccucgagggcgaggucaacaagaucaaguccgcccuccucuccaccaacaaggccgucgucucccucuccaacggcgucuccguccucaccuucaagguccucgaccucaagaacuacaucgacaagcagcuccuccccauccucaacaagcaguccugcuccaucuccaacaucgagaccgucaucgaguuccagcagaagaacaaccgccuccucgagaucacccgcgaguucuccgucaacgccggcgucaccacccccgucuccaccuacaugcucaccaacuccgagcuccucucccucaucaacgacaugcccaucaccaacgaccagaagaagcucauguccaacaacguccagaucguccgccagcaguccuacuccaucaugugcaucaucaaggaggagguccucgccuacgucguccagcucccccucuacggcgucaucgacacccccugcuggaagcuccacaccuccccccucugcaccaccaacaccaaggagggcuccaacaucugccucacccgcaccgaccgcggcugguacugcgacaacgccggcuccgucuccuucuucccccaggccgagaccugcaagguccaguccaaccgcgucuucugcgacaccaugaacucccgcacccuccccuccgaggucaaccucugcaacgucgacaucuucaaccccaaguacgacugcaagaucaugaccuccaagaccgacgucuccuccuccgucaucaccucccucggcgccaucgucuccugcuacggcaagaccaagugcaccgccuccaacaagaaccgcggcaucaucaagaccuucuccaacggcugcgacuacgucuccaacaagggcgucgacaccgucuccgucggcaacacccucuacuacgucaacaagcaggagggcaagucccucuacgucaagggcgagcccaucaucaacuucuacgacccccucgucuuccccuccgacgaguucgacgccuccaucucccaggucaacgagaagaucaaccagucccucgccuucauccgcaaguccgacgagcuccuccacaacgucaacgccggcaaguccaccaccaacaucaugaucaccaccaucaucaucgucaucaucgucauccuccucucccucaucgccgucggccuccuccucuacugcaaggcccgcugaggacuaguaauaaggaaacuguaugaaugucugugggcaggaagugaagagauccuucuguaaagguuuuuggaauuaugucugcugaauaauaaacuuuuuugaaauaauaaaucugguagaaaaaugagaucuaaaaaaaaaaaaaaaaaaaaaaaaaaaaaaaaaaaaaaaaaaaaaaaaaaaaaaaaaaaaaaaaugcaucccccccccccccccccccccccccccccccaaaggcucuuuucagagccaccagaauu

SEQ ID NO: 4503 - RNA, 1931 nt, Artificial Sequence
  mRNA product Design g-4 comprising derived and/or modified sequence from HRSV(A2)__F-del_DSCav1_mut0 (opt3)
gggagacuccugucgggcggaaguaggaggaguagaguuuaaaaacaguacucuuuuuccgguucgggacguaguugaagcaacgacaagccggauaaccgcucuugagacaggaagcuuaccauggagcugcucauccuuaaggccaacgcuauuaccacaauacugacugcagugacguucugcuuugccagcggccagaauaucaccgaagaguucuaccaauccacauguucugcggucucaaaaggguauuugagugcuuuaagaacuggaugguacaccagcguuauuacaaucgaacuguccaacauuaaggagaauaaaugcaacgguaccgacgccaaggugaaacuaaucaagcaggaacucgauaaguauaaaaaugcaguaacugagcugcagcuucugaugcagucuacacccgccaccggcucggggucagcuauagcaagcggaguggccgucuguaagguguugcaccucgagggcgaaguuaacaaaaucaagagugcucugcuguccacgaauaaagccguggucucucucagcaacgguguguccguauuaacuuuuaagguucuggaccuuaagaauuacauugauaaacaauugcugccuauccuaaacaagcagucaugcaguauuagcaauaucgagaccgugauagaguuccagcagaaaaacaauaggcuccuggaaauuacacgggaguuuucugucaacgcgggggugacuaccccaguguccacauauaugcuuaccaauucagaacuguugagccucaucaacgacaugccgauuacgaacgaucaaaagaaacugaugaguaauaacguccagaucguucgccagcagucuuacuccaucauguguauuauaaaggaggaaguguuagcauauguagugcaacugccccucuacggagucaucgacacuccuugcuggaaacuucauacaagcccacuguguaccacuaauacaaaggagggcucgaacauuugcuugacccgaacggaucguggcugguacugugacaaugccgggucuguguccuucuuuccccaggcugaaaccugcaagguucagucaaacagaguguucugugauacaaugaauaguagaacucugccuagcgaggucaaccucugcaauguggacaucuuuaacccaaaauaugauugcaagauaaugaccuccaaaacagacguaucuagcucaguuauuaccagucugggagccaucguguccuguuacgguaagacuaaaugcacagcaagcaauaagaacaggggcaucauuaagaccuucucuaaugggugugauuaugucucaaacaaaggaguggacacugucagugugggcaauacgcuuuacuauguuaacaagcaagaggguaaaagccuguacgugaagggggaacccaucauuaacuuuuaugacccuuugguauucccauccgaugaguuugacgcuucuauaucgcaggucaaugagaaaaucaaccagagccucgccuucauucggaaguccgaugaacuguuacacaaugugaacgcgggaaagucaacaaccaauaucaugaucacuaccauuauaaucguuauuaucgugauucugcuaagucucaucgccgucggccugcuuuuguacugcaaagcacgcugaggacuaguaauaaggaaacuguaugaaugucugugggcaggaagugaagagauccuucuguaaagguuuuuggaauuaugucugcugaauaauaaacuuuuuugaaauaauaaaucugguagaaaaaugagaucuaaaaaaaaaaaaaaaaaaaaaaaaaaaaaaaaaaaaaaaaaaaaaaaaaaaaaaaaaaaaaaaaugcaucccccccccccccccccccccccccccccccaaaggcucuuuucagagccaccagaauu

SEQ ID NO: 4504 - RNA, 1931 nt, Artificial Sequence
  mRNA product Design g-4 comprising derived and/or modified sequence from HRSV(A2)__F-del_DSCav1_mut0 (opt4)
gggagacuccugucgggcggaaguaggaggaguagaguuuaaaaacaguacucuuuuuccgguucgggacguaguugaagcaacgacaagccggauaaccgcucuugagacaggaagcuuaccauggagcugcugauccugaaggccaacgccaucaccaccauccugaccgccgugaccuucugcuucgccagcggccagaacaucaccgaggaguucuaccagagcaccugcagcgccgugagcaagggcuaccugagcgcccugagaaccggcugguacaccagcgugaucaccaucgagcugagcaacaucaaggagaacaagugcaacggcaccgacgccaaggugaagcugaucaagcaggagcuggacaaguacaagaacgccgugaccgagcugcagcugcugaugcagagcacccccgccaccggcagcggcagcgccaucgccagcggcguggccgugugcaaggugcugcaccuggagggcgaggugaacaagaucaagagcgcccugcugagcaccaacaaggccguggugagccugagcaacggcgugagcgugcugaccuucaaggugcuggaccugaagaacuacaucgacaagcagcugcugcccauccugaacaagcagagcugcagcaucagcaacaucgagaccgugaucgaguuccagcagaagaacaacagacugcuggagaucaccagagaguucagcgugaacgccggcgugaccacccccgugagcaccuacaugcugaccaacagcgagcugcugagccugaucaacgacaugcccaucaccaacgaccagaagaagcugaugagcaacaacgugcagaucgugagacagcagagcuacagcaucaugugcaucaucaaggaggaggugcuggccuacguggugcagcugccccuguacggcgugaucgacacccccugcuggaagcugcacaccagcccccugugcaccaccaacaccaaggagggcagcaacaucugccugaccagaaccgacagaggcugguacugcgacaacgccggcagcgugagcuucuucccccaggccgagaccugcaaggugcagagcaacagaguguucugcgacaccaugaacagcagaacccugcccagcgaggugaaccugugcaacguggacaucuucaaccccaaguacgacugcaagaucaugaccagcaagaccgacgugagcagcagcgugaucaccagccugggcgccaucgugagcugcuacggcaagaccaagugcaccgccagcaacaagaacagaggcaucaucaagaccuucagcaacggcugcgacuacgugagcaacaagggcguggacaccgugagcgugggcaacacccuguacuacgugaacaagcaggagggcaagagccuguacgugaagggcgagcccaucaucaacuucuacgacccccugguguuccccagcgacgaguucgacgccagcaucagccaggugaacgagaagaucaaccagagccuggccuucaucagaaagagcgacgagcugcugcacaacgugaacgccggcaagagcaccaccaacaucaugaucaccaccaucaucaucgugaucaucgugauccugcugagccugaucgccgugggccugcugcuguacugcaaggccagaugaggacuaguaauaaggaaacuguaugaaugucugugggcaggaagugaagagauccuucuguaaagguuuuuggaauuaugucugcugaauaauaaacuuuuuugaaauaauaaaucugguagaaaaaugagaucuaaaaaaaaaaaaaaaaaaaaaaaaaaaaaaaaaaaaaaaaaaaaaaaaaaaaaaaaaaaaaaaaugcaucccccccccccccccccccccccccccccccaaaggcucuuuucagagccaccagaauu

SEQ ID NO: 4505 - RNA, 1931 nt, Artificial Sequence
  mRNA product Design g-4 comprising derived and/or modified sequence from HRSV(A2)__F-del_DSCav1_mut0 (opt5)
gggagacuccugucgggcggaaguaggaggaguagaguuuaaaaacaguacucuuuuuccgguucgggacguaguugaagcaacgacaagccggauaaccgcucuugagacaggaagcuuaccauggagcugcucauccugaaggccaacgcuauuaccacaauccuuacggccgugaccuucugcuuugcgagcggccagaauauuacagaagaguucuaccaauccaccuguucugcugucagcaaaggguaucuguccgcccucagaacaggaugguacaccucuguuaucacaauugaacugagcaacaucaaggagaauaaaugcaacggcaccgacgccaaggugaaacuuaucaagcaggaacuggauaaguauaaaaaugcugugacggagcuccagcugcugaugcaguccacccccgccacagggucuggaagcgcuauugccuccggcgucgcgguguguaagguucuccaccuggagggggaagugaacaaaaucaagagcgcccuucugucuaccaauaaagcugucgugucccucagcaacggaguuucugugcugacauuuaagguccuugaccugaagaauuacauugauaaacaacuccugccuauccugaacaagcaguccugcagcauuucuaauaucgagaccgugauugaguuccagcagaaaaacaaucggcuccuggaaaucacgcgcgaguuuuccgugaacgccggcgucacaaccccgguuagcacauauaugcuuaccaauuccgaacugcucucucugaucaacgacaugcccauuaccaacgaucaaaagaaacuuaugagcaauaacgugcagaucgugagacagcaguccuacagcauuauguguaucauuaaggaggaaguccuggcuuaugugguucaacucccucuguacggcgugaucgacacacccugcuggaaacugcauacgucuccucucuguaccacaaauaccaaggagggguccaacaucugccugacacggaccgaucgcggaugguacugugacaaugccggcagcgucucuuucuuuccccaggcggaaacgugcaaggugcagagcaacagaguuuucugugauacaaugaacuccagaacccugccuucugaggugaaucucugcaaugucgacauuuuuaacccgaaauaugauugcaagaucaugaccagcaaaacagacguguccagcucugucauuaccucccugggggccaucgugagcuguuacggaaagacaaaaugcacggcuucuaauaagaaccggggcauuaucaagaccuucuccaaugggugugauuauguuagcaacaaaggaguggacacagucuccgugggcaauacccuuuacuauguuaacaagcaagagggcaaaucucuguacgugaagggggaacccaucauuaacuuuuaugacccucucgucuuccccagcgaugaguuugacgccuccaucucucaggugaaugagaaaauuaaccagagccuggcuuucauccgcaaguccgaugaacugcuccacaaugugaacgccggaaagagcacaaccaauauuaugaucacgaccauuaucaucguuauuaucgucauucugcuuucucugaucgccgugggccuccugcuguacugcaaagcuagaugaggacuaguaauaaggaaacuguaugaaugucugugggcaggaagugaagagauccuucuguaaagguuuuuggaauuaugucugcugaauaauaaacuuuuuugaaauaauaaaucugguagaaaaaugagaucuaaaaaaaaaaaaaaaaaaaaaaaaaaaaaaaaaaaaaaaaaaaaaaaaaaaaaaaaaaaaaaaaugcaucccccccccccccccccccccccccccccccaaaggcucuuuucagagccaccagaauu

SEQ ID NO: 4506 - RNA, 1931 nt, Artificial Sequence
  mRNA product Design g-4 comprising derived and/or modified sequence from HRSV(A2)__F-del_DSCav1_mut0 (opt6)
gggagacuccugucgggcggaaguaggaggaguagaguuuaaaaacaguacucuuuuuccgguucgggacguaguugaagcaacgacaagccggauaaccgcucuugagacaggaagcuuaccauggaauuacucauccucaaagcaaacgcaauaacaacaauacuaacagcagucacuuucugcuucgcauccggacaaaauaucacagaagaauuuuaccaauccaccugcucugcugucuccaaaggauaccuaucugcccucagaaccgguugguauacaucugucauaaccauagaacuaucaaacauuaaagaaaacaaauguaacggaacagacgcaaaagucaaacuuauaaaacaagaauuagacaaauacaaaaacgcagucacagaauuacaacuacuaaugcaaucaaccccagcaaccggaucaggauccgcaauagcuucaggaguagcaguauguaaaguucuacacuuagaaggagaagucaacaaaauuaaauccgcacuauuaucaaccaacaaagcagucguaucuuuaucaaacggaguaucuguacuuacauucaaaguacuagaccuaaaaaauuacauugauaaacaauuacuaccaauacuaaacaaacaaucauguuccaucucuaacauagaaacaguaauagaauuucaacaaaaaaauaacagauuacuugaaaucacccgagaauuuucaguaaacgcaggaguaaccacacccguaucuacauacaugcuaacaaacucugaacuucugagccuaauaaaugacaugccaauaaccaacgaccaaaaaaaacuaauguccaacaacguacaaauaguacgacaacaaucuuacucaaucaugugcauaaucaaagaagaaguacuagcuuauguaguccaacuuccacucuacggaguaauagacacccccugcuggaaacuacacacaucaccacuaugcacaacaaacacaaaagaaggcucaaacauaugccuaacaagaacugacagaggaugguauugugacaaugcaggcucugucucauucuuuccacaagccgaaacaugcaaaguucaaucaaaccgaguuuucugugacacaaugaacucuagaacucucccaucagaagucaacuuaugcaacguugacauauucaacccaaaauaugacuguaaaauaaugacuuccaaaacugauguaucauccuccgucauaacaucccuaggagcuauuguaucauguuacgggaaaaccaaaugcacagccucaaacaaaaaccgcgguaucauaaaaacauuuucaaacggaugugauuacguaagcaauaaaggaguagacaccguaucaguaggaaauacacuauacuauguaaauaaacaagaaggaaaaucacuauaugucaaaggagaaccaaucauaaauuucuaugacccacuuguauucccauccgaugaauuugacgcaagcauuucacaggucaacgaaaaaauaaaccaaucacuagccuucaucagaaaaucagacgaacuacuacauaacguaaacgccggaaaaucaacaaccaacauaaugauaacaacaaucauaauaguuaucauaguaauacuacuaucucuaauagcugucggacucuuacuauauugcaaagcccgauaaggacuaguaauaaggaaacuguaugaaugucugugggcaggaagugaagagauccuucuguaaagguuuuuggaauuaugucugcugaauaauaaacuuuuuugaaauaauaaaucugguagaaaaaugagaucuaaaaaaaaaaaaaaaaaaaaaaaaaaaaaaaaaaaaaaaaaaaaaaaaaaaaaaaaaaaaaaaaugcaucccccccccccccccccccccccccccccccaaaggcucuuuucagagccaccagaauu

SEQ ID NO: 4507 - RNA, 1931 nt, Artificial Sequence
  mRNA product Design g-4 comprising derived and/or modified sequence from HRSV(A2)__F-del_DSCav1_mut0 (opt11)
gggagacuccugucgggcggaaguaggaggaguagaguuuaaaaacaguacucuuuuuccgguucgggacguaguugaagcaacgacaagccggauaaccgcucuugagacaggaagcuuaccauggaacuacuaauccugaaagccaacgccauaaccacaauccuuaccgcagucaccuucugcuucgccuccggucaaaacaucacagaagaguucuaccaauccaccuguuccgcagucagcaaaggcuaccucuccgcacuccgaaccggaugguacaccagcgucaucaccaucgaacuauccaacauaaaggaaaauaagugcaaugguacagaugccaaggucaaacucauaaagcaagaacucgacaaauacaaaaacgccgucaccgaacuacaacuacuaaugcaaucuacccccgcaacaggcucagguuccgccauagccuccggcgucgccguuugcaaaguccuccaccucgaaggcgaaguaaacaaaaucaaauccgcccuacucucaaccaacaaagcagucgucucccucucaaacggagucucgguccucaccuucaaaguccucgaccucaaaaacuauauagacaaacaacuccuacccauacucaacaaacaguccugcagcauauccaacaucgaaaccgugaucgaguuccaacagaaaaacaacagacuccucgaaaucacucgagaguucuccguaaacgccggcgucacaaccccagucucaacauacaugcucaccaacagcgaacuccuaucacuaaucaacgacaugccuaucacaaaugaucagaagaaacuaaugagcaacaacguccaaaucguccgccaacaaucauacuccaucaugugcaucauaaaagaagaaguccuagccuacgugguccagcuaccccucuacggcguaauugacaccccuugcuggaaacuacacacuucaccccucugcacaaccaacaccaaagaagguucaaacaucugccucacacgaacagaccgcggcugguacugcgacaacgccggauccguauccuucuucccccaagcagaaaccugcaaaguucaauccaaccggguauucugcgacaccaugaacucaagaacccuucccuccgaaguaaaucuaugcaacgucgacauauucaacccaaaauacgacugcaaaaucaugaccuccaaaaccgaugucuccagcagcgucaucaccagccucggcgccaucgucuccugcuacggcaaaacaaaauguacagcauccaacaaaaaccgaggcauaaucaaaaccuucuccaacgggugcgauuacgucagcaacaaaggcgucgacaccgucuccgugggcaacacccuauacuacgucaacaaacaagaaggcaaaucacuguacguaaagggcgaacccaucaucaacuucuaugacccucugguguucccauccgaugaauuugacgcauccauaucucaggucaacgaaaagaucaaccaaucccucgccuucauacgcaaauccgacgaacuccuacacaacgucaacgcugguaaaagcaccaccaacaucaugaucaccacaaucaucaucgucauaaucguuauccuacucucccuuauagcagucggacuccuccucuacugcaaagcccgcuaaggacuaguaauaaggaaacuguaugaaugucugugggcaggaagugaagagauccuucuguaaagguuuuuggaauuaugucugcugaauaauaaacuuuuuugaaauaauaaaucugguagaaaaaugagaucuaaaaaaaaaaaaaaaaaaaaaaaaaaaaaaaaaaaaaaaaaaaaaaaaaaaaaaaaaaaaaaaaugcaucccccccccccccccccccccccccccccccaaaggcucuuuucagagccaccagaauu

SEQ ID NO: 4508 - RNA, 1907 nt, Artificial Sequence
  mRNA product Design g-5 comprising derived and/or modified sequence from HRSV(A2)__F-del_DSCav1_mut0 (opt1)
gggagacccgugacccggaaguuguacggcuacgcgacuuucccucccacaaacccucgcgcccuuccuuuccuacuugggcccggcagaaagcuuaccauggagcugcucauccugaaggccaacgccaucaccaccauccugacggcggugaccuucugcuucgccagcggccagaacaucaccgaggaguucuaccaguccacgugcagcgccgucuccaagggguaccucagcgcccugcggaccggcugguacaccuccgugaucaccaucgagcugagcaacaucaaggagaacaagugcaacgggaccgacgccaaggugaagcucaucaagcaggagcuggacaaguacaagaacgcggucacggagcugcagcuccugaugcaguccaccccggcaaccggcuccggcuccgccaucgcgagcggcgucgccgugugcaaggugcugcaccucgagggggaggucaacaagaucaagagcgcccugcuguccaccaacaaggccguggugagccucuccaacggcgucagcgugcugaccuucaaggugcuggaccucaagaacuacaucgacaagcagcugcugcccauccugaacaagcagagcugcuccaucagcaacaucgagacggugaucgaguuccagcagaagaacaaccggcuccuggagaucacccgcgaguucagcgugaacgccggggucaccacccccguguccacguacaugcugaccaacagcgagcuccugucccugaucaacgacaugccgaucaccaacgaccagaagaagcucaugagcaacaacgugcagaucguccggcagcaguccuacagcaucaugugcaucaucaaggaggaggugcuggcguacgugguccagcugccccucuacggcgugaucgacacccccugcuggaagcugcacacgagcccccugugcaccaccaacaccaaggagggguccaacaucugccucacgcgcaccgaccggggcugguacugcgacaacgccggcagcgucuccuucuucccgcaggccgagaccugcaaggugcagagcaaccgcguguucugcgacaccaugaacucccggacgcugcccagcgagguaaaccucugcaacgucgacaucuucaaccccaaguacgacugcaagaucaugaccuccaagaccgacgugagcuccagcgugaucaccucccugggggccaucgucagcugcuacggcaagacgaagugcaccgccagcaacaagaaccgggggaucaucaagaccuucuccaacggcugcgacuacgugagcaacaagggcguggacaccguguccgucgggaacacccuguacuacgugaacaagcaggagggcaagagccucuacgugaagggggagcccaucaucaacuucuacgacccgcuggucuuccccuccgacgaguucgacgcgagcaucucccaggugaacgagaagaucaaccagagccuggccuucauccgcaaguccgacgagcugcuccacaacgugaacgccggcaagagcacgaccaacaucaugaucaccaccaucaucaucgucaucaucgugauccugcugucccucaucgccguggggcugcugcucuacugcaaggcccggugaggacuaguaauaaggaaacuguaugaaugucugugggcaggaagugaagagauccuucuguaaagguuuuuggaauuaugucugcugaauaauaaacuuuuuugaaauaauaaaucugguagaaaaaugagaucuaaaaaaaaaaaaaaaaaaaaaaaaaaaaaaaaaaaaaaaaaaaaaaaaaaaaaaaaaaaaaaaaugcaucccccccccccccccccccccccccccccccaaaggcucuuuucagagccaccagaauu

SEQ ID NO: 4509 - RNA, 1907 nt, Artificial Sequence
  mRNA product Design g-5 comprising derived and/or modified sequence from HRSV(A2)__F-del_DSCav1_mut0 (opt1)
gggagacccgugacccggaaguuguacggcuacgcgacuuucccucccacaaacccucgcgcccuuccuuuccuacuugggcccggcagaaagcuuaccauggagcugcucauccugaaggccaacgccaucaccaccauccugacggcggugaccuucugcuucgccagcggccagaacaucaccgaggaguucuaccaguccacgugcagcgccgucuccaagggguaccucagcgcccugcgcaccggcugguacaccuccgugaucaccaucgagcugagcaacaucaaggagaacaagugcaacgggaccgacgccaaggugaagcucaucaagcaggagcuggacaaguacaagaacgcggucacggagcugcagcuccugaugcaguccacccccgccaccggcagcggguccgccaucgccagcggcguggcggugugcaagguccugcaccucgagggcgaggugaacaagaucaaguccgcccugcugagcaccaacaaggccguggucucccucagcaacgggguguccgugcugacguucaagguccuggaccucaagaacuacaucgacaagcagcugcugccgauccucaacaagcagagcugcuccaucagcaacaucgagaccgugaucgaguuccagcagaagaacaaccggcugcuggagaucacccgcgaguucuccgugaacgccggcgucaccacgcccgugagcaccuacaugcucaccaacagcgagcugcugucccucaucaacgacaugcccaucaccaacgaccagaagaagcugaugagcaacaacgugcagaucguccggcagcaguccuacagcaucaugugcaucaucaaggaggaggugcuggccuacgugguccagcucccccuguacggggugaucgacacgccgugcuggaagcugcacaccagcccccucugcaccaccaacacgaaggagggcuccaacaucugccugacccgcaccgaccgggggugguacugcgacaacgcgggcuccgugagcuucuucccccaggccgagaccugcaagguccaguccaaccgcguguucugcgacacgaugaacagccggacccuccccuccgaggucaaccugugcaacguggacaucuucaacccgaaguacgacugcaagaucaugaccagcaagaccgacguguccagcuccgucaucacgagccugggcgccaucguguccugcuacgggaagaccaagugcaccgccagcaacaagaaccggggcaucaucaagaccuucuccaacgggugcgacuacgugagcaacaagggcgucgacacggugagcgugggcaacacccucuacuacgucaacaagcaggaggggaagucccuguacgugaagggcgagcccaucaucaacuucuacgacccccugguguuccccagcgacgaguucgacgccuccaucagccaggucaacgagaagaucaaccagucccucgcguucauccgcaagagcgacgagcugcugcacaacgugaacgccgggaaguccaccaccaacaucaugaucaccacgaucaucaucgugaucaucgucauccuccugagccugaucgccgugggccuccugcuguacugcaaggcccggugaggacuaguaauaaggaaacuguaugaaugucugugggcaggaagugaagagauccuucuguaaagguuuuuggaauuaugucugcugaauaauaaacuuuuuugaaauaauaaaucugguagaaaaaugagaucuaaaaaaaaaaaaaaaaaaaaaaaaaaaaaaaaaaaaaaaaaaaaaaaaaaaaaaaaaaaaaaaaugcaucccccccccccccccccccccccccccccccaaaggcucuuuucagagccaccagaauu

SEQ ID NO: 4510 - RNA, 1907 nt, Artificial Sequence
  mRNA product Design g-5 comprising derived and/or modified sequence from HRSV(A2)__F-del_DSCav1_mut0 (opt2)
gggagacccgugacccggaaguuguacggcuacgcgacuuucccucccacaaacccucgcgcccuuccuuuccuacuugggcccggcagaaagcuuaccauggagcuccucauccucaaggccaacgccaucaccaccauccucaccgccgucaccuucugcuucgccuccggccagaacaucaccgaggaguucuaccaguccaccugcuccgccgucuccaagggcuaccucuccgcccuccgcaccggcugguacaccuccgucaucaccaucgagcucuccaacaucaaggagaacaagugcaacggcaccgacgccaaggucaagcucaucaagcaggagcucgacaaguacaagaacgccgucaccgagcuccagcuccucaugcaguccacccccgccaccggcuccggcuccgccaucgccuccggcgucgccgucugcaagguccuccaccucgagggcgaggucaacaagaucaaguccgcccuccucuccaccaacaaggccgucgucucccucuccaacggcgucuccguccucaccuucaagguccucgaccucaagaacuacaucgacaagcagcuccuccccauccucaacaagcaguccugcuccaucuccaacaucgagaccgucaucgaguuccagcagaagaacaaccgccuccucgagaucacccgcgaguucuccgucaacgccggcgucaccacccccgucuccaccuacaugcucaccaacuccgagcuccucucccucaucaacgacaugcccaucaccaacgaccagaagaagcucauguccaacaacguccagaucguccgccagcaguccuacuccaucaugugcaucaucaaggaggagguccucgccuacgucguccagcucccccucuacggcgucaucgacacccccugcuggaagcuccacaccuccccccucugcaccaccaacaccaaggagggcuccaacaucugccucacccgcaccgaccgcggcugguacugcgacaacgccggcuccgucuccuucuucccccaggccgagaccugcaagguccaguccaaccgcgucuucugcgacaccaugaacucccgcacccuccccuccgaggucaaccucugcaacgucgacaucuucaaccccaaguacgacugcaagaucaugaccuccaagaccgacgucuccuccuccgucaucaccucccucggcgccaucgucuccugcuacggcaagaccaagugcaccgccuccaacaagaaccgcggcaucaucaagaccuucuccaacggcugcgacuacgucuccaacaagggcgucgacaccgucuccgucggcaacacccucuacuacgucaacaagcaggagggcaagucccucuacgucaagggcgagcccaucaucaacuucuacgacccccucgucuuccccuccgacgaguucgacgccuccaucucccaggucaacgagaagaucaaccagucccucgccuucauccgcaaguccgacgagcuccuccacaacgucaacgccggcaaguccaccaccaacaucaugaucaccaccaucaucaucgucaucaucgucauccuccucucccucaucgccgucggccuccuccucuacugcaaggcccgcugaggacuaguaauaaggaaacuguaugaaugucugugggcaggaagugaagagauccuucuguaaagguuuuuggaauuaugucugcugaauaauaaacuuuuuugaaauaauaaaucugguagaaaaaugagaucuaaaaaaaaaaaaaaaaaaaaaaaaaaaaaaaaaaaaaaaaaaaaaaaaaaaaaaaaaaaaaaaaugcaucccccccccccccccccccccccccccccccaaaggcucuuuucagagccaccagaauu

SEQ ID NO: 4511 - RNA, 1907 nt, Artificial Sequence
  mRNA product Design g-5 comprising derived and/or modified sequence from HRSV(A2)__F-del_DSCav1_mut0 (opt3)
gggagacccgugacccggaaguuguacggcuacgcgacuuucccucccacaaacccucgcgcccuuccuuuccuacuugggcccggcagaaagcuuaccauggagcugcucauccuuaaggccaacgcuauuaccacaauacugacugcagugacguucugcuuugccagcggccagaauaucaccgaagaguucuaccaauccacauguucugcggucucaaaaggguauuugagugcuuuaagaacuggaugguacaccagcguuauuacaaucgaacuguccaacauuaaggagaauaaaugcaacgguaccgacgccaaggugaaacuaaucaagcaggaacucgauaaguauaaaaaugcaguaacugagcugcagcuucugaugcagucuacacccgccaccggcucggggucagcuauagcaagcggaguggccgucuguaagguguugcaccucgagggcgaaguuaacaaaaucaagagugcucugcuguccacgaauaaagccguggucucucucagcaacgguguguccguauuaacuuuuaagguucuggaccuuaagaauuacauugauaaacaauugcugccuauccuaaacaagcagucaugcaguauuagcaauaucgagaccgugauagaguuccagcagaaaaacaauaggcuccuggaaauuacacgggaguuuucugucaacgcgggggugacuaccccaguguccacauauaugcuuaccaauucagaacuguugagccucaucaacgacaugccgauuacgaacgaucaaaagaaacugaugaguaauaacguccagaucguucgccagcagucuuacuccaucauguguauuauaaaggaggaaguguuagcauauguagugcaacugccccucuacggagucaucgacacuccuugcuggaaacuucauacaagcccacuguguaccacuaauacaaaggagggcucgaacauuugcuugacccgaacggaucguggcugguacugugacaaugccgggucuguguccuucuuuccccaggcugaaaccugcaagguucagucaaacagaguguucugugauacaaugaauaguagaacucugccuagcgaggucaaccucugcaauguggacaucuuuaacccaaaauaugauugcaagauaaugaccuccaaaacagacguaucuagcucaguuauuaccagucugggagccaucguguccuguuacgguaagacuaaaugcacagcaagcaauaagaacaggggcaucauuaagaccuucucuaaugggugugauuaugucucaaacaaaggaguggacacugucagugugggcaauacgcuuuacuauguuaacaagcaagaggguaaaagccuguacgugaagggggaacccaucauuaacuuuuaugacccuuugguauucccauccgaugaguuugacgcuucuauaucgcaggucaaugagaaaaucaaccagagccucgccuucauucggaaguccgaugaacuguuacacaaugugaacgcgggaaagucaacaaccaauaucaugaucacuaccauuauaaucguuauuaucgugauucugcuaagucucaucgccgucggccugcuuuuguacugcaaagcacgcugaggacuaguaauaaggaaacuguaugaaugucugugggcaggaagugaagagauccuucuguaaagguuuuuggaauuaugucugcugaauaauaaacuuuuuugaaauaauaaaucugguagaaaaaugagaucuaaaaaaaaaaaaaaaaaaaaaaaaaaaaaaaaaaaaaaaaaaaaaaaaaaaaaaaaaaaaaaaaugcaucccccccccccccccccccccccccccccccaaaggcucuuuucagagccaccagaauu

SEQ ID NO: 4512 - RNA, 1907 nt, Artificial Sequence
  mRNA product Design g-5 comprising derived and/or modified sequence from HRSV(A2)__F-del_DSCav1_mut0 (opt4)
gggagacccgugacccggaaguuguacggcuacgcgacuuucccucccacaaacccucgcgcccuuccuuuccuacuugggcccggcagaaagcuuaccauggagcugcugauccugaaggccaacgccaucaccaccauccugaccgccgugaccuucugcuucgccagcggccagaacaucaccgaggaguucuaccagagcaccugcagcgccgugagcaagggcuaccugagcgcccugagaaccggcugguacaccagcgugaucaccaucgagcugagcaacaucaaggagaacaagugcaacggcaccgacgccaaggugaagcugaucaagcaggagcuggacaaguacaagaacgccgugaccgagcugcagcugcugaugcagagcacccccgccaccggcagcggcagcgccaucgccagcggcguggccgugugcaaggugcugcaccuggagggcgaggugaacaagaucaagagcgcccugcugagcaccaacaaggccguggugagccugagcaacggcgugagcgugcugaccuucaaggugcuggaccugaagaacuacaucgacaagcagcugcugcccauccugaacaagcagagcugcagcaucagcaacaucgagaccgugaucgaguuccagcagaagaacaacagacugcuggagaucaccagagaguucagcgugaacgccggcgugaccacccccgugagcaccuacaugcugaccaacagcgagcugcugagccugaucaacgacaugcccaucaccaacgaccagaagaagcugaugagcaacaacgugcagaucgugagacagcagagcuacagcaucaugugcaucaucaaggaggaggugcuggccuacguggugcagcugccccuguacggcgugaucgacacccccugcuggaagcugcacaccagcccccugugcaccaccaacaccaaggagggcagcaacaucugccugaccagaaccgacagaggcugguacugcgacaacgccggcagcgugagcuucuucccccaggccgagaccugcaaggugcagagcaacagaguguucugcgacaccaugaacagcagaacccugcccagcgaggugaaccugugcaacguggacaucuucaaccccaaguacgacugcaagaucaugaccagcaagaccgacgugagcagcagcgugaucaccagccugggcgccaucgugagcugcuacggcaagaccaagugcaccgccagcaacaagaacagaggcaucaucaagaccuucagcaacggcugcgacuacgugagcaacaagggcguggacaccgugagcgugggcaacacccuguacuacgugaacaagcaggagggcaagagccuguacgugaagggcgagcccaucaucaacuucuacgacccccugguguuccccagcgacgaguucgacgccagcaucagccaggugaacgagaagaucaaccagagccuggccuucaucagaaagagcgacgagcugcugcacaacgugaacgccggcaagagcaccaccaacaucaugaucaccaccaucaucaucgugaucaucgugauccugcugagccugaucgccgugggccugcugcuguacugcaaggccagaugaggacuaguaauaaggaaacuguaugaaugucugugggcaggaagugaagagauccuucuguaaagguuuuuggaauuaugucugcugaauaauaaacuuuuuugaaauaauaaaucugguagaaaaaugagaucuaaaaaaaaaaaaaaaaaaaaaaaaaaaaaaaaaaaaaaaaaaaaaaaaaaaaaaaaaaaaaaaaugcaucccccccccccccccccccccccccccccccaaaggcucuuuucagagccaccagaauu

SEQ ID NO: 4513 - RNA, 1907 nt, Artificial Sequence
  mRNA product Design g-5 comprising derived and/or modified sequence from HRSV(A2)__F-del_DSCav1_mut0 (opt5)
gggagacccgugacccggaaguuguacggcuacgcgacuuucccucccacaaacccucgcgcccuuccuuuccuacuugggcccggcagaaagcuuaccauggagcugcucauccugaaggccaacgcuauuaccacaauccuuacggccgugaccuucugcuuugcgagcggccagaauauuacagaagaguucuaccaauccaccuguucugcugucagcaaaggguaucuguccgcccucagaacaggaugguacaccucuguuaucacaauugaacugagcaacaucaaggagaauaaaugcaacggcaccgacgccaaggugaaacuuaucaagcaggaacuggauaaguauaaaaaugcugugacggagcuccagcugcugaugcaguccacccccgccacagggucuggaagcgcuauugccuccggcgucgcgguguguaagguucuccaccuggagggggaagugaacaaaaucaagagcgcccuucugucuaccaauaaagcugucgugucccucagcaacggaguuucugugcugacauuuaagguccuugaccugaagaauuacauugauaaacaacuccugccuauccugaacaagcaguccugcagcauuucuaauaucgagaccgugauugaguuccagcagaaaaacaaucggcuccuggaaaucacgcgcgaguuuuccgugaacgccggcgucacaaccccgguuagcacauauaugcuuaccaauuccgaacugcucucucugaucaacgacaugcccauuaccaacgaucaaaagaaacuuaugagcaauaacgugcagaucgugagacagcaguccuacagcauuauguguaucauuaaggaggaaguccuggcuuaugugguucaacucccucuguacggcgugaucgacacacccugcuggaaacugcauacgucuccucucuguaccacaaauaccaaggagggguccaacaucugccugacacggaccgaucgcggaugguacugugacaaugccggcagcgucucuuucuuuccccaggcggaaacgugcaaggugcagagcaacagaguuuucugugauacaaugaacuccagaacccugccuucugaggugaaucucugcaaugucgacauuuuuaacccgaaauaugauugcaagaucaugaccagcaaaacagacguguccagcucugucauuaccucccugggggccaucgugagcuguuacggaaagacaaaaugcacggcuucuaauaagaaccggggcauuaucaagaccuucuccaaugggugugauuauguuagcaacaaaggaguggacacagucuccgugggcaauacccuuuacuauguuaacaagcaagagggcaaaucucuguacgugaagggggaacccaucauuaacuuuuaugacccucucgucuuccccagcgaugaguuugacgccuccaucucucaggugaaugagaaaauuaaccagagccuggcuuucauccgcaaguccgaugaacugcuccacaaugugaacgccggaaagagcacaaccaauauuaugaucacgaccauuaucaucguuauuaucgucauucugcuuucucugaucgccgugggccuccugcuguacugcaaagcuagaugaggacuaguaauaaggaaacuguaugaaugucugugggcaggaagugaagagauccuucuguaaagguuuuuggaauuaugucugcugaauaauaaacuuuuuugaaauaauaaaucugguagaaaaaugagaucuaaaaaaaaaaaaaaaaaaaaaaaaaaaaaaaaaaaaaaaaaaaaaaaaaaaaaaaaaaaaaaaaugcaucccccccccccccccccccccccccccccccaaaggcucuuuucagagccaccagaauu

SEQ ID NO: 4514 - RNA, 1907 nt, Artificial Sequence
  mRNA product Design g-5 comprising derived and/or modified sequence from HRSV(A2)__F-del_DSCav1_mut0 (opt6)
gggagacccgugacccggaaguuguacggcuacgcgacuuucccucccacaaacccucgcgcccuuccuuuccuacuugggcccggcagaaagcuuaccauggaauuacucauccucaaagcaaacgcaauaacaacaauacuaacagcagucacuuucugcuucgcauccggacaaaauaucacagaagaauuuuaccaauccaccugcucugcugucuccaaaggauaccuaucugcccucagaaccgguugguauacaucugucauaaccauagaacuaucaaacauuaaagaaaacaaauguaacggaacagacgcaaaagucaaacuuauaaaacaagaauuagacaaauacaaaaacgcagucacagaauuacaacuacuaaugcaaucaaccccagcaaccggaucaggauccgcaauagcuucaggaguagcaguauguaaaguucuacacuuagaaggagaagucaacaaaauuaaauccgcacuauuaucaaccaacaaagcagucguaucuuuaucaaacggaguaucuguacuuacauucaaaguacuagaccuaaaaaauuacauugauaaacaauuacuaccaauacuaaacaaacaaucauguuccaucucuaacauagaaacaguaauagaauuucaacaaaaaaauaacagauuacuugaaaucacccgagaauuuucaguaaacgcaggaguaaccacacccguaucuacauacaugcuaacaaacucugaacuucugagccuaauaaaugacaugccaauaaccaacgaccaaaaaaaacuaauguccaacaacguacaaauaguacgacaacaaucuuacucaaucaugugcauaaucaaagaagaaguacuagcuuauguaguccaacuuccacucuacggaguaauagacacccccugcuggaaacuacacacaucaccacuaugcacaacaaacacaaaagaaggcucaaacauaugccuaacaagaacugacagaggaugguauugugacaaugcaggcucugucucauucuuuccacaagccgaaacaugcaaaguucaaucaaaccgaguuuucugugacacaaugaacucuagaacucucccaucagaagucaacuuaugcaacguugacauauucaacccaaaauaugacuguaaaauaaugacuuccaaaacugauguaucauccuccgucauaacaucccuaggagcuauuguaucauguuacgggaaaaccaaaugcacagccucaaacaaaaaccgcgguaucauaaaaacauuuucaaacggaugugauuacguaagcaauaaaggaguagacaccguaucaguaggaaauacacuauacuauguaaauaaacaagaaggaaaaucacuauaugucaaaggagaaccaaucauaaauuucuaugacccacuuguauucccauccgaugaauuugacgcaagcauuucacaggucaacgaaaaaauaaaccaaucacuagccuucaucagaaaaucagacgaacuacuacauaacguaaacgccggaaaaucaacaaccaacauaaugauaacaacaaucauaauaguuaucauaguaauacuacuaucucuaauagcugucggacucuuacuauauugcaaagcccgauaaggacuaguaauaaggaaacuguaugaaugucugugggcaggaagugaagagauccuucuguaaagguuuuuggaauuaugucugcugaauaauaaacuuuuuugaaauaauaaaucugguagaaaaaugagaucuaaaaaaaaaaaaaaaaaaaaaaaaaaaaaaaaaaaaaaaaaaaaaaaaaaaaaaaaaaaaaaaaugcaucccccccccccccccccccccccccccccccaaaggcucuuuucagagccaccagaauu

SEQ ID NO: 4515 - RNA, 1907 nt, Artificial Sequence
  mRNA product Design g-5 comprising derived and/or modified sequence from HRSV(A2)__F-del_DSCav1_mut0 (opt11)
gggagacccgugacccggaaguuguacggcuacgcgacuuucccucccacaaacccucgcgcccuuccuuuccuacuugggcccggcagaaagcuuaccauggaacuacuaauccugaaagccaacgccauaaccacaauccuuaccgcagucaccuucugcuucgccuccggucaaaacaucacagaagaguucuaccaauccaccuguuccgcagucagcaaaggcuaccucuccgcacuccgaaccggaugguacaccagcgucaucaccaucgaacuauccaacauaaaggaaaauaagugcaaugguacagaugccaaggucaaacucauaaagcaagaacucgacaaauacaaaaacgccgucaccgaacuacaacuacuaaugcaaucuacccccgcaacaggcucagguuccgccauagccuccggcgucgccguuugcaaaguccuccaccucgaaggcgaaguaaacaaaaucaaauccgcccuacucucaaccaacaaagcagucgucucccucucaaacggagucucgguccucaccuucaaaguccucgaccucaaaaacuauauagacaaacaacuccuacccauacucaacaaacaguccugcagcauauccaacaucgaaaccgugaucgaguuccaacagaaaaacaacagacuccucgaaaucacucgagaguucuccguaaacgccggcgucacaaccccagucucaacauacaugcucaccaacagcgaacuccuaucacuaaucaacgacaugccuaucacaaaugaucagaagaaacuaaugagcaacaacguccaaaucguccgccaacaaucauacuccaucaugugcaucauaaaagaagaaguccuagccuacgugguccagcuaccccucuacggcguaauugacaccccuugcuggaaacuacacacuucaccccucugcacaaccaacaccaaagaagguucaaacaucugccucacacgaacagaccgcggcugguacugcgacaacgccggauccguauccuucuucccccaagcagaaaccugcaaaguucaauccaaccggguauucugcgacaccaugaacucaagaacccuucccuccgaaguaaaucuaugcaacgucgacauauucaacccaaaauacgacugcaaaaucaugaccuccaaaaccgaugucuccagcagcgucaucaccagccucggcgccaucgucuccugcuacggcaaaacaaaauguacagcauccaacaaaaaccgaggcauaaucaaaaccuucuccaacgggugcgauuacgucagcaacaaaggcgucgacaccgucuccgugggcaacacccuauacuacgucaacaaacaagaaggcaaaucacuguacguaaagggcgaacccaucaucaacuucuaugacccucugguguucccauccgaugaauuugacgcauccauaucucaggucaacgaaaagaucaaccaaucccucgccuucauacgcaaauccgacgaacuccuacacaacgucaacgcugguaaaagcaccaccaacaucaugaucaccacaaucaucaucgucauaaucguuauccuacucucccuuauagcagucggacuccuccucuacugcaaagcccgcuaaggacuaguaauaaggaaacuguaugaaugucugugggcaggaagugaagagauccuucuguaaagguuuuuggaauuaugucugcugaauaauaaacuuuuuugaaauaauaaaucugguagaaaaaugagaucuaaaaaaaaaaaaaaaaaaaaaaaaaaaaaaaaaaaaaaaaaaaaaaaaaaaaaaaaaaaaaaaaugcaucccccccccccccccccccccccccccccccaaaggcucuuuucagagccaccagaauu

SEQ ID NO: 4516 - RNA, 1923 nt, Artificial Sequence
  mRNA product Design h-1 comprising derived and/or modified sequence from HRSV(A2)__F-del_DSCav1_mut0 (opt1)
gggagacccgugacccggaaguuguacggcuacgcgacuuucccucccacaaacccucgcgcccuuccuuuccuacuugggcccggcagaaagcuuaccauggagcugcucauccugaaggccaacgccaucaccaccauccugacggcggugaccuucugcuucgccagcggccagaacaucaccgaggaguucuaccaguccacgugcagcgccgucuccaagggguaccucagcgcccugcggaccggcugguacaccuccgugaucaccaucgagcugagcaacaucaaggagaacaagugcaacgggaccgacgccaaggugaagcucaucaagcaggagcuggacaaguacaagaacgcggucacggagcugcagcuccugaugcaguccaccccggcaaccggcuccggcuccgccaucgcgagcggcgucgccgugugcaaggugcugcaccucgagggggaggucaacaagaucaagagcgcccugcuguccaccaacaaggccguggugagccucuccaacggcgucagcgugcugaccuucaaggugcuggaccucaagaacuacaucgacaagcagcugcugcccauccugaacaagcagagcugcuccaucagcaacaucgagacggugaucgaguuccagcagaagaacaaccggcuccuggagaucacccgcgaguucagcgugaacgccggggucaccacccccguguccacguacaugcugaccaacagcgagcuccugucccugaucaacgacaugccgaucaccaacgaccagaagaagcucaugagcaacaacgugcagaucguccggcagcaguccuacagcaucaugugcaucaucaaggaggaggugcuggcguacgugguccagcugccccucuacggcgugaucgacacccccugcuggaagcugcacacgagcccccugugcaccaccaacaccaaggagggguccaacaucugccucacgcgcaccgaccggggcugguacugcgacaacgccggcagcgucuccuucuucccgcaggccgagaccugcaaggugcagagcaaccgcguguucugcgacaccaugaacucccggacgcugcccagcgagguaaaccucugcaacgucgacaucuucaaccccaaguacgacugcaagaucaugaccuccaagaccgacgugagcuccagcgugaucaccucccugggggccaucgucagcugcuacggcaagacgaagugcaccgccagcaacaagaaccgggggaucaucaagaccuucuccaacggcugcgacuacgugagcaacaagggcguggacaccguguccgucgggaacacccuguacuacgugaacaagcaggagggcaagagccucuacgugaagggggagcccaucaucaacuucuacgacccgcuggucuuccccuccgacgaguucgacgcgagcaucucccaggugaacgagaagaucaaccagagccuggccuucauccgcaaguccgacgagcugcuccacaacgugaacgccggcaagagcacgaccaacaucaugaucaccaccaucaucaucgucaucaucgugauccugcugucccucaucgccguggggcugcugcucuacugcaaggcccggugaggacuaguacuggcugcaucucccuuuccucuguccuccauccuucucccaggauggugaagggggaccugguacccagugauccccaccccaggauccuaaaucaugacuuaccugcuaauaaaaacucauuggaaaagugagaagaucuaaaaaaaaaaaaaaaaaaaaaaaaaaaaaaaaaaaaaaaaaaaaaaaaaaaaaaaaaaaaaaaaugcaucccccccccccccccccccccccccccccccaaaggcucuuuucagagccaccagaauu

SEQ ID NO: 4517 - RNA, 1923 nt, Artificial Sequence
  mRNA product Design h-1 comprising derived and/or modified sequence from HRSV(A2)__F-del_DSCav1_mut0 (opt1)
gggagacccgugacccggaaguuguacggcuacgcgacuuucccucccacaaacccucgcgcccuuccuuuccuacuugggcccggcagaaagcuuaccauggagcugcucauccugaaggccaacgccaucaccaccauccugacggcggugaccuucugcuucgccagcggccagaacaucaccgaggaguucuaccaguccacgugcagcgccgucuccaagggguaccucagcgcccugcgcaccggcugguacaccuccgugaucaccaucgagcugagcaacaucaaggagaacaagugcaacgggaccgacgccaaggugaagcucaucaagcaggagcuggacaaguacaagaacgcggucacggagcugcagcuccugaugcaguccacccccgccaccggcagcggguccgccaucgccagcggcguggcggugugcaagguccugcaccucgagggcgaggugaacaagaucaaguccgcccugcugagcaccaacaaggccguggucucccucagcaacgggguguccgugcugacguucaagguccuggaccucaagaacuacaucgacaagcagcugcugccgauccucaacaagcagagcugcuccaucagcaacaucgagaccgugaucgaguuccagcagaagaacaaccggcugcuggagaucacccgcgaguucuccgugaacgccggcgucaccacgcccgugagcaccuacaugcucaccaacagcgagcugcugucccucaucaacgacaugcccaucaccaacgaccagaagaagcugaugagcaacaacgugcagaucguccggcagcaguccuacagcaucaugugcaucaucaaggaggaggugcuggccuacgugguccagcucccccuguacggggugaucgacacgccgugcuggaagcugcacaccagcccccucugcaccaccaacacgaaggagggcuccaacaucugccugacccgcaccgaccgggggugguacugcgacaacgcgggcuccgugagcuucuucccccaggccgagaccugcaagguccaguccaaccgcguguucugcgacacgaugaacagccggacccuccccuccgaggucaaccugugcaacguggacaucuucaacccgaaguacgacugcaagaucaugaccagcaagaccgacguguccagcuccgucaucacgagccugggcgccaucguguccugcuacgggaagaccaagugcaccgccagcaacaagaaccggggcaucaucaagaccuucuccaacgggugcgacuacgugagcaacaagggcgucgacacggugagcgugggcaacacccucuacuacgucaacaagcaggaggggaagucccuguacgugaagggcgagcccaucaucaacuucuacgacccccugguguuccccagcgacgaguucgacgccuccaucagccaggucaacgagaagaucaaccagucccucgcguucauccgcaagagcgacgagcugcugcacaacgugaacgccgggaaguccaccaccaacaucaugaucaccacgaucaucaucgugaucaucgucauccuccugagccugaucgccgugggccuccugcuguacugcaaggcccggugaggacuaguacuggcugcaucucccuuuccucuguccuccauccuucucccaggauggugaagggggaccugguacccagugauccccaccccaggauccuaaaucaugacuuaccugcuaauaaaaacucauuggaaaagugagaagaucuaaaaaaaaaaaaaaaaaaaaaaaaaaaaaaaaaaaaaaaaaaaaaaaaaaaaaaaaaaaaaaaaugcaucccccccccccccccccccccccccccccccaaaggcucuuuucagagccaccagaauu

SEQ ID NO: 4518 - RNA, 1923 nt, Artificial Sequence
  mRNA product Design h-1 comprising derived and/or modified sequence from HRSV(A2)__F-del_DSCav1_mut0 (opt2)
gggagacccgugacccggaaguuguacggcuacgcgacuuucccucccacaaacccucgcgcccuuccuuuccuacuugggcccggcagaaagcuuaccauggagcuccucauccucaaggccaacgccaucaccaccauccucaccgccgucaccuucugcuucgccuccggccagaacaucaccgaggaguucuaccaguccaccugcuccgccgucuccaagggcuaccucuccgcccuccgcaccggcugguacaccuccgucaucaccaucgagcucuccaacaucaaggagaacaagugcaacggcaccgacgccaaggucaagcucaucaagcaggagcucgacaaguacaagaacgccgucaccgagcuccagcuccucaugcaguccacccccgccaccggcuccggcuccgccaucgccuccggcgucgccgucugcaagguccuccaccucgagggcgaggucaacaagaucaaguccgcccuccucuccaccaacaaggccgucgucucccucuccaacggcgucuccguccucaccuucaagguccucgaccucaagaacuacaucgacaagcagcuccuccccauccucaacaagcaguccugcuccaucuccaacaucgagaccgucaucgaguuccagcagaagaacaaccgccuccucgagaucacccgcgaguucuccgucaacgccggcgucaccacccccgucuccaccuacaugcucaccaacuccgagcuccucucccucaucaacgacaugcccaucaccaacgaccagaagaagcucauguccaacaacguccagaucguccgccagcaguccuacuccaucaugugcaucaucaaggaggagguccucgccuacgucguccagcucccccucuacggcgucaucgacacccccugcuggaagcuccacaccuccccccucugcaccaccaacaccaaggagggcuccaacaucugccucacccgcaccgaccgcggcugguacugcgacaacgccggcuccgucuccuucuucccccaggccgagaccugcaagguccaguccaaccgcgucuucugcgacaccaugaacucccgcacccuccccuccgaggucaaccucugcaacgucgacaucuucaaccccaaguacgacugcaagaucaugaccuccaagaccgacgucuccuccuccgucaucaccucccucggcgccaucgucuccugcuacggcaagaccaagugcaccgccuccaacaagaaccgcggcaucaucaagaccuucuccaacggcugcgacuacgucuccaacaagggcgucgacaccgucuccgucggcaacacccucuacuacgucaacaagcaggagggcaagucccucuacgucaagggcgagcccaucaucaacuucuacgacccccucgucuuccccuccgacgaguucgacgccuccaucucccaggucaacgagaagaucaaccagucccucgccuucauccgcaaguccgacgagcuccuccacaacgucaacgccggcaaguccaccaccaacaucaugaucaccaccaucaucaucgucaucaucgucauccuccucucccucaucgccgucggccuccuccucuacugcaaggcccgcugaggacuaguacuggcugcaucucccuuuccucuguccuccauccuucucccaggauggugaagggggaccugguacccagugauccccaccccaggauccuaaaucaugacuuaccugcuaauaaaaacucauuggaaaagugagaagaucuaaaaaaaaaaaaaaaaaaaaaaaaaaaaaaaaaaaaaaaaaaaaaaaaaaaaaaaaaaaaaaaaugcaucccccccccccccccccccccccccccccccaaaggcucuuuucagagccaccagaauu

SEQ ID NO: 4519 - RNA, 1923 nt, Artificial Sequence
  mRNA product Design h-1 comprising derived and/or modified sequence from HRSV(A2)__F-del_DSCav1_mut0 (opt3)
gggagacccgugacccggaaguuguacggcuacgcgacuuucccucccacaaacccucgcgcccuuccuuuccuacuugggcccggcagaaagcuuaccauggagcugcucauccuuaaggccaacgcuauuaccacaauacugacugcagugacguucugcuuugccagcggccagaauaucaccgaagaguucuaccaauccacauguucugcggucucaaaaggguauuugagugcuuuaagaacuggaugguacaccagcguuauuacaaucgaacuguccaacauuaaggagaauaaaugcaacgguaccgacgccaaggugaaacuaaucaagcaggaacucgauaaguauaaaaaugcaguaacugagcugcagcuucugaugcagucuacacccgccaccggcucggggucagcuauagcaagcggaguggccgucuguaagguguugcaccucgagggcgaaguuaacaaaaucaagagugcucugcuguccacgaauaaagccguggucucucucagcaacgguguguccguauuaacuuuuaagguucuggaccuuaagaauuacauugauaaacaauugcugccuauccuaaacaagcagucaugcaguauuagcaauaucgagaccgugauagaguuccagcagaaaaacaauaggcuccuggaaauuacacgggaguuuucugucaacgcgggggugacuaccccaguguccacauauaugcuuaccaauucagaacuguugagccucaucaacgacaugccgauuacgaacgaucaaaagaaacugaugaguaauaacguccagaucguucgccagcagucuuacuccaucauguguauuauaaaggaggaaguguuagcauauguagugcaacugccccucuacggagucaucgacacuccuugcuggaaacuucauacaagcccacuguguaccacuaauacaaaggagggcucgaacauuugcuugacccgaacggaucguggcugguacugugacaaugccgggucuguguccuucuuuccccaggcugaaaccugcaagguucagucaaacagaguguucugugauacaaugaauaguagaacucugccuagcgaggucaaccucugcaauguggacaucuuuaacccaaaauaugauugcaagauaaugaccuccaaaacagacguaucuagcucaguuauuaccagucugggagccaucguguccuguuacgguaagacuaaaugcacagcaagcaauaagaacaggggcaucauuaagaccuucucuaaugggugugauuaugucucaaacaaaggaguggacacugucagugugggcaauacgcuuuacuauguuaacaagcaagaggguaaaagccuguacgugaagggggaacccaucauuaacuuuuaugacccuuugguauucccauccgaugaguuugacgcuucuauaucgcaggucaaugagaaaaucaaccagagccucgccuucauucggaaguccgaugaacuguuacacaaugugaacgcgggaaagucaacaaccaauaucaugaucacuaccauuauaaucguuauuaucgugauucugcuaagucucaucgccgucggccugcuuuuguacugcaaagcacgcugaggacuaguacuggcugcaucucccuuuccucuguccuccauccuucucccaggauggugaagggggaccugguacccagugauccccaccccaggauccuaaaucaugacuuaccugcuaauaaaaacucauuggaaaagugagaagaucuaaaaaaaaaaaaaaaaaaaaaaaaaaaaaaaaaaaaaaaaaaaaaaaaaaaaaaaaaaaaaaaaugcaucccccccccccccccccccccccccccccccaaaggcucuuuucagagccaccagaauu

SEQ ID NO: 4520 - RNA, 1923 nt, Artificial Sequence
  mRNA product Design h-1 comprising derived and/or modified sequence from HRSV(A2)__F-del_DSCav1_mut0 (opt4)
gggagacccgugacccggaaguuguacggcuacgcgacuuucccucccacaaacccucgcgcccuuccuuuccuacuugggcccggcagaaagcuuaccauggagcugcugauccugaaggccaacgccaucaccaccauccugaccgccgugaccuucugcuucgccagcggccagaacaucaccgaggaguucuaccagagcaccugcagcgccgugagcaagggcuaccugagcgcccugagaaccggcugguacaccagcgugaucaccaucgagcugagcaacaucaaggagaacaagugcaacggcaccgacgccaaggugaagcugaucaagcaggagcuggacaaguacaagaacgccgugaccgagcugcagcugcugaugcagagcacccccgccaccggcagcggcagcgccaucgccagcggcguggccgugugcaaggugcugcaccuggagggcgaggugaacaagaucaagagcgcccugcugagcaccaacaaggccguggugagccugagcaacggcgugagcgugcugaccuucaaggugcuggaccugaagaacuacaucgacaagcagcugcugcccauccugaacaagcagagcugcagcaucagcaacaucgagaccgugaucgaguuccagcagaagaacaacagacugcuggagaucaccagagaguucagcgugaacgccggcgugaccacccccgugagcaccuacaugcugaccaacagcgagcugcugagccugaucaacgacaugcccaucaccaacgaccagaagaagcugaugagcaacaacgugcagaucgugagacagcagagcuacagcaucaugugcaucaucaaggaggaggugcuggccuacguggugcagcugccccuguacggcgugaucgacacccccugcuggaagcugcacaccagcccccugugcaccaccaacaccaaggagggcagcaacaucugccugaccagaaccgacagaggcugguacugcgacaacgccggcagcgugagcuucuucccccaggccgagaccugcaaggugcagagcaacagaguguucugcgacaccaugaacagcagaacccugcccagcgaggugaaccugugcaacguggacaucuucaaccccaaguacgacugcaagaucaugaccagcaagaccgacgugagcagcagcgugaucaccagccugggcgccaucgugagcugcuacggcaagaccaagugcaccgccagcaacaagaacagaggcaucaucaagaccuucagcaacggcugcgacuacgugagcaacaagggcguggacaccgugagcgugggcaacacccuguacuacgugaacaagcaggagggcaagagccuguacgugaagggcgagcccaucaucaacuucuacgacccccugguguuccccagcgacgaguucgacgccagcaucagccaggugaacgagaagaucaaccagagccuggccuucaucagaaagagcgacgagcugcugcacaacgugaacgccggcaagagcaccaccaacaucaugaucaccaccaucaucaucgugaucaucgugauccugcugagccugaucgccgugggccugcugcuguacugcaaggccagaugaggacuaguacuggcugcaucucccuuuccucuguccuccauccuucucccaggauggugaagggggaccugguacccagugauccccaccccaggauccuaaaucaugacuuaccugcuaauaaaaacucauuggaaaagugagaagaucuaaaaaaaaaaaaaaaaaaaaaaaaaaaaaaaaaaaaaaaaaaaaaaaaaaaaaaaaaaaaaaaaugcaucccccccccccccccccccccccccccccccaaaggcucuuuucagagccaccagaauu

SEQ ID NO: 4521 - RNA, 1923 nt, Artificial Sequence
  mRNA product Design h-1 comprising derived and/or modified sequence from HRSV(A2)__F-del_DSCav1_mut0 (opt5)
gggagacccgugacccggaaguuguacggcuacgcgacuuucccucccacaaacccucgcgcccuuccuuuccuacuugggcccggcagaaagcuuaccauggagcugcucauccugaaggccaacgcuauuaccacaauccuuacggccgugaccuucugcuuugcgagcggccagaauauuacagaagaguucuaccaauccaccuguucugcugucagcaaaggguaucuguccgcccucagaacaggaugguacaccucuguuaucacaauugaacugagcaacaucaaggagaauaaaugcaacggcaccgacgccaaggugaaacuuaucaagcaggaacuggauaaguauaaaaaugcugugacggagcuccagcugcugaugcaguccacccccgccacagggucuggaagcgcuauugccuccggcgucgcgguguguaagguucuccaccuggagggggaagugaacaaaaucaagagcgcccuucugucuaccaauaaagcugucgugucccucagcaacggaguuucugugcugacauuuaagguccuugaccugaagaauuacauugauaaacaacuccugccuauccugaacaagcaguccugcagcauuucuaauaucgagaccgugauugaguuccagcagaaaaacaaucggcuccuggaaaucacgcgcgaguuuuccgugaacgccggcgucacaaccccgguuagcacauauaugcuuaccaauuccgaacugcucucucugaucaacgacaugcccauuaccaacgaucaaaagaaacuuaugagcaauaacgugcagaucgugagacagcaguccuacagcauuauguguaucauuaaggaggaaguccuggcuuaugugguucaacucccucuguacggcgugaucgacacacccugcuggaaacugcauacgucuccucucuguaccacaaauaccaaggagggguccaacaucugccugacacggaccgaucgcggaugguacugugacaaugccggcagcgucucuuucuuuccccaggcggaaacgugcaaggugcagagcaacagaguuuucugugauacaaugaacuccagaacccugccuucugaggugaaucucugcaaugucgacauuuuuaacccgaaauaugauugcaagaucaugaccagcaaaacagacguguccagcucugucauuaccucccugggggccaucgugagcuguuacggaaagacaaaaugcacggcuucuaauaagaaccggggcauuaucaagaccuucuccaaugggugugauuauguuagcaacaaaggaguggacacagucuccgugggcaauacccuuuacuauguuaacaagcaagagggcaaaucucuguacgugaagggggaacccaucauuaacuuuuaugacccucucgucuuccccagcgaugaguuugacgccuccaucucucaggugaaugagaaaauuaaccagagccuggcuuucauccgcaaguccgaugaacugcuccacaaugugaacgccggaaagagcacaaccaauauuaugaucacgaccauuaucaucguuauuaucgucauucugcuuucucugaucgccgugggccuccugcuguacugcaaagcuagaugaggacuaguacuggcugcaucucccuuuccucuguccuccauccuucucccaggauggugaagggggaccugguacccagugauccccaccccaggauccuaaaucaugacuuaccugcuaauaaaaacucauuggaaaagugagaagaucuaaaaaaaaaaaaaaaaaaaaaaaaaaaaaaaaaaaaaaaaaaaaaaaaaaaaaaaaaaaaaaaaugcaucccccccccccccccccccccccccccccccaaaggcucuuuucagagccaccagaauu

SEQ ID NO: 4522 - RNA, 1923 nt, Artificial Sequence
  mRNA product Design h-1 comprising derived and/or modified sequence from HRSV(A2)__F-del_DSCav1_mut0 (opt6)
gggagacccgugacccggaaguuguacggcuacgcgacuuucccucccacaaacccucgcgcccuuccuuuccuacuugggcccggcagaaagcuuaccauggaauuacucauccucaaagcaaacgcaauaacaacaauacuaacagcagucacuuucugcuucgcauccggacaaaauaucacagaagaauuuuaccaauccaccugcucugcugucuccaaaggauaccuaucugcccucagaaccgguugguauacaucugucauaaccauagaacuaucaaacauuaaagaaaacaaauguaacggaacagacgcaaaagucaaacuuauaaaacaagaauuagacaaauacaaaaacgcagucacagaauuacaacuacuaaugcaaucaaccccagcaaccggaucaggauccgcaauagcuucaggaguagcaguauguaaaguucuacacuuagaaggagaagucaacaaaauuaaauccgcacuauuaucaaccaacaaagcagucguaucuuuaucaaacggaguaucuguacuuacauucaaaguacuagaccuaaaaaauuacauugauaaacaauuacuaccaauacuaaacaaacaaucauguuccaucucuaacauagaaacaguaauagaauuucaacaaaaaaauaacagauuacuugaaaucacccgagaauuuucaguaaacgcaggaguaaccacacccguaucuacauacaugcuaacaaacucugaacuucugagccuaauaaaugacaugccaauaaccaacgaccaaaaaaaacuaauguccaacaacguacaaauaguacgacaacaaucuuacucaaucaugugcauaaucaaagaagaaguacuagcuuauguaguccaacuuccacucuacggaguaauagacacccccugcuggaaacuacacacaucaccacuaugcacaacaaacacaaaagaaggcucaaacauaugccuaacaagaacugacagaggaugguauugugacaaugcaggcucugucucauucuuuccacaagccgaaacaugcaaaguucaaucaaaccgaguuuucugugacacaaugaacucuagaacucucccaucagaagucaacuuaugcaacguugacauauucaacccaaaauaugacuguaaaauaaugacuuccaaaacugauguaucauccuccgucauaacaucccuaggagcuauuguaucauguuacgggaaaaccaaaugcacagccucaaacaaaaaccgcgguaucauaaaaacauuuucaaacggaugugauuacguaagcaauaaaggaguagacaccguaucaguaggaaauacacuauacuauguaaauaaacaagaaggaaaaucacuauaugucaaaggagaaccaaucauaaauuucuaugacccacuuguauucccauccgaugaauuugacgcaagcauuucacaggucaacgaaaaaauaaaccaaucacuagccuucaucagaaaaucagacgaacuacuacauaacguaaacgccggaaaaucaacaaccaacauaaugauaacaacaaucauaauaguuaucauaguaauacuacuaucucuaauagcugucggacucuuacuauauugcaaagcccgauaaggacuaguacuggcugcaucucccuuuccucuguccuccauccuucucccaggauggugaagggggaccugguacccagugauccccaccccaggauccuaaaucaugacuuaccugcuaauaaaaacucauuggaaaagugagaagaucuaaaaaaaaaaaaaaaaaaaaaaaaaaaaaaaaaaaaaaaaaaaaaaaaaaaaaaaaaaaaaaaaugcaucccccccccccccccccccccccccccccccaaaggcucuuuucagagccaccagaauu

SEQ ID NO: 4523 - RNA, 1923 nt, Artificial Sequence
  mRNA product Design h-1 comprising derived and/or modified sequence from HRSV(A2)__F-del_DSCav1_mut0 (opt11)
gggagacccgugacccggaaguuguacggcuacgcgacuuucccucccacaaacccucgcgcccuuccuuuccuacuugggcccggcagaaagcuuaccauggaacuacuaauccugaaagccaacgccauaaccacaauccuuaccgcagucaccuucugcuucgccuccggucaaaacaucacagaagaguucuaccaauccaccuguuccgcagucagcaaaggcuaccucuccgcacuccgaaccggaugguacaccagcgucaucaccaucgaacuauccaacauaaaggaaaauaagugcaaugguacagaugccaaggucaaacucauaaagcaagaacucgacaaauacaaaaacgccgucaccgaacuacaacuacuaaugcaaucuacccccgcaacaggcucagguuccgccauagccuccggcgucgccguuugcaaaguccuccaccucgaaggcgaaguaaacaaaaucaaauccgcccuacucucaaccaacaaagcagucgucucccucucaaacggagucucgguccucaccuucaaaguccucgaccucaaaaacuauauagacaaacaacuccuacccauacucaacaaacaguccugcagcauauccaacaucgaaaccgugaucgaguuccaacagaaaaacaacagacuccucgaaaucacucgagaguucuccguaaacgccggcgucacaaccccagucucaacauacaugcucaccaacagcgaacuccuaucacuaaucaacgacaugccuaucacaaaugaucagaagaaacuaaugagcaacaacguccaaaucguccgccaacaaucauacuccaucaugugcaucauaaaagaagaaguccuagccuacgugguccagcuaccccucuacggcguaauugacaccccuugcuggaaacuacacacuucaccccucugcacaaccaacaccaaagaagguucaaacaucugccucacacgaacagaccgcggcugguacugcgacaacgccggauccguauccuucuucccccaagcagaaaccugcaaaguucaauccaaccggguauucugcgacaccaugaacucaagaacccuucccuccgaaguaaaucuaugcaacgucgacauauucaacccaaaauacgacugcaaaaucaugaccuccaaaaccgaugucuccagcagcgucaucaccagccucggcgccaucgucuccugcuacggcaaaacaaaauguacagcauccaacaaaaaccgaggcauaaucaaaaccuucuccaacgggugcgauuacgucagcaacaaaggcgucgacaccgucuccgugggcaacacccuauacuacgucaacaaacaagaaggcaaaucacuguacguaaagggcgaacccaucaucaacuucuaugacccucugguguucccauccgaugaauuugacgcauccauaucucaggucaacgaaaagaucaaccaaucccucgccuucauacgcaaauccgacgaacuccuacacaacgucaacgcugguaaaagcaccaccaacaucaugaucaccacaaucaucaucgucauaaucguuauccuacucucccuuauagcagucggacuccuccucuacugcaaagcccgcuaaggacuaguacuggcugcaucucccuuuccucuguccuccauccuucucccaggauggugaagggggaccugguacccagugauccccaccccaggauccuaaaucaugacuuaccugcuaauaaaaacucauuggaaaagugagaagaucuaaaaaaaaaaaaaaaaaaaaaaaaaaaaaaaaaaaaaaaaaaaaaaaaaaaaaaaaaaaaaaaaugcaucccccccccccccccccccccccccccccccaaaggcucuuuucagagccaccagaauu

SEQ ID NO: 4524 - RNA, 2139 nt, Artificial Sequence
  mRNA product Design h-2 comprising derived and/or modified sequence from HRSV(A2)__F-del_DSCav1_mut0 (opt1)
gggagacccgugacccggaaguuguacggcuacgcgacuuucccucccacaaacccucgcgcccuuccuuuccuacuugggcccggcagaaagcuuaccauggagcugcucauccugaaggccaacgccaucaccaccauccugacggcggugaccuucugcuucgccagcggccagaacaucaccgaggaguucuaccaguccacgugcagcgccgucuccaagggguaccucagcgcccugcggaccggcugguacaccuccgugaucaccaucgagcugagcaacaucaaggagaacaagugcaacgggaccgacgccaaggugaagcucaucaagcaggagcuggacaaguacaagaacgcggucacggagcugcagcuccugaugcaguccaccccggcaaccggcuccggcuccgccaucgcgagcggcgucgccgugugcaaggugcugcaccucgagggggaggucaacaagaucaagagcgcccugcuguccaccaacaaggccguggugagccucuccaacggcgucagcgugcugaccuucaaggugcuggaccucaagaacuacaucgacaagcagcugcugcccauccugaacaagcagagcugcuccaucagcaacaucgagacggugaucgaguuccagcagaagaacaaccggcuccuggagaucacccgcgaguucagcgugaacgccggggucaccacccccguguccacguacaugcugaccaacagcgagcuccugucccugaucaacgacaugccgaucaccaacgaccagaagaagcucaugagcaacaacgugcagaucguccggcagcaguccuacagcaucaugugcaucaucaaggaggaggugcuggcguacgugguccagcugccccucuacggcgugaucgacacccccugcuggaagcugcacacgagcccccugugcaccaccaacaccaaggagggguccaacaucugccucacgcgcaccgaccggggcugguacugcgacaacgccggcagcgucuccuucuucccgcaggccgagaccugcaaggugcagagcaaccgcguguucugcgacaccaugaacucccggacgcugcccagcgagguaaaccucugcaacgucgacaucuucaaccccaaguacgacugcaagaucaugaccuccaagaccgacgugagcuccagcgugaucaccucccugggggccaucgucagcugcuacggcaagacgaagugcaccgccagcaacaagaaccgggggaucaucaagaccuucuccaacggcugcgacuacgugagcaacaagggcguggacaccguguccgucgggaacacccuguacuacgugaacaagcaggagggcaagagccucuacgugaagggggagcccaucaucaacuucuacgacccgcuggucuuccccuccgacgaguucgacgcgagcaucucccaggugaacgagaagaucaaccagagccuggccuucauccgcaaguccgacgagcugcuccacaacgugaacgccggcaagagcacgaccaacaucaugaucaccaccaucaucaucgucaucaucgugauccugcugucccucaucgccguggggcugcugcucuacugcaaggcccggugaggacuagugaagggaacacccaaauuuaauucagccuuaagcacaauuaauuaagagugaaacguaauuguacaagcaguuggucacccaccauagggcaugaucaacaccgcaaccuuuccuuuuucccccagugauucugaaaaaccccucuucccuucagcuugcuuagauguuccaaauuuaguaagcuuaaggcggccuacagaagaaaaagaaaaaaaaggccacaaaaguucccucucacuuucaguaaauaaaauaaaagcagcaacagaaauaaagaaauaaaugaaauucaaaaugaaauaaauauuguguugugcagcauuaaaaaaucaauaaaaauuaaaaaugagcaagaucuaaaaaaaaaaaaaaaaaaaaaaaaaaaaaaaaaaaaaaaaaaaaaaaaaaaaaaaaaaaaaaaaugcaucccccccccccccccccccccccccccccccaaaggcucuuuucagagccaccagaauu

SEQ ID NO: 4525 - RNA, 2139 nt, Artificial Sequence
  mRNA product Design h-2 comprising derived and/or modified sequence from HRSV(A2)__F-del_DSCav1_mut0 (opt1)
gggagacccgugacccggaaguuguacggcuacgcgacuuucccucccacaaacccucgcgcccuuccuuuccuacuugggcccggcagaaagcuuaccauggagcugcucauccugaaggccaacgccaucaccaccauccugacggcggugaccuucugcuucgccagcggccagaacaucaccgaggaguucuaccaguccacgugcagcgccgucuccaagggguaccucagcgcccugcgcaccggcugguacaccuccgugaucaccaucgagcugagcaacaucaaggagaacaagugcaacgggaccgacgccaaggugaagcucaucaagcaggagcuggacaaguacaagaacgcggucacggagcugcagcuccugaugcaguccacccccgccaccggcagcggguccgccaucgccagcggcguggcggugugcaagguccugcaccucgagggcgaggugaacaagaucaaguccgcccugcugagcaccaacaaggccguggucucccucagcaacgggguguccgugcugacguucaagguccuggaccucaagaacuacaucgacaagcagcugcugccgauccucaacaagcagagcugcuccaucagcaacaucgagaccgugaucgaguuccagcagaagaacaaccggcugcuggagaucacccgcgaguucuccgugaacgccggcgucaccacgcccgugagcaccuacaugcucaccaacagcgagcugcugucccucaucaacgacaugcccaucaccaacgaccagaagaagcugaugagcaacaacgugcagaucguccggcagcaguccuacagcaucaugugcaucaucaaggaggaggugcuggccuacgugguccagcucccccuguacggggugaucgacacgccgugcuggaagcugcacaccagcccccucugcaccaccaacacgaaggagggcuccaacaucugccugacccgcaccgaccgggggugguacugcgacaacgcgggcuccgugagcuucuucccccaggccgagaccugcaagguccaguccaaccgcguguucugcgacacgaugaacagccggacccuccccuccgaggucaaccugugcaacguggacaucuucaacccgaaguacgacugcaagaucaugaccagcaagaccgacguguccagcuccgucaucacgagccugggcgccaucguguccugcuacgggaagaccaagugcaccgccagcaacaagaaccggggcaucaucaagaccuucuccaacgggugcgacuacgugagcaacaagggcgucgacacggugagcgugggcaacacccucuacuacgucaacaagcaggaggggaagucccuguacgugaagggcgagcccaucaucaacuucuacgacccccugguguuccccagcgacgaguucgacgccuccaucagccaggucaacgagaagaucaaccagucccucgcguucauccgcaagagcgacgagcugcugcacaacgugaacgccgggaaguccaccaccaacaucaugaucaccacgaucaucaucgugaucaucgucauccuccugagccugaucgccgugggccuccugcuguacugcaaggcccggugaggacuagugaagggaacacccaaauuuaauucagccuuaagcacaauuaauuaagagugaaacguaauuguacaagcaguuggucacccaccauagggcaugaucaacaccgcaaccuuuccuuuuucccccagugauucugaaaaaccccucuucccuucagcuugcuuagauguuccaaauuuaguaagcuuaaggcggccuacagaagaaaaagaaaaaaaaggccacaaaaguucccucucacuuucaguaaauaaaauaaaagcagcaacagaaauaaagaaauaaaugaaauucaaaaugaaauaaauauuguguugugcagcauuaaaaaaucaauaaaaauuaaaaaugagcaagaucuaaaaaaaaaaaaaaaaaaaaaaaaaaaaaaaaaaaaaaaaaaaaaaaaaaaaaaaaaaaaaaaaugcaucccccccccccccccccccccccccccccccaaaggcucuuuucagagccaccagaauu

SEQ ID NO: 4526 - RNA, 2139 nt, Artificial Sequence
  mRNA product Design h-2 comprising derived and/or modified sequence from HRSV(A2)__F-del_DSCav1_mut0 (opt2)
gggagacccgugacccggaaguuguacggcuacgcgacuuucccucccacaaacccucgcgcccuuccuuuccuacuugggcccggcagaaagcuuaccauggagcuccucauccucaaggccaacgccaucaccaccauccucaccgccgucaccuucugcuucgccuccggccagaacaucaccgaggaguucuaccaguccaccugcuccgccgucuccaagggcuaccucuccgcccuccgcaccggcugguacaccuccgucaucaccaucgagcucuccaacaucaaggagaacaagugcaacggcaccgacgccaaggucaagcucaucaagcaggagcucgacaaguacaagaacgccgucaccgagcuccagcuccucaugcaguccacccccgccaccggcuccggcuccgccaucgccuccggcgucgccgucugcaagguccuccaccucgagggcgaggucaacaagaucaaguccgcccuccucuccaccaacaaggccgucgucucccucuccaacggcgucuccguccucaccuucaagguccucgaccucaagaacuacaucgacaagcagcuccuccccauccucaacaagcaguccugcuccaucuccaacaucgagaccgucaucgaguuccagcagaagaacaaccgccuccucgagaucacccgcgaguucuccgucaacgccggcgucaccacccccgucuccaccuacaugcucaccaacuccgagcuccucucccucaucaacgacaugcccaucaccaacgaccagaagaagcucauguccaacaacguccagaucguccgccagcaguccuacuccaucaugugcaucaucaaggaggagguccucgccuacgucguccagcucccccucuacggcgucaucgacacccccugcuggaagcuccacaccuccccccucugcaccaccaacaccaaggagggcuccaacaucugccucacccgcaccgaccgcggcugguacugcgacaacgccggcuccgucuccuucuucccccaggccgagaccugcaagguccaguccaaccgcgucuucugcgacaccaugaacucccgcacccuccccuccgaggucaaccucugcaacgucgacaucuucaaccccaaguacgacugcaagaucaugaccuccaagaccgacgucuccuccuccgucaucaccucccucggcgccaucgucuccugcuacggcaagaccaagugcaccgccuccaacaagaaccgcggcaucaucaagaccuucuccaacggcugcgacuacgucuccaacaagggcgucgacaccgucuccgucggcaacacccucuacuacgucaacaagcaggagggcaagucccucuacgucaagggcgagcccaucaucaacuucuacgacccccucgucuuccccuccgacgaguucgacgccuccaucucccaggucaacgagaagaucaaccagucccucgccuucauccgcaaguccgacgagcuccuccacaacgucaacgccggcaaguccaccaccaacaucaugaucaccaccaucaucaucgucaucaucgucauccuccucucccucaucgccgucggccuccuccucuacugcaaggcccgcugaggacuagugaagggaacacccaaauuuaauucagccuuaagcacaauuaauuaagagugaaacguaauuguacaagcaguuggucacccaccauagggcaugaucaacaccgcaaccuuuccuuuuucccccagugauucugaaaaaccccucuucccuucagcuugcuuagauguuccaaauuuaguaagcuuaaggcggccuacagaagaaaaagaaaaaaaaggccacaaaaguucccucucacuuucaguaaauaaaauaaaagcagcaacagaaauaaagaaauaaaugaaauucaaaaugaaauaaauauuguguugugcagcauuaaaaaaucaauaaaaauuaaaaaugagcaagaucuaaaaaaaaaaaaaaaaaaaaaaaaaaaaaaaaaaaaaaaaaaaaaaaaaaaaaaaaaaaaaaaaugcaucccccccccccccccccccccccccccccccaaaggcucuuuucagagccaccagaauu

SEQ ID NO: 4527 - RNA, 2139 nt, Artificial Sequence
  mRNA product Design h-2 comprising derived and/or modified sequence from HRSV(A2)__F-del_DSCav1_mut0 (opt3)
gggagacccgugacccggaaguuguacggcuacgcgacuuucccucccacaaacccucgcgcccuuccuuuccuacuugggcccggcagaaagcuuaccauggagcugcucauccuuaaggccaacgcuauuaccacaauacugacugcagugacguucugcuuugccagcggccagaauaucaccgaagaguucuaccaauccacauguucugcggucucaaaaggguauuugagugcuuuaagaacuggaugguacaccagcguuauuacaaucgaacuguccaacauuaaggagaauaaaugcaacgguaccgacgccaaggugaaacuaaucaagcaggaacucgauaaguauaaaaaugcaguaacugagcugcagcuucugaugcagucuacacccgccaccggcucggggucagcuauagcaagcggaguggccgucuguaagguguugcaccucgagggcgaaguuaacaaaaucaagagugcucugcuguccacgaauaaagccguggucucucucagcaacgguguguccguauuaacuuuuaagguucuggaccuuaagaauuacauugauaaacaauugcugccuauccuaaacaagcagucaugcaguauuagcaauaucgagaccgugauagaguuccagcagaaaaacaauaggcuccuggaaauuacacgggaguuuucugucaacgcgggggugacuaccccaguguccacauauaugcuuaccaauucagaacuguugagccucaucaacgacaugccgauuacgaacgaucaaaagaaacugaugaguaauaacguccagaucguucgccagcagucuuacuccaucauguguauuauaaaggaggaaguguuagcauauguagugcaacugccccucuacggagucaucgacacuccuugcuggaaacuucauacaagcccacuguguaccacuaauacaaaggagggcucgaacauuugcuugacccgaacggaucguggcugguacugugacaaugccgggucuguguccuucuuuccccaggcugaaaccugcaagguucagucaaacagaguguucugugauacaaugaauaguagaacucugccuagcgaggucaaccucugcaauguggacaucuuuaacccaaaauaugauugcaagauaaugaccuccaaaacagacguaucuagcucaguuauuaccagucugggagccaucguguccuguuacgguaagacuaaaugcacagcaagcaauaagaacaggggcaucauuaagaccuucucuaaugggugugauuaugucucaaacaaaggaguggacacugucagugugggcaauacgcuuuacuauguuaacaagcaagaggguaaaagccuguacgugaagggggaacccaucauuaacuuuuaugacccuuugguauucccauccgaugaguuugacgcuucuauaucgcaggucaaugagaaaaucaaccagagccucgccuucauucggaaguccgaugaacuguuacacaaugugaacgcgggaaagucaacaaccaauaucaugaucacuaccauuauaaucguuauuaucgugauucugcuaagucucaucgccgucggccugcuuuuguacugcaaagcacgcugaggacuagugaagggaacacccaaauuuaauucagccuuaagcacaauuaauuaagagugaaacguaauuguacaagcaguuggucacccaccauagggcaugaucaacaccgcaaccuuuccuuuuucccccagugauucugaaaaaccccucuucccuucagcuugcuuagauguuccaaauuuaguaagcuuaaggcggccuacagaagaaaaagaaaaaaaaggccacaaaaguucccucucacuuucaguaaauaaaauaaaagcagcaacagaaauaaagaaauaaaugaaauucaaaaugaaauaaauauuguguugugcagcauuaaaaaaucaauaaaaauuaaaaaugagcaagaucuaaaaaaaaaaaaaaaaaaaaaaaaaaaaaaaaaaaaaaaaaaaaaaaaaaaaaaaaaaaaaaaaugcaucccccccccccccccccccccccccccccccaaaggcucuuuucagagccaccagaauu

SEQ ID NO: 4528 - RNA, 2139 nt, Artificial Sequence
  mRNA product Design h-2 comprising derived and/or modified sequence from HRSV(A2)__F-del_DSCav1_mut0 (opt4)
gggagacccgugacccggaaguuguacggcuacgcgacuuucccucccacaaacccucgcgcccuuccuuuccuacuugggcccggcagaaagcuuaccauggagcugcugauccugaaggccaacgccaucaccaccauccugaccgccgugaccuucugcuucgccagcggccagaacaucaccgaggaguucuaccagagcaccugcagcgccgugagcaagggcuaccugagcgcccugagaaccggcugguacaccagcgugaucaccaucgagcugagcaacaucaaggagaacaagugcaacggcaccgacgccaaggugaagcugaucaagcaggagcuggacaaguacaagaacgccgugaccgagcugcagcugcugaugcagagcacccccgccaccggcagcggcagcgccaucgccagcggcguggccgugugcaaggugcugcaccuggagggcgaggugaacaagaucaagagcgcccugcugagcaccaacaaggccguggugagccugagcaacggcgugagcgugcugaccuucaaggugcuggaccugaagaacuacaucgacaagcagcugcugcccauccugaacaagcagagcugcagcaucagcaacaucgagaccgugaucgaguuccagcagaagaacaacagacugcuggagaucaccagagaguucagcgugaacgccggcgugaccacccccgugagcaccuacaugcugaccaacagcgagcugcugagccugaucaacgacaugcccaucaccaacgaccagaagaagcugaugagcaacaacgugcagaucgugagacagcagagcuacagcaucaugugcaucaucaaggaggaggugcuggccuacguggugcagcugccccuguacggcgugaucgacacccccugcuggaagcugcacaccagcccccugugcaccaccaacaccaaggagggcagcaacaucugccugaccagaaccgacagaggcugguacugcgacaacgccggcagcgugagcuucuucccccaggccgagaccugcaaggugcagagcaacagaguguucugcgacaccaugaacagcagaacccugcccagcgaggugaaccugugcaacguggacaucuucaaccccaaguacgacugcaagaucaugaccagcaagaccgacgugagcagcagcgugaucaccagccugggcgccaucgugagcugcuacggcaagaccaagugcaccgccagcaacaagaacagaggcaucaucaagaccuucagcaacggcugcgacuacgugagcaacaagggcguggacaccgugagcgugggcaacacccuguacuacgugaacaagcaggagggcaagagccuguacgugaagggcgagcccaucaucaacuucuacgacccccugguguuccccagcgacgaguucgacgccagcaucagccaggugaacgagaagaucaaccagagccuggccuucaucagaaagagcgacgagcugcugcacaacgugaacgccggcaagagcaccaccaacaucaugaucaccaccaucaucaucgugaucaucgugauccugcugagccugaucgccgugggccugcugcuguacugcaaggccagaugaggacuagugaagggaacacccaaauuuaauucagccuuaagcacaauuaauuaagagugaaacguaauuguacaagcaguuggucacccaccauagggcaugaucaacaccgcaaccuuuccuuuuucccccagugauucugaaaaaccccucuucccuucagcuugcuuagauguuccaaauuuaguaagcuuaaggcggccuacagaagaaaaagaaaaaaaaggccacaaaaguucccucucacuuucaguaaauaaaauaaaagcagcaacagaaauaaagaaauaaaugaaauucaaaaugaaauaaauauuguguugugcagcauuaaaaaaucaauaaaaauuaaaaaugagcaagaucuaaaaaaaaaaaaaaaaaaaaaaaaaaaaaaaaaaaaaaaaaaaaaaaaaaaaaaaaaaaaaaaaugcaucccccccccccccccccccccccccccccccaaaggcucuuuucagagccaccagaauu

SEQ ID NO: 4529 - RNA, 2139 nt, Artificial Sequence
  mRNA product Design h-2 comprising derived and/or modified sequence from HRSV(A2)__F-del_DSCav1_mut0 (opt5)
gggagacccgugacccggaaguuguacggcuacgcgacuuucccucccacaaacccucgcgcccuuccuuuccuacuugggcccggcagaaagcuuaccauggagcugcucauccugaaggccaacgcuauuaccacaauccuuacggccgugaccuucugcuuugcgagcggccagaauauuacagaagaguucuaccaauccaccuguucugcugucagcaaaggguaucuguccgcccucagaacaggaugguacaccucuguuaucacaauugaacugagcaacaucaaggagaauaaaugcaacggcaccgacgccaaggugaaacuuaucaagcaggaacuggauaaguauaaaaaugcugugacggagcuccagcugcugaugcaguccacccccgccacagggucuggaagcgcuauugccuccggcgucgcgguguguaagguucuccaccuggagggggaagugaacaaaaucaagagcgcccuucugucuaccaauaaagcugucgugucccucagcaacggaguuucugugcugacauuuaagguccuugaccugaagaauuacauugauaaacaacuccugccuauccugaacaagcaguccugcagcauuucuaauaucgagaccgugauugaguuccagcagaaaaacaaucggcuccuggaaaucacgcgcgaguuuuccgugaacgccggcgucacaaccccgguuagcacauauaugcuuaccaauuccgaacugcucucucugaucaacgacaugcccauuaccaacgaucaaaagaaacuuaugagcaauaacgugcagaucgugagacagcaguccuacagcauuauguguaucauuaaggaggaaguccuggcuuaugugguucaacucccucuguacggcgugaucgacacacccugcuggaaacugcauacgucuccucucuguaccacaaauaccaaggagggguccaacaucugccugacacggaccgaucgcggaugguacugugacaaugccggcagcgucucuuucuuuccccaggcggaaacgugcaaggugcagagcaacagaguuuucugugauacaaugaacuccagaacccugccuucugaggugaaucucugcaaugucgacauuuuuaacccgaaauaugauugcaagaucaugaccagcaaaacagacguguccagcucugucauuaccucccugggggccaucgugagcuguuacggaaagacaaaaugcacggcuucuaauaagaaccggggcauuaucaagaccuucuccaaugggugugauuauguuagcaacaaaggaguggacacagucuccgugggcaauacccuuuacuauguuaacaagcaagagggcaaaucucuguacgugaagggggaacccaucauuaacuuuuaugacccucucgucuuccccagcgaugaguuugacgccuccaucucucaggugaaugagaaaauuaaccagagccuggcuuucauccgcaaguccgaugaacugcuccacaaugugaacgccggaaagagcacaaccaauauuaugaucacgaccauuaucaucguuauuaucgucauucugcuuucucugaucgccgugggccuccugcuguacugcaaagcuagaugaggacuagugaagggaacacccaaauuuaauucagccuuaagcacaauuaauuaagagugaaacguaauuguacaagcaguuggucacccaccauagggcaugaucaacaccgcaaccuuuccuuuuucccccagugauucugaaaaaccccucuucccuucagcuugcuuagauguuccaaauuuaguaagcuuaaggcggccuacagaagaaaaagaaaaaaaaggccacaaaaguucccucucacuuucaguaaauaaaauaaaagcagcaacagaaauaaagaaauaaaugaaauucaaaaugaaauaaauauuguguugugcagcauuaaaaaaucaauaaaaauuaaaaaugagcaagaucuaaaaaaaaaaaaaaaaaaaaaaaaaaaaaaaaaaaaaaaaaaaaaaaaaaaaaaaaaaaaaaaaugcaucccccccccccccccccccccccccccccccaaaggcucuuuucagagccaccagaauu

SEQ ID NO: 4530 - RNA, 2139 nt, Artificial Sequence
  mRNA product Design h-2 comprising derived and/or modified sequence from HRSV(A2)__F-del_DSCav1_mut0 (opt6)
gggagacccgugacccggaaguuguacggcuacgcgacuuucccucccacaaacccucgcgcccuuccuuuccuacuugggcccggcagaaagcuuaccauggaauuacucauccucaaagcaaacgcaauaacaacaauacuaacagcagucacuuucugcuucgcauccggacaaaauaucacagaagaauuuuaccaauccaccugcucugcugucuccaaaggauaccuaucugcccucagaaccgguugguauacaucugucauaaccauagaacuaucaaacauuaaagaaaacaaauguaacggaacagacgcaaaagucaaacuuauaaaacaagaauuagacaaauacaaaaacgcagucacagaauuacaacuacuaaugcaaucaaccccagcaaccggaucaggauccgcaauagcuucaggaguagcaguauguaaaguucuacacuuagaaggagaagucaacaaaauuaaauccgcacuauuaucaaccaacaaagcagucguaucuuuaucaaacggaguaucuguacuuacauucaaaguacuagaccuaaaaaauuacauugauaaacaauuacuaccaauacuaaacaaacaaucauguuccaucucuaacauagaaacaguaauagaauuucaacaaaaaaauaacagauuacuugaaaucacccgagaauuuucaguaaacgcaggaguaaccacacccguaucuacauacaugcuaacaaacucugaacuucugagccuaauaaaugacaugccaauaaccaacgaccaaaaaaaacuaauguccaacaacguacaaauaguacgacaacaaucuuacucaaucaugugcauaaucaaagaagaaguacuagcuuauguaguccaacuuccacucuacggaguaauagacacccccugcuggaaacuacacacaucaccacuaugcacaacaaacacaaaagaaggcucaaacauaugccuaacaagaacugacagaggaugguauugugacaaugcaggcucugucucauucuuuccacaagccgaaacaugcaaaguucaaucaaaccgaguuuucugugacacaaugaacucuagaacucucccaucagaagucaacuuaugcaacguugacauauucaacccaaaauaugacuguaaaauaaugacuuccaaaacugauguaucauccuccgucauaacaucccuaggagcuauuguaucauguuacgggaaaaccaaaugcacagccucaaacaaaaaccgcgguaucauaaaaacauuuucaaacggaugugauuacguaagcaauaaaggaguagacaccguaucaguaggaaauacacuauacuauguaaauaaacaagaaggaaaaucacuauaugucaaaggagaaccaaucauaaauuucuaugacccacuuguauucccauccgaugaauuugacgcaagcauuucacaggucaacgaaaaaauaaaccaaucacuagccuucaucagaaaaucagacgaacuacuacauaacguaaacgccggaaaaucaacaaccaacauaaugauaacaacaaucauaauaguuaucauaguaauacuacuaucucuaauagcugucggacucuuacuauauugcaaagcccgauaaggacuagugaagggaacacccaaauuuaauucagccuuaagcacaauuaauuaagagugaaacguaauuguacaagcaguuggucacccaccauagggcaugaucaacaccgcaaccuuuccuuuuucccccagugauucugaaaaaccccucuucccuucagcuugcuuagauguuccaaauuuaguaagcuuaaggcggccuacagaagaaaaagaaaaaaaaggccacaaaaguucccucucacuuucaguaaauaaaauaaaagcagcaacagaaauaaagaaauaaaugaaauucaaaaugaaauaaauauuguguugugcagcauuaaaaaaucaauaaaaauuaaaaaugagcaagaucuaaaaaaaaaaaaaaaaaaaaaaaaaaaaaaaaaaaaaaaaaaaaaaaaaaaaaaaaaaaaaaaaugcaucccccccccccccccccccccccccccccccaaaggcucuuuucagagccaccagaauu

SEQ ID NO: 4531 - RNA, 2139 nt, Artificial Sequence
  mRNA product Design h-2 comprising derived and/or modified sequence from HRSV(A2)__F-del_DSCav1_mut0 (opt11)
gggagacccgugacccggaaguuguacggcuacgcgacuuucccucccacaaacccucgcgcccuuccuuuccuacuugggcccggcagaaagcuuaccauggaacuacuaauccugaaagccaacgccauaaccacaauccuuaccgcagucaccuucugcuucgccuccggucaaaacaucacagaagaguucuaccaauccaccuguuccgcagucagcaaaggcuaccucuccgcacuccgaaccggaugguacaccagcgucaucaccaucgaacuauccaacauaaaggaaaauaagugcaaugguacagaugccaaggucaaacucauaaagcaagaacucgacaaauacaaaaacgccgucaccgaacuacaacuacuaaugcaaucuacccccgcaacaggcucagguuccgccauagccuccggcgucgccguuugcaaaguccuccaccucgaaggcgaaguaaacaaaaucaaauccgcccuacucucaaccaacaaagcagucgucucccucucaaacggagucucgguccucaccuucaaaguccucgaccucaaaaacuauauagacaaacaacuccuacccauacucaacaaacaguccugcagcauauccaacaucgaaaccgugaucgaguuccaacagaaaaacaacagacuccucgaaaucacucgagaguucuccguaaacgccggcgucacaaccccagucucaacauacaugcucaccaacagcgaacuccuaucacuaaucaacgacaugccuaucacaaaugaucagaagaaacuaaugagcaacaacguccaaaucguccgccaacaaucauacuccaucaugugcaucauaaaagaagaaguccuagccuacgugguccagcuaccccucuacggcguaauugacaccccuugcuggaaacuacacacuucaccccucugcacaaccaacaccaaagaagguucaaacaucugccucacacgaacagaccgcggcugguacugcgacaacgccggauccguauccuucuucccccaagcagaaaccugcaaaguucaauccaaccggguauucugcgacaccaugaacucaagaacccuucccuccgaaguaaaucuaugcaacgucgacauauucaacccaaaauacgacugcaaaaucaugaccuccaaaaccgaugucuccagcagcgucaucaccagccucggcgccaucgucuccugcuacggcaaaacaaaauguacagcauccaacaaaaaccgaggcauaaucaaaaccuucuccaacgggugcgauuacgucagcaacaaaggcgucgacaccgucuccgugggcaacacccuauacuacgucaacaaacaagaaggcaaaucacuguacguaaagggcgaacccaucaucaacuucuaugacccucugguguucccauccgaugaauuugacgcauccauaucucaggucaacgaaaagaucaaccaaucccucgccuucauacgcaaauccgacgaacuccuacacaacgucaacgcugguaaaagcaccaccaacaucaugaucaccacaaucaucaucgucauaaucguuauccuacucucccuuauagcagucggacuccuccucuacugcaaagcccgcuaaggacuagugaagggaacacccaaauuuaauucagccuuaagcacaauuaauuaagagugaaacguaauuguacaagcaguuggucacccaccauagggcaugaucaacaccgcaaccuuuccuuuuucccccagugauucugaaaaaccccucuucccuucagcuugcuuagauguuccaaauuuaguaagcuuaaggcggccuacagaagaaaaagaaaaaaaaggccacaaaaguucccucucacuuucaguaaauaaaauaaaagcagcaacagaaauaaagaaauaaaugaaauucaaaaugaaauaaauauuguguugugcagcauuaaaaaaucaauaaaaauuaaaaaugagcaagaucuaaaaaaaaaaaaaaaaaaaaaaaaaaaaaaaaaaaaaaaaaaaaaaaaaaaaaaaaaaaaaaaaugcaucccccccccccccccccccccccccccccccaaaggcucuuuucagagccaccagaauu

SEQ ID NO: 4532 - RNA, 1919 nt, Artificial Sequence
  mRNA product Design h-3 comprising derived and/or modified sequence from HRSV(A2)__F-del_DSCav1_mut0 (opt1)
gggagacccgugacccggaaguuguacggcuacgcgacuuucccucccacaaacccucgcgcccuuccuuuccuacuugggcccggcagaaagcuuaccauggagcugcucauccugaaggccaacgccaucaccaccauccugacggcggugaccuucugcuucgccagcggccagaacaucaccgaggaguucuaccaguccacgugcagcgccgucuccaagggguaccucagcgcccugcggaccggcugguacaccuccgugaucaccaucgagcugagcaacaucaaggagaacaagugcaacgggaccgacgccaaggugaagcucaucaagcaggagcuggacaaguacaagaacgcggucacggagcugcagcuccugaugcaguccaccccggcaaccggcuccggcuccgccaucgcgagcggcgucgccgugugcaaggugcugcaccucgagggggaggucaacaagaucaagagcgcccugcuguccaccaacaaggccguggugagccucuccaacggcgucagcgugcugaccuucaaggugcuggaccucaagaacuacaucgacaagcagcugcugcccauccugaacaagcagagcugcuccaucagcaacaucgagacggugaucgaguuccagcagaagaacaaccggcuccuggagaucacccgcgaguucagcgugaacgccggggucaccacccccguguccacguacaugcugaccaacagcgagcuccugucccugaucaacgacaugccgaucaccaacgaccagaagaagcucaugagcaacaacgugcagaucguccggcagcaguccuacagcaucaugugcaucaucaaggaggaggugcuggcguacgugguccagcugccccucuacggcgugaucgacacccccugcuggaagcugcacacgagcccccugugcaccaccaacaccaaggagggguccaacaucugccucacgcgcaccgaccggggcugguacugcgacaacgccggcagcgucuccuucuucccgcaggccgagaccugcaaggugcagagcaaccgcguguucugcgacaccaugaacucccggacgcugcccagcgagguaaaccucugcaacgucgacaucuucaaccccaaguacgacugcaagaucaugaccuccaagaccgacgugagcuccagcgugaucaccucccugggggccaucgucagcugcuacggcaagacgaagugcaccgccagcaacaagaaccgggggaucaucaagaccuucuccaacggcugcgacuacgugagcaacaagggcguggacaccguguccgucgggaacacccuguacuacgugaacaagcaggagggcaagagccucuacgugaagggggagcccaucaucaacuucuacgacccgcuggucuuccccuccgacgaguucgacgcgagcaucucccaggugaacgagaagaucaaccagagccuggccuucauccgcaaguccgacgagcugcuccacaacgugaacgccggcaagagcacgaccaacaucaugaucaccaccaucaucaucgucaucaucgugauccugcugucccucaucgccguggggcugcugcucuacugcaaggcccggugaggacuaguggaagcauuuuccuggcugauuaaaagaaauuacucagcuauggucaucuguuccuguuagaaggcuaugcagcauauuauauacuaugcgcauguuaugaaaugcauaauaaaaaauuuuaaaaaaucuaaaagaucuaaaaaaaaaaaaaaaaaaaaaaaaaaaaaaaaaaaaaaaaaaaaaaaaaaaaaaaaaaaaaaaaugcaucccccccccccccccccccccccccccccccaaaggcucuuuucagagccaccagaauu

SEQ ID NO: 4533 - RNA, 1919 nt, Artificial Sequence
  mRNA product Design h-3 comprising derived and/or modified sequence from HRSV(A2)__F-del_DSCav1_mut0 (opt1)
gggagacccgugacccggaaguuguacggcuacgcgacuuucccucccacaaacccucgcgcccuuccuuuccuacuugggcccggcagaaagcuuaccauggagcugcucauccugaaggccaacgccaucaccaccauccugacggcggugaccuucugcuucgccagcggccagaacaucaccgaggaguucuaccaguccacgugcagcgccgucuccaagggguaccucagcgcccugcgcaccggcugguacaccuccgugaucaccaucgagcugagcaacaucaaggagaacaagugcaacgggaccgacgccaaggugaagcucaucaagcaggagcuggacaaguacaagaacgcggucacggagcugcagcuccugaugcaguccacccccgccaccggcagcggguccgccaucgccagcggcguggcggugugcaagguccugcaccucgagggcgaggugaacaagaucaaguccgcccugcugagcaccaacaaggccguggucucccucagcaacgggguguccgugcugacguucaagguccuggaccucaagaacuacaucgacaagcagcugcugccgauccucaacaagcagagcugcuccaucagcaacaucgagaccgugaucgaguuccagcagaagaacaaccggcugcuggagaucacccgcgaguucuccgugaacgccggcgucaccacgcccgugagcaccuacaugcucaccaacagcgagcugcugucccucaucaacgacaugcccaucaccaacgaccagaagaagcugaugagcaacaacgugcagaucguccggcagcaguccuacagcaucaugugcaucaucaaggaggaggugcuggccuacgugguccagcucccccuguacggggugaucgacacgccgugcuggaagcugcacaccagcccccucugcaccaccaacacgaaggagggcuccaacaucugccugacccgcaccgaccgggggugguacugcgacaacgcgggcuccgugagcuucuucccccaggccgagaccugcaagguccaguccaaccgcguguucugcgacacgaugaacagccggacccuccccuccgaggucaaccugugcaacguggacaucuucaacccgaaguacgacugcaagaucaugaccagcaagaccgacguguccagcuccgucaucacgagccugggcgccaucguguccugcuacgggaagaccaagugcaccgccagcaacaagaaccggggcaucaucaagaccuucuccaacgggugcgacuacgugagcaacaagggcgucgacacggugagcgugggcaacacccucuacuacgucaacaagcaggaggggaagucccuguacgugaagggcgagcccaucaucaacuucuacgacccccugguguuccccagcgacgaguucgacgccuccaucagccaggucaacgagaagaucaaccagucccucgcguucauccgcaagagcgacgagcugcugcacaacgugaacgccgggaaguccaccaccaacaucaugaucaccacgaucaucaucgugaucaucgucauccuccugagccugaucgccgugggccuccugcuguacugcaaggcccggugaggacuaguggaagcauuuuccuggcugauuaaaagaaauuacucagcuauggucaucuguuccuguuagaaggcuaugcagcauauuauauacuaugcgcauguuaugaaaugcauaauaaaaaauuuuaaaaaaucuaaaagaucuaaaaaaaaaaaaaaaaaaaaaaaaaaaaaaaaaaaaaaaaaaaaaaaaaaaaaaaaaaaaaaaaugcaucccccccccccccccccccccccccccccccaaaggcucuuuucagagccaccagaauu

SEQ ID NO: 4534 - RNA, 1919 nt, Artificial Sequence
  mRNA product Design h-3 comprising derived and/or modified sequence from HRSV(A2)__F-del_DSCav1_mut0 (opt2)
gggagacccgugacccggaaguuguacggcuacgcgacuuucccucccacaaacccucgcgcccuuccuuuccuacuugggcccggcagaaagcuuaccauggagcuccucauccucaaggccaacgccaucaccaccauccucaccgccgucaccuucugcuucgccuccggccagaacaucaccgaggaguucuaccaguccaccugcuccgccgucuccaagggcuaccucuccgcccuccgcaccggcugguacaccuccgucaucaccaucgagcucuccaacaucaaggagaacaagugcaacggcaccgacgccaaggucaagcucaucaagcaggagcucgacaaguacaagaacgccgucaccgagcuccagcuccucaugcaguccacccccgccaccggcuccggcuccgccaucgccuccggcgucgccgucugcaagguccuccaccucgagggcgaggucaacaagaucaaguccgcccuccucuccaccaacaaggccgucgucucccucuccaacggcgucuccguccucaccuucaagguccucgaccucaagaacuacaucgacaagcagcuccuccccauccucaacaagcaguccugcuccaucuccaacaucgagaccgucaucgaguuccagcagaagaacaaccgccuccucgagaucacccgcgaguucuccgucaacgccggcgucaccacccccgucuccaccuacaugcucaccaacuccgagcuccucucccucaucaacgacaugcccaucaccaacgaccagaagaagcucauguccaacaacguccagaucguccgccagcaguccuacuccaucaugugcaucaucaaggaggagguccucgccuacgucguccagcucccccucuacggcgucaucgacacccccugcuggaagcuccacaccuccccccucugcaccaccaacaccaaggagggcuccaacaucugccucacccgcaccgaccgcggcugguacugcgacaacgccggcuccgucuccuucuucccccaggccgagaccugcaagguccaguccaaccgcgucuucugcgacaccaugaacucccgcacccuccccuccgaggucaaccucugcaacgucgacaucuucaaccccaaguacgacugcaagaucaugaccuccaagaccgacgucuccuccuccgucaucaccucccucggcgccaucgucuccugcuacggcaagaccaagugcaccgccuccaacaagaaccgcggcaucaucaagaccuucuccaacggcugcgacuacgucuccaacaagggcgucgacaccgucuccgucggcaacacccucuacuacgucaacaagcaggagggcaagucccucuacgucaagggcgagcccaucaucaacuucuacgacccccucgucuuccccuccgacgaguucgacgccuccaucucccaggucaacgagaagaucaaccagucccucgccuucauccgcaaguccgacgagcuccuccacaacgucaacgccggcaaguccaccaccaacaucaugaucaccaccaucaucaucgucaucaucgucauccuccucucccucaucgccgucggccuccuccucuacugcaaggcccgcugaggacuaguggaagcauuuuccuggcugauuaaaagaaauuacucagcuauggucaucuguuccuguuagaaggcuaugcagcauauuauauacuaugcgcauguuaugaaaugcauaauaaaaaauuuuaaaaaaucuaaaagaucuaaaaaaaaaaaaaaaaaaaaaaaaaaaaaaaaaaaaaaaaaaaaaaaaaaaaaaaaaaaaaaaaugcaucccccccccccccccccccccccccccccccaaaggcucuuuucagagccaccagaauu

SEQ ID NO: 4535 - RNA, 1919 nt, Artificial Sequence
  mRNA product Design h-3 comprising derived and/or modified sequence from HRSV(A2)__F-del_DSCav1_mut0 (opt3)
gggagacccgugacccggaaguuguacggcuacgcgacuuucccucccacaaacccucgcgcccuuccuuuccuacuugggcccggcagaaagcuuaccauggagcugcucauccuuaaggccaacgcuauuaccacaauacugacugcagugacguucugcuuugccagcggccagaauaucaccgaagaguucuaccaauccacauguucugcggucucaaaaggguauuugagugcuuuaagaacuggaugguacaccagcguuauuacaaucgaacuguccaacauuaaggagaauaaaugcaacgguaccgacgccaaggugaaacuaaucaagcaggaacucgauaaguauaaaaaugcaguaacugagcugcagcuucugaugcagucuacacccgccaccggcucggggucagcuauagcaagcggaguggccgucuguaagguguugcaccucgagggcgaaguuaacaaaaucaagagugcucugcuguccacgaauaaagccguggucucucucagcaacgguguguccguauuaacuuuuaagguucuggaccuuaagaauuacauugauaaacaauugcugccuauccuaaacaagcagucaugcaguauuagcaauaucgagaccgugauagaguuccagcagaaaaacaauaggcuccuggaaauuacacgggaguuuucugucaacgcgggggugacuaccccaguguccacauauaugcuuaccaauucagaacuguugagccucaucaacgacaugccgauuacgaacgaucaaaagaaacugaugaguaauaacguccagaucguucgccagcagucuuacuccaucauguguauuauaaaggaggaaguguuagcauauguagugcaacugccccucuacggagucaucgacacuccuugcuggaaacuucauacaagcccacuguguaccacuaauacaaaggagggcucgaacauuugcuugacccgaacggaucguggcugguacugugacaaugccgggucuguguccuucuuuccccaggcugaaaccugcaagguucagucaaacagaguguucugugauacaaugaauaguagaacucugccuagcgaggucaaccucugcaauguggacaucuuuaacccaaaauaugauugcaagauaaugaccuccaaaacagacguaucuagcucaguuauuaccagucugggagccaucguguccuguuacgguaagacuaaaugcacagcaagcaauaagaacaggggcaucauuaagaccuucucuaaugggugugauuaugucucaaacaaaggaguggacacugucagugugggcaauacgcuuuacuauguuaacaagcaagaggguaaaagccuguacgugaagggggaacccaucauuaacuuuuaugacccuuugguauucccauccgaugaguuugacgcuucuauaucgcaggucaaugagaaaaucaaccagagccucgccuucauucggaaguccgaugaacuguuacacaaugugaacgcgggaaagucaacaaccaauaucaugaucacuaccauuauaaucguuauuaucgugauucugcuaagucucaucgccgucggccugcuuuuguacugcaaagcacgcugaggacuaguggaagcauuuuccuggcugauuaaaagaaauuacucagcuauggucaucuguuccuguuagaaggcuaugcagcauauuauauacuaugcgcauguuaugaaaugcauaauaaaaaauuuuaaaaaaucuaaaagaucuaaaaaaaaaaaaaaaaaaaaaaaaaaaaaaaaaaaaaaaaaaaaaaaaaaaaaaaaaaaaaaaaugcaucccccccccccccccccccccccccccccccaaaggcucuuuucagagccaccagaauu

SEQ ID NO: 4536 - RNA, 1919 nt, Artificial Sequence
  mRNA product Design h-3 comprising derived and/or modified sequence from HRSV(A2)__F-del_DSCav1_mut0 (opt4)
gggagacccgugacccggaaguuguacggcuacgcgacuuucccucccacaaacccucgcgcccuuccuuuccuacuugggcccggcagaaagcuuaccauggagcugcugauccugaaggccaacgccaucaccaccauccugaccgccgugaccuucugcuucgccagcggccagaacaucaccgaggaguucuaccagagcaccugcagcgccgugagcaagggcuaccugagcgcccugagaaccggcugguacaccagcgugaucaccaucgagcugagcaacaucaaggagaacaagugcaacggcaccgacgccaaggugaagcugaucaagcaggagcuggacaaguacaagaacgccgugaccgagcugcagcugcugaugcagagcacccccgccaccggcagcggcagcgccaucgccagcggcguggccgugugcaaggugcugcaccuggagggcgaggugaacaagaucaagagcgcccugcugagcaccaacaaggccguggugagccugagcaacggcgugagcgugcugaccuucaaggugcuggaccugaagaacuacaucgacaagcagcugcugcccauccugaacaagcagagcugcagcaucagcaacaucgagaccgugaucgaguuccagcagaagaacaacagacugcuggagaucaccagagaguucagcgugaacgccggcgugaccacccccgugagcaccuacaugcugaccaacagcgagcugcugagccugaucaacgacaugcccaucaccaacgaccagaagaagcugaugagcaacaacgugcagaucgugagacagcagagcuacagcaucaugugcaucaucaaggaggaggugcuggccuacguggugcagcugccccuguacggcgugaucgacacccccugcuggaagcugcacaccagcccccugugcaccaccaacaccaaggagggcagcaacaucugccugaccagaaccgacagaggcugguacugcgacaacgccggcagcgugagcuucuucccccaggccgagaccugcaaggugcagagcaacagaguguucugcgacaccaugaacagcagaacccugcccagcgaggugaaccugugcaacguggacaucuucaaccccaaguacgacugcaagaucaugaccagcaagaccgacgugagcagcagcgugaucaccagccugggcgccaucgugagcugcuacggcaagaccaagugcaccgccagcaacaagaacagaggcaucaucaagaccuucagcaacggcugcgacuacgugagcaacaagggcguggacaccgugagcgugggcaacacccuguacuacgugaacaagcaggagggcaagagccuguacgugaagggcgagcccaucaucaacuucuacgacccccugguguuccccagcgacgaguucgacgccagcaucagccaggugaacgagaagaucaaccagagccuggccuucaucagaaagagcgacgagcugcugcacaacgugaacgccggcaagagcaccaccaacaucaugaucaccaccaucaucaucgugaucaucgugauccugcugagccugaucgccgugggccugcugcuguacugcaaggccagaugaggacuaguggaagcauuuuccuggcugauuaaaagaaauuacucagcuauggucaucuguuccuguuagaaggcuaugcagcauauuauauacuaugcgcauguuaugaaaugcauaauaaaaaauuuuaaaaaaucuaaaagaucuaaaaaaaaaaaaaaaaaaaaaaaaaaaaaaaaaaaaaaaaaaaaaaaaaaaaaaaaaaaaaaaaugcaucccccccccccccccccccccccccccccccaaaggcucuuuucagagccaccagaauu

SEQ ID NO: 4537 - RNA, 1919 nt, Artificial Sequence
  mRNA product Design h-3 comprising derived and/or modified sequence from HRSV(A2)__F-del_DSCav1_mut0 (opt5)
gggagacccgugacccggaaguuguacggcuacgcgacuuucccucccacaaacccucgcgcccuuccuuuccuacuugggcccggcagaaagcuuaccauggagcugcucauccugaaggccaacgcuauuaccacaauccuuacggccgugaccuucugcuuugcgagcggccagaauauuacagaagaguucuaccaauccaccuguucugcugucagcaaaggguaucuguccgcccucagaacaggaugguacaccucuguuaucacaauugaacugagcaacaucaaggagaauaaaugcaacggcaccgacgccaaggugaaacuuaucaagcaggaacuggauaaguauaaaaaugcugugacggagcuccagcugcugaugcaguccacccccgccacagggucuggaagcgcuauugccuccggcgucgcgguguguaagguucuccaccuggagggggaagugaacaaaaucaagagcgcccuucugucuaccaauaaagcugucgugucccucagcaacggaguuucugugcugacauuuaagguccuugaccugaagaauuacauugauaaacaacuccugccuauccugaacaagcaguccugcagcauuucuaauaucgagaccgugauugaguuccagcagaaaaacaaucggcuccuggaaaucacgcgcgaguuuuccgugaacgccggcgucacaaccccgguuagcacauauaugcuuaccaauuccgaacugcucucucugaucaacgacaugcccauuaccaacgaucaaaagaaacuuaugagcaauaacgugcagaucgugagacagcaguccuacagcauuauguguaucauuaaggaggaaguccuggcuuaugugguucaacucccucuguacggcgugaucgacacacccugcuggaaacugcauacgucuccucucuguaccacaaauaccaaggagggguccaacaucugccugacacggaccgaucgcggaugguacugugacaaugccggcagcgucucuuucuuuccccaggcggaaacgugcaaggugcagagcaacagaguuuucugugauacaaugaacuccagaacccugccuucugaggugaaucucugcaaugucgacauuuuuaacccgaaauaugauugcaagaucaugaccagcaaaacagacguguccagcucugucauuaccucccugggggccaucgugagcuguuacggaaagacaaaaugcacggcuucuaauaagaaccggggcauuaucaagaccuucuccaaugggugugauuauguuagcaacaaaggaguggacacagucuccgugggcaauacccuuuacuauguuaacaagcaagagggcaaaucucuguacgugaagggggaacccaucauuaacuuuuaugacccucucgucuuccccagcgaugaguuugacgccuccaucucucaggugaaugagaaaauuaaccagagccuggcuuucauccgcaaguccgaugaacugcuccacaaugugaacgccggaaagagcacaaccaauauuaugaucacgaccauuaucaucguuauuaucgucauucugcuuucucugaucgccgugggccuccugcuguacugcaaagcuagaugaggacuaguggaagcauuuuccuggcugauuaaaagaaauuacucagcuauggucaucuguuccuguuagaaggcuaugcagcauauuauauacuaugcgcauguuaugaaaugcauaauaaaaaauuuuaaaaaaucuaaaagaucuaaaaaaaaaaaaaaaaaaaaaaaaaaaaaaaaaaaaaaaaaaaaaaaaaaaaaaaaaaaaaaaaugcaucccccccccccccccccccccccccccccccaaaggcucuuuucagagccaccagaauu

SEQ ID NO: 4538 - RNA, 1919 nt, Artificial Sequence
  mRNA product Design h-3 comprising derived and/or modified sequence from HRSV(A2)__F-del_DSCav1_mut0 (opt6)
gggagacccgugacccggaaguuguacggcuacgcgacuuucccucccacaaacccucgcgcccuuccuuuccuacuugggcccggcagaaagcuuaccauggaauuacucauccucaaagcaaacgcaauaacaacaauacuaacagcagucacuuucugcuucgcauccggacaaaauaucacagaagaauuuuaccaauccaccugcucugcugucuccaaaggauaccuaucugcccucagaaccgguugguauacaucugucauaaccauagaacuaucaaacauuaaagaaaacaaauguaacggaacagacgcaaaagucaaacuuauaaaacaagaauuagacaaauacaaaaacgcagucacagaauuacaacuacuaaugcaaucaaccccagcaaccggaucaggauccgcaauagcuucaggaguagcaguauguaaaguucuacacuuagaaggagaagucaacaaaauuaaauccgcacuauuaucaaccaacaaagcagucguaucuuuaucaaacggaguaucuguacuuacauucaaaguacuagaccuaaaaaauuacauugauaaacaauuacuaccaauacuaaacaaacaaucauguuccaucucuaacauagaaacaguaauagaauuucaacaaaaaaauaacagauuacuugaaaucacccgagaauuuucaguaaacgcaggaguaaccacacccguaucuacauacaugcuaacaaacucugaacuucugagccuaauaaaugacaugccaauaaccaacgaccaaaaaaaacuaauguccaacaacguacaaauaguacgacaacaaucuuacucaaucaugugcauaaucaaagaagaaguacuagcuuauguaguccaacuuccacucuacggaguaauagacacccccugcuggaaacuacacacaucaccacuaugcacaacaaacacaaaagaaggcucaaacauaugccuaacaagaacugacagaggaugguauugugacaaugcaggcucugucucauucuuuccacaagccgaaacaugcaaaguucaaucaaaccgaguuuucugugacacaaugaacucuagaacucucccaucagaagucaacuuaugcaacguugacauauucaacccaaaauaugacuguaaaauaaugacuuccaaaacugauguaucauccuccgucauaacaucccuaggagcuauuguaucauguuacgggaaaaccaaaugcacagccucaaacaaaaaccgcgguaucauaaaaacauuuucaaacggaugugauuacguaagcaauaaaggaguagacaccguaucaguaggaaauacacuauacuauguaaauaaacaagaaggaaaaucacuauaugucaaaggagaaccaaucauaaauuucuaugacccacuuguauucccauccgaugaauuugacgcaagcauuucacaggucaacgaaaaaauaaaccaaucacuagccuucaucagaaaaucagacgaacuacuacauaacguaaacgccggaaaaucaacaaccaacauaaugauaacaacaaucauaauaguuaucauaguaauacuacuaucucuaauagcugucggacucuuacuauauugcaaagcccgauaaggacuaguggaagcauuuuccuggcugauuaaaagaaauuacucagcuauggucaucuguuccuguuagaaggcuaugcagcauauuauauacuaugcgcauguuaugaaaugcauaauaaaaaauuuuaaaaaaucuaaaagaucuaaaaaaaaaaaaaaaaaaaaaaaaaaaaaaaaaaaaaaaaaaaaaaaaaaaaaaaaaaaaaaaaugcaucccccccccccccccccccccccccccccccaaaggcucuuuucagagccaccagaauu

SEQ ID NO: 4539 - RNA, 1919 nt, Artificial Sequence
  mRNA product Design h-3 comprising derived and/or modified sequence from HRSV(A2)__F-del_DSCav1_mut0 (opt11)
gggagacccgugacccggaaguuguacggcuacgcgacuuucccucccacaaacccucgcgcccuuccuuuccuacuugggcccggcagaaagcuuaccauggaacuacuaauccugaaagccaacgccauaaccacaauccuuaccgcagucaccuucugcuucgccuccggucaaaacaucacagaagaguucuaccaauccaccuguuccgcagucagcaaaggcuaccucuccgcacuccgaaccggaugguacaccagcgucaucaccaucgaacuauccaacauaaaggaaaauaagugcaaugguacagaugccaaggucaaacucauaaagcaagaacucgacaaauacaaaaacgccgucaccgaacuacaacuacuaaugcaaucuacccccgcaacaggcucagguuccgccauagccuccggcgucgccguuugcaaaguccuccaccucgaaggcgaaguaaacaaaaucaaauccgcccuacucucaaccaacaaagcagucgucucccucucaaacggagucucgguccucaccuucaaaguccucgaccucaaaaacuauauagacaaacaacuccuacccauacucaacaaacaguccugcagcauauccaacaucgaaaccgugaucgaguuccaacagaaaaacaacagacuccucgaaaucacucgagaguucuccguaaacgccggcgucacaaccccagucucaacauacaugcucaccaacagcgaacuccuaucacuaaucaacgacaugccuaucacaaaugaucagaagaaacuaaugagcaacaacguccaaaucguccgccaacaaucauacuccaucaugugcaucauaaaagaagaaguccuagccuacgugguccagcuaccccucuacggcguaauugacaccccuugcuggaaacuacacacuucaccccucugcacaaccaacaccaaagaagguucaaacaucugccucacacgaacagaccgcggcugguacugcgacaacgccggauccguauccuucuucccccaagcagaaaccugcaaaguucaauccaaccggguauucugcgacaccaugaacucaagaacccuucccuccgaaguaaaucuaugcaacgucgacauauucaacccaaaauacgacugcaaaaucaugaccuccaaaaccgaugucuccagcagcgucaucaccagccucggcgccaucgucuccugcuacggcaaaacaaaauguacagcauccaacaaaaaccgaggcauaaucaaaaccuucuccaacgggugcgauuacgucagcaacaaaggcgucgacaccgucuccgugggcaacacccuauacuacgucaacaaacaagaaggcaaaucacuguacguaaagggcgaacccaucaucaacuucuaugacccucugguguucccauccgaugaauuugacgcauccauaucucaggucaacgaaaagaucaaccaaucccucgccuucauacgcaaauccgacgaacuccuacacaacgucaacgcugguaaaagcaccaccaacaucaugaucaccacaaucaucaucgucauaaucguuauccuacucucccuuauagcagucggacuccuccucuacugcaaagcccgcuaaggacuaguggaagcauuuuccuggcugauuaaaagaaauuacucagcuauggucaucuguuccuguuagaaggcuaugcagcauauuauauacuaugcgcauguuaugaaaugcauaauaaaaaauuuuaaaaaaucuaaaagaucuaaaaaaaaaaaaaaaaaaaaaaaaaaaaaaaaaaaaaaaaaaaaaaaaaaaaaaaaaaaaaaaaugcaucccccccccccccccccccccccccccccccaaaggcucuuuucagagccaccagaauu

SEQ ID NO: 4540 - RNA, 1982 nt, Artificial Sequence
  mRNA product Design h-4 comprising derived and/or modified sequence from HRSV(A2)__F-del_DSCav1_mut0 (opt1)
gggagagggcgcuuggcuugcaaggacccugagcugcggcauugaagcacacccaacccaacucgacugaagucagccucacugaaccggaucugagaaucuucucucucugggcuugccagggcucuccgaaccuagcuagcauccucuucaauuccaacuagaaagcuuaccauggagcugcucauccugaaggccaacgccaucaccaccauccugacggcggugaccuucugcuucgccagcggccagaacaucaccgaggaguucuaccaguccacgugcagcgccgucuccaagggguaccucagcgcccugcggaccggcugguacaccuccgugaucaccaucgagcugagcaacaucaaggagaacaagugcaacgggaccgacgccaaggugaagcucaucaagcaggagcuggacaaguacaagaacgcggucacggagcugcagcuccugaugcaguccaccccggcaaccggcuccggcuccgccaucgcgagcggcgucgccgugugcaaggugcugcaccucgagggggaggucaacaagaucaagagcgcccugcuguccaccaacaaggccguggugagccucuccaacggcgucagcgugcugaccuucaaggugcuggaccucaagaacuacaucgacaagcagcugcugcccauccugaacaagcagagcugcuccaucagcaacaucgagacggugaucgaguuccagcagaagaacaaccggcuccuggagaucacccgcgaguucagcgugaacgccggggucaccacccccguguccacguacaugcugaccaacagcgagcuccugucccugaucaacgacaugccgaucaccaacgaccagaagaagcucaugagcaacaacgugcagaucguccggcagcaguccuacagcaucaugugcaucaucaaggaggaggugcuggcguacgugguccagcugccccucuacggcgugaucgacacccccugcuggaagcugcacacgagcccccugugcaccaccaacaccaaggagggguccaacaucugccucacgcgcaccgaccggggcugguacugcgacaacgccggcagcgucuccuucuucccgcaggccgagaccugcaaggugcagagcaaccgcguguucugcgacaccaugaacucccggacgcugcccagcgagguaaaccucugcaacgucgacaucuucaaccccaaguacgacugcaagaucaugaccuccaagaccgacgugagcuccagcgugaucaccucccugggggccaucgucagcugcuacggcaagacgaagugcaccgccagcaacaagaaccgggggaucaucaagaccuucuccaacggcugcgacuacgugagcaacaagggcguggacaccguguccgucgggaacacccuguacuacgugaacaagcaggagggcaagagccucuacgugaagggggagcccaucaucaacuucuacgacccgcuggucuuccccuccgacgaguucgacgcgagcaucucccaggugaacgagaagaucaaccagagccuggccuucauccgcaaguccgacgagcugcuccacaacgugaacgccggcaagagcacgaccaacaucaugaucaccaccaucaucaucgucaucaucgugauccugcugucccucaucgccguggggcugcugcucuacugcaaggcccggugaggacuaguaauaaggaaacuguaugaaugucugugggcaggaagugaagagauccuucuguaaagguuuuuggaauuaugucugcugaauaauaaacuuuuuugaaauaauaaaucugguagaaaaaugagaucuaaaaaaaaaaaaaaaaaaaaaaaaaaaaaaaaaaaaaaaaaaaaaaaaaaaaaaaaaaaaaaaaugcaucccccccccccccccccccccccccccccccaaaggcucuuuucagagccaccagaauu

SEQ ID NO: 4541 - RNA, 1982 nt, Artificial Sequence
  mRNA product Design h-4 comprising derived and/or modified sequence from HRSV(A2)__F-del_DSCav1_mut0 (opt1)
gggagagggcgcuuggcuugcaaggacccugagcugcggcauugaagcacacccaacccaacucgacugaagucagccucacugaaccggaucugagaaucuucucucucugggcuugccagggcucuccgaaccuagcuagcauccucuucaauuccaacuagaaagcuuaccauggagcugcucauccugaaggccaacgccaucaccaccauccugacggcggugaccuucugcuucgccagcggccagaacaucaccgaggaguucuaccaguccacgugcagcgccgucuccaagggguaccucagcgcccugcgcaccggcugguacaccuccgugaucaccaucgagcugagcaacaucaaggagaacaagugcaacgggaccgacgccaaggugaagcucaucaagcaggagcuggacaaguacaagaacgcggucacggagcugcagcuccugaugcaguccacccccgccaccggcagcggguccgccaucgccagcggcguggcggugugcaagguccugcaccucgagggcgaggugaacaagaucaaguccgcccugcugagcaccaacaaggccguggucucccucagcaacgggguguccgugcugacguucaagguccuggaccucaagaacuacaucgacaagcagcugcugccgauccucaacaagcagagcugcuccaucagcaacaucgagaccgugaucgaguuccagcagaagaacaaccggcugcuggagaucacccgcgaguucuccgugaacgccggcgucaccacgcccgugagcaccuacaugcucaccaacagcgagcugcugucccucaucaacgacaugcccaucaccaacgaccagaagaagcugaugagcaacaacgugcagaucguccggcagcaguccuacagcaucaugugcaucaucaaggaggaggugcuggccuacgugguccagcucccccuguacggggugaucgacacgccgugcuggaagcugcacaccagcccccucugcaccaccaacacgaaggagggcuccaacaucugccugacccgcaccgaccgggggugguacugcgacaacgcgggcuccgugagcuucuucccccaggccgagaccugcaagguccaguccaaccgcguguucugcgacacgaugaacagccggacccuccccuccgaggucaaccugugcaacguggacaucuucaacccgaaguacgacugcaagaucaugaccagcaagaccgacguguccagcuccgucaucacgagccugggcgccaucguguccugcuacgggaagaccaagugcaccgccagcaacaagaaccggggcaucaucaagaccuucuccaacgggugcgacuacgugagcaacaagggcgucgacacggugagcgugggcaacacccucuacuacgucaacaagcaggaggggaagucccuguacgugaagggcgagcccaucaucaacuucuacgacccccugguguuccccagcgacgaguucgacgccuccaucagccaggucaacgagaagaucaaccagucccucgcguucauccgcaagagcgacgagcugcugcacaacgugaacgccgggaaguccaccaccaacaucaugaucaccacgaucaucaucgugaucaucgucauccuccugagccugaucgccgugggccuccugcuguacugcaaggcccggugaggacuaguaauaaggaaacuguaugaaugucugugggcaggaagugaagagauccuucuguaaagguuuuuggaauuaugucugcugaauaauaaacuuuuuugaaauaauaaaucugguagaaaaaugagaucuaaaaaaaaaaaaaaaaaaaaaaaaaaaaaaaaaaaaaaaaaaaaaaaaaaaaaaaaaaaaaaaaugcaucccccccccccccccccccccccccccccccaaaggcucuuuucagagccaccagaauu

SEQ ID NO: 4542 - RNA, 1982 nt, Artificial Sequence
  mRNA product Design h-4 comprising derived and/or modified sequence from HRSV(A2)__F-del_DSCav1_mut0 (opt2)
gggagagggcgcuuggcuugcaaggacccugagcugcggcauugaagcacacccaacccaacucgacugaagucagccucacugaaccggaucugagaaucuucucucucugggcuugccagggcucuccgaaccuagcuagcauccucuucaauuccaacuagaaagcuuaccauggagcuccucauccucaaggccaacgccaucaccaccauccucaccgccgucaccuucugcuucgccuccggccagaacaucaccgaggaguucuaccaguccaccugcuccgccgucuccaagggcuaccucuccgcccuccgcaccggcugguacaccuccgucaucaccaucgagcucuccaacaucaaggagaacaagugcaacggcaccgacgccaaggucaagcucaucaagcaggagcucgacaaguacaagaacgccgucaccgagcuccagcuccucaugcaguccacccccgccaccggcuccggcuccgccaucgccuccggcgucgccgucugcaagguccuccaccucgagggcgaggucaacaagaucaaguccgcccuccucuccaccaacaaggccgucgucucccucuccaacggcgucuccguccucaccuucaagguccucgaccucaagaacuacaucgacaagcagcuccuccccauccucaacaagcaguccugcuccaucuccaacaucgagaccgucaucgaguuccagcagaagaacaaccgccuccucgagaucacccgcgaguucuccgucaacgccggcgucaccacccccgucuccaccuacaugcucaccaacuccgagcuccucucccucaucaacgacaugcccaucaccaacgaccagaagaagcucauguccaacaacguccagaucguccgccagcaguccuacuccaucaugugcaucaucaaggaggagguccucgccuacgucguccagcucccccucuacggcgucaucgacacccccugcuggaagcuccacaccuccccccucugcaccaccaacaccaaggagggcuccaacaucugccucacccgcaccgaccgcggcugguacugcgacaacgccggcuccgucuccuucuucccccaggccgagaccugcaagguccaguccaaccgcgucuucugcgacaccaugaacucccgcacccuccccuccgaggucaaccucugcaacgucgacaucuucaaccccaaguacgacugcaagaucaugaccuccaagaccgacgucuccuccuccgucaucaccucccucggcgccaucgucuccugcuacggcaagaccaagugcaccgccuccaacaagaaccgcggcaucaucaagaccuucuccaacggcugcgacuacgucuccaacaagggcgucgacaccgucuccgucggcaacacccucuacuacgucaacaagcaggagggcaagucccucuacgucaagggcgagcccaucaucaacuucuacgacccccucgucuuccccuccgacgaguucgacgccuccaucucccaggucaacgagaagaucaaccagucccucgccuucauccgcaaguccgacgagcuccuccacaacgucaacgccggcaaguccaccaccaacaucaugaucaccaccaucaucaucgucaucaucgucauccuccucucccucaucgccgucggccuccuccucuacugcaaggcccgcugaggacuaguaauaaggaaacuguaugaaugucugugggcaggaagugaagagauccuucuguaaagguuuuuggaauuaugucugcugaauaauaaacuuuuuugaaauaauaaaucugguagaaaaaugagaucuaaaaaaaaaaaaaaaaaaaaaaaaaaaaaaaaaaaaaaaaaaaaaaaaaaaaaaaaaaaaaaaaugcaucccccccccccccccccccccccccccccccaaaggcucuuuucagagccaccagaauu

SEQ ID NO: 4543 - RNA, 1982 nt, Artificial Sequence
  mRNA product Design h-4 comprising derived and/or modified sequence from HRSV(A2)__F-del_DSCav1_mut0 (opt3)
gggagagggcgcuuggcuugcaaggacccugagcugcggcauugaagcacacccaacccaacucgacugaagucagccucacugaaccggaucugagaaucuucucucucugggcuugccagggcucuccgaaccuagcuagcauccucuucaauuccaacuagaaagcuuaccauggagcugcucauccuuaaggccaacgcuauuaccacaauacugacugcagugacguucugcuuugccagcggccagaauaucaccgaagaguucuaccaauccacauguucugcggucucaaaaggguauuugagugcuuuaagaacuggaugguacaccagcguuauuacaaucgaacuguccaacauuaaggagaauaaaugcaacgguaccgacgccaaggugaaacuaaucaagcaggaacucgauaaguauaaaaaugcaguaacugagcugcagcuucugaugcagucuacacccgccaccggcucggggucagcuauagcaagcggaguggccgucuguaagguguugcaccucgagggcgaaguuaacaaaaucaagagugcucugcuguccacgaauaaagccguggucucucucagcaacgguguguccguauuaacuuuuaagguucuggaccuuaagaauuacauugauaaacaauugcugccuauccuaaacaagcagucaugcaguauuagcaauaucgagaccgugauagaguuccagcagaaaaacaauaggcuccuggaaauuacacgggaguuuucugucaacgcgggggugacuaccccaguguccacauauaugcuuaccaauucagaacuguugagccucaucaacgacaugccgauuacgaacgaucaaaagaaacugaugaguaauaacguccagaucguucgccagcagucuuacuccaucauguguauuauaaaggaggaaguguuagcauauguagugcaacugccccucuacggagucaucgacacuccuugcuggaaacuucauacaagcccacuguguaccacuaauacaaaggagggcucgaacauuugcuugacccgaacggaucguggcugguacugugacaaugccgggucuguguccuucuuuccccaggcugaaaccugcaagguucagucaaacagaguguucugugauacaaugaauaguagaacucugccuagcgaggucaaccucugcaauguggacaucuuuaacccaaaauaugauugcaagauaaugaccuccaaaacagacguaucuagcucaguuauuaccagucugggagccaucguguccuguuacgguaagacuaaaugcacagcaagcaauaagaacaggggcaucauuaagaccuucucuaaugggugugauuaugucucaaacaaaggaguggacacugucagugugggcaauacgcuuuacuauguuaacaagcaagaggguaaaagccuguacgugaagggggaacccaucauuaacuuuuaugacccuuugguauucccauccgaugaguuugacgcuucuauaucgcaggucaaugagaaaaucaaccagagccucgccuucauucggaaguccgaugaacuguuacacaaugugaacgcgggaaagucaacaaccaauaucaugaucacuaccauuauaaucguuauuaucgugauucugcuaagucucaucgccgucggccugcuuuuguacugcaaagcacgcugaggacuaguaauaaggaaacuguaugaaugucugugggcaggaagugaagagauccuucuguaaagguuuuuggaauuaugucugcugaauaauaaacuuuuuugaaauaauaaaucugguagaaaaaugagaucuaaaaaaaaaaaaaaaaaaaaaaaaaaaaaaaaaaaaaaaaaaaaaaaaaaaaaaaaaaaaaaaaugcaucccccccccccccccccccccccccccccccaaaggcucuuuucagagccaccagaauu

SEQ ID NO: 4544 - RNA, 1982 nt, Artificial Sequence
  mRNA product Design h-4 comprising derived and/or modified sequence from HRSV(A2)__F-del_DSCav1_mut0 (opt4)
gggagagggcgcuuggcuugcaaggacccugagcugcggcauugaagcacacccaacccaacucgacugaagucagccucacugaaccggaucugagaaucuucucucucugggcuugccagggcucuccgaaccuagcuagcauccucuucaauuccaacuagaaagcuuaccauggagcugcugauccugaaggccaacgccaucaccaccauccugaccgccgugaccuucugcuucgccagcggccagaacaucaccgaggaguucuaccagagcaccugcagcgccgugagcaagggcuaccugagcgcccugagaaccggcugguacaccagcgugaucaccaucgagcugagcaacaucaaggagaacaagugcaacggcaccgacgccaaggugaagcugaucaagcaggagcuggacaaguacaagaacgccgugaccgagcugcagcugcugaugcagagcacccccgccaccggcagcggcagcgccaucgccagcggcguggccgugugcaaggugcugcaccuggagggcgaggugaacaagaucaagagcgcccugcugagcaccaacaaggccguggugagccugagcaacggcgugagcgugcugaccuucaaggugcuggaccugaagaacuacaucgacaagcagcugcugcccauccugaacaagcagagcugcagcaucagcaacaucgagaccgugaucgaguuccagcagaagaacaacagacugcuggagaucaccagagaguucagcgugaacgccggcgugaccacccccgugagcaccuacaugcugaccaacagcgagcugcugagccugaucaacgacaugcccaucaccaacgaccagaagaagcugaugagcaacaacgugcagaucgugagacagcagagcuacagcaucaugugcaucaucaaggaggaggugcuggccuacguggugcagcugccccuguacggcgugaucgacacccccugcuggaagcugcacaccagcccccugugcaccaccaacaccaaggagggcagcaacaucugccugaccagaaccgacagaggcugguacugcgacaacgccggcagcgugagcuucuucccccaggccgagaccugcaaggugcagagcaacagaguguucugcgacaccaugaacagcagaacccugcccagcgaggugaaccugugcaacguggacaucuucaaccccaaguacgacugcaagaucaugaccagcaagaccgacgugagcagcagcgugaucaccagccugggcgccaucgugagcugcuacggcaagaccaagugcaccgccagcaacaagaacagaggcaucaucaagaccuucagcaacggcugcgacuacgugagcaacaagggcguggacaccgugagcgugggcaacacccuguacuacgugaacaagcaggagggcaagagccuguacgugaagggcgagcccaucaucaacuucuacgacccccugguguuccccagcgacgaguucgacgccagcaucagccaggugaacgagaagaucaaccagagccuggccuucaucagaaagagcgacgagcugcugcacaacgugaacgccggcaagagcaccaccaacaucaugaucaccaccaucaucaucgugaucaucgugauccugcugagccugaucgccgugggccugcugcuguacugcaaggccagaugaggacuaguaauaaggaaacuguaugaaugucugugggcaggaagugaagagauccuucuguaaagguuuuuggaauuaugucugcugaauaauaaacuuuuuugaaauaauaaaucugguagaaaaaugagaucuaaaaaaaaaaaaaaaaaaaaaaaaaaaaaaaaaaaaaaaaaaaaaaaaaaaaaaaaaaaaaaaaugcaucccccccccccccccccccccccccccccccaaaggcucuuuucagagccaccagaauu

SEQ ID NO: 4545 - RNA, 1982 nt, Artificial Sequence
  mRNA product Design h-4 comprising derived and/or modified sequence from HRSV(A2)__F-del_DSCav1_mut0 (opt5)
gggagagggcgcuuggcuugcaaggacccugagcugcggcauugaagcacacccaacccaacucgacugaagucagccucacugaaccggaucugagaaucuucucucucugggcuugccagggcucuccgaaccuagcuagcauccucuucaauuccaacuagaaagcuuaccauggagcugcucauccugaaggccaacgcuauuaccacaauccuuacggccgugaccuucugcuuugcgagcggccagaauauuacagaagaguucuaccaauccaccuguucugcugucagcaaaggguaucuguccgcccucagaacaggaugguacaccucuguuaucacaauugaacugagcaacaucaaggagaauaaaugcaacggcaccgacgccaaggugaaacuuaucaagcaggaacuggauaaguauaaaaaugcugugacggagcuccagcugcugaugcaguccacccccgccacagggucuggaagcgcuauugccuccggcgucgcgguguguaagguucuccaccuggagggggaagugaacaaaaucaagagcgcccuucugucuaccaauaaagcugucgugucccucagcaacggaguuucugugcugacauuuaagguccuugaccugaagaauuacauugauaaacaacuccugccuauccugaacaagcaguccugcagcauuucuaauaucgagaccgugauugaguuccagcagaaaaacaaucggcuccuggaaaucacgcgcgaguuuuccgugaacgccggcgucacaaccccgguuagcacauauaugcuuaccaauuccgaacugcucucucugaucaacgacaugcccauuaccaacgaucaaaagaaacuuaugagcaauaacgugcagaucgugagacagcaguccuacagcauuauguguaucauuaaggaggaaguccuggcuuaugugguucaacucccucuguacggcgugaucgacacacccugcuggaaacugcauacgucuccucucuguaccacaaauaccaaggagggguccaacaucugccugacacggaccgaucgcggaugguacugugacaaugccggcagcgucucuuucuuuccccaggcggaaacgugcaaggugcagagcaacagaguuuucugugauacaaugaacuccagaacccugccuucugaggugaaucucugcaaugucgacauuuuuaacccgaaauaugauugcaagaucaugaccagcaaaacagacguguccagcucugucauuaccucccugggggccaucgugagcuguuacggaaagacaaaaugcacggcuucuaauaagaaccggggcauuaucaagaccuucuccaaugggugugauuauguuagcaacaaaggaguggacacagucuccgugggcaauacccuuuacuauguuaacaagcaagagggcaaaucucuguacgugaagggggaacccaucauuaacuuuuaugacccucucgucuuccccagcgaugaguuugacgccuccaucucucaggugaaugagaaaauuaaccagagccuggcuuucauccgcaaguccgaugaacugcuccacaaugugaacgccggaaagagcacaaccaauauuaugaucacgaccauuaucaucguuauuaucgucauucugcuuucucugaucgccgugggccuccugcuguacugcaaagcuagaugaggacuaguaauaaggaaacuguaugaaugucugugggcaggaagugaagagauccuucuguaaagguuuuuggaauuaugucugcugaauaauaaacuuuuuugaaauaauaaaucugguagaaaaaugagaucuaaaaaaaaaaaaaaaaaaaaaaaaaaaaaaaaaaaaaaaaaaaaaaaaaaaaaaaaaaaaaaaaugcaucccccccccccccccccccccccccccccccaaaggcucuuuucagagccaccagaauu

SEQ ID NO: 4546 - RNA, 1982 nt, Artificial Sequence
  mRNA product Design h-4 comprising derived and/or modified sequence from HRSV(A2)__F-del_DSCav1_mut0 (opt6)
gggagagggcgcuuggcuugcaaggacccugagcugcggcauugaagcacacccaacccaacucgacugaagucagccucacugaaccggaucugagaaucuucucucucugggcuugccagggcucuccgaaccuagcuagcauccucuucaauuccaacuagaaagcuuaccauggaauuacucauccucaaagcaaacgcaauaacaacaauacuaacagcagucacuuucugcuucgcauccggacaaaauaucacagaagaauuuuaccaauccaccugcucugcugucuccaaaggauaccuaucugcccucagaaccgguugguauacaucugucauaaccauagaacuaucaaacauuaaagaaaacaaauguaacggaacagacgcaaaagucaaacuuauaaaacaagaauuagacaaauacaaaaacgcagucacagaauuacaacuacuaaugcaaucaaccccagcaaccggaucaggauccgcaauagcuucaggaguagcaguauguaaaguucuacacuuagaaggagaagucaacaaaauuaaauccgcacuauuaucaaccaacaaagcagucguaucuuuaucaaacggaguaucuguacuuacauucaaaguacuagaccuaaaaaauuacauugauaaacaauuacuaccaauacuaaacaaacaaucauguuccaucucuaacauagaaacaguaauagaauuucaacaaaaaaauaacagauuacuugaaaucacccgagaauuuucaguaaacgcaggaguaaccacacccguaucuacauacaugcuaacaaacucugaacuucugagccuaauaaaugacaugccaauaaccaacgaccaaaaaaaacuaauguccaacaacguacaaauaguacgacaacaaucuuacucaaucaugugcauaaucaaagaagaaguacuagcuuauguaguccaacuuccacucuacggaguaauagacacccccugcuggaaacuacacacaucaccacuaugcacaacaaacacaaaagaaggcucaaacauaugccuaacaagaacugacagaggaugguauugugacaaugcaggcucugucucauucuuuccacaagccgaaacaugcaaaguucaaucaaaccgaguuuucugugacacaaugaacucuagaacucucccaucagaagucaacuuaugcaacguugacauauucaacccaaaauaugacuguaaaauaaugacuuccaaaacugauguaucauccuccgucauaacaucccuaggagcuauuguaucauguuacgggaaaaccaaaugcacagccucaaacaaaaaccgcgguaucauaaaaacauuuucaaacggaugugauuacguaagcaauaaaggaguagacaccguaucaguaggaaauacacuauacuauguaaauaaacaagaaggaaaaucacuauaugucaaaggagaaccaaucauaaauuucuaugacccacuuguauucccauccgaugaauuugacgcaagcauuucacaggucaacgaaaaaauaaaccaaucacuagccuucaucagaaaaucagacgaacuacuacauaacguaaacgccggaaaaucaacaaccaacauaaugauaacaacaaucauaauaguuaucauaguaauacuacuaucucuaauagcugucggacucuuacuauauugcaaagcccgauaaggacuaguaauaaggaaacuguaugaaugucugugggcaggaagugaagagauccuucuguaaagguuuuuggaauuaugucugcugaauaauaaacuuuuuugaaauaauaaaucugguagaaaaaugagaucuaaaaaaaaaaaaaaaaaaaaaaaaaaaaaaaaaaaaaaaaaaaaaaaaaaaaaaaaaaaaaaaaugcaucccccccccccccccccccccccccccccccaaaggcucuuuucagagccaccagaauu

SEQ ID NO: 4547 - RNA, 1982 nt, Artificial Sequence
  mRNA product Design h-4 comprising derived and/or modified sequence from HRSV(A2)__F-del_DSCav1_mut0 (opt11)
gggagagggcgcuuggcuugcaaggacccugagcugcggcauugaagcacacccaacccaacucgacugaagucagccucacugaaccggaucugagaaucuucucucucugggcuugccagggcucuccgaaccuagcuagcauccucuucaauuccaacuagaaagcuuaccauggaacuacuaauccugaaagccaacgccauaaccacaauccuuaccgcagucaccuucugcuucgccuccggucaaaacaucacagaagaguucuaccaauccaccuguuccgcagucagcaaaggcuaccucuccgcacuccgaaccggaugguacaccagcgucaucaccaucgaacuauccaacauaaaggaaaauaagugcaaugguacagaugccaaggucaaacucauaaagcaagaacucgacaaauacaaaaacgccgucaccgaacuacaacuacuaaugcaaucuacccccgcaacaggcucagguuccgccauagccuccggcgucgccguuugcaaaguccuccaccucgaaggcgaaguaaacaaaaucaaauccgcccuacucucaaccaacaaagcagucgucucccucucaaacggagucucgguccucaccuucaaaguccucgaccucaaaaacuauauagacaaacaacuccuacccauacucaacaaacaguccugcagcauauccaacaucgaaaccgugaucgaguuccaacagaaaaacaacagacuccucgaaaucacucgagaguucuccguaaacgccggcgucacaaccccagucucaacauacaugcucaccaacagcgaacuccuaucacuaaucaacgacaugccuaucacaaaugaucagaagaaacuaaugagcaacaacguccaaaucguccgccaacaaucauacuccaucaugugcaucauaaaagaagaaguccuagccuacgugguccagcuaccccucuacggcguaauugacaccccuugcuggaaacuacacacuucaccccucugcacaaccaacaccaaagaagguucaaacaucugccucacacgaacagaccgcggcugguacugcgacaacgccggauccguauccuucuucccccaagcagaaaccugcaaaguucaauccaaccggguauucugcgacaccaugaacucaagaacccuucccuccgaaguaaaucuaugcaacgucgacauauucaacccaaaauacgacugcaaaaucaugaccuccaaaaccgaugucuccagcagcgucaucaccagccucggcgccaucgucuccugcuacggcaaaacaaaauguacagcauccaacaaaaaccgaggcauaaucaaaaccuucuccaacgggugcgauuacgucagcaacaaaggcgucgacaccgucuccgugggcaacacccuauacuacgucaacaaacaagaaggcaaaucacuguacguaaagggcgaacccaucaucaacuucuaugacccucugguguucccauccgaugaauuugacgcauccauaucucaggucaacgaaaagaucaaccaaucccucgccuucauacgcaaauccgacgaacuccuacacaacgucaacgcugguaaaagcaccaccaacaucaugaucaccacaaucaucaucgucauaaucguuauccuacucucccuuauagcagucggacuccuccucuacugcaaagcccgcuaaggacuaguaauaaggaaacuguaugaaugucugugggcaggaagugaagagauccuucuguaaagguuuuuggaauuaugucugcugaauaauaaacuuuuuugaaauaauaaaucugguagaaaaaugagaucuaaaaaaaaaaaaaaaaaaaaaaaaaaaaaaaaaaaaaaaaaaaaaaaaaaaaaaaaaaaaaaaaugcaucccccccccccccccccccccccccccccccaaaggcucuuuucagagccaccagaauu

SEQ ID NO: 4548 - RNA, 1998 nt, Artificial Sequence
  mRNA product Design h-5 comprising derived and/or modified sequence from HRSV(A2)__F-del_DSCav1_mut0 (opt1)
gggagagggcgcuuggcuugcaaggacccugagcugcggcauugaagcacacccaacccaacucgacugaagucagccucacugaaccggaucugagaaucuucucucucugggcuugccagggcucuccgaaccuagcuagcauccucuucaauuccaacuagaaagcuuaccauggagcugcucauccugaaggccaacgccaucaccaccauccugacggcggugaccuucugcuucgccagcggccagaacaucaccgaggaguucuaccaguccacgugcagcgccgucuccaagggguaccucagcgcccugcggaccggcugguacaccuccgugaucaccaucgagcugagcaacaucaaggagaacaagugcaacgggaccgacgccaaggugaagcucaucaagcaggagcuggacaaguacaagaacgcggucacggagcugcagcuccugaugcaguccaccccggcaaccggcuccggcuccgccaucgcgagcggcgucgccgugugcaaggugcugcaccucgagggggaggucaacaagaucaagagcgcccugcuguccaccaacaaggccguggugagccucuccaacggcgucagcgugcugaccuucaaggugcuggaccucaagaacuacaucgacaagcagcugcugcccauccugaacaagcagagcugcuccaucagcaacaucgagacggugaucgaguuccagcagaagaacaaccggcuccuggagaucacccgcgaguucagcgugaacgccggggucaccacccccguguccacguacaugcugaccaacagcgagcuccugucccugaucaacgacaugccgaucaccaacgaccagaagaagcucaugagcaacaacgugcagaucguccggcagcaguccuacagcaucaugugcaucaucaaggaggaggugcuggcguacgugguccagcugccccucuacggcgugaucgacacccccugcuggaagcugcacacgagcccccugugcaccaccaacaccaaggagggguccaacaucugccucacgcgcaccgaccggggcugguacugcgacaacgccggcagcgucuccuucuucccgcaggccgagaccugcaaggugcagagcaaccgcguguucugcgacaccaugaacucccggacgcugcccagcgagguaaaccucugcaacgucgacaucuucaaccccaaguacgacugcaagaucaugaccuccaagaccgacgugagcuccagcgugaucaccucccugggggccaucgucagcugcuacggcaagacgaagugcaccgccagcaacaagaaccgggggaucaucaagaccuucuccaacggcugcgacuacgugagcaacaagggcguggacaccguguccgucgggaacacccuguacuacgugaacaagcaggagggcaagagccucuacgugaagggggagcccaucaucaacuucuacgacccgcuggucuuccccuccgacgaguucgacgcgagcaucucccaggugaacgagaagaucaaccagagccuggccuucauccgcaaguccgacgagcugcuccacaacgugaacgccggcaagagcacgaccaacaucaugaucaccaccaucaucaucgucaucaucgugauccugcugucccucaucgccguggggcugcugcucuacugcaaggcccggugaggacuaguacuggcugcaucucccuuuccucuguccuccauccuucucccaggauggugaagggggaccugguacccagugauccccaccccaggauccuaaaucaugacuuaccugcuaauaaaaacucauuggaaaagugagaagaucuaaaaaaaaaaaaaaaaaaaaaaaaaaaaaaaaaaaaaaaaaaaaaaaaaaaaaaaaaaaaaaaaugcaucccccccccccccccccccccccccccccccaaaggcucuuuucagagccaccagaauu

SEQ ID NO: 4549 - RNA, 1998 nt, Artificial Sequence
  mRNA product Design h-5 comprising derived and/or modified sequence from HRSV(A2)__F-del_DSCav1_mut0 (opt1)
gggagagggcgcuuggcuugcaaggacccugagcugcggcauugaagcacacccaacccaacucgacugaagucagccucacugaaccggaucugagaaucuucucucucugggcuugccagggcucuccgaaccuagcuagcauccucuucaauuccaacuagaaagcuuaccauggagcugcucauccugaaggccaacgccaucaccaccauccugacggcggugaccuucugcuucgccagcggccagaacaucaccgaggaguucuaccaguccacgugcagcgccgucuccaagggguaccucagcgcccugcgcaccggcugguacaccuccgugaucaccaucgagcugagcaacaucaaggagaacaagugcaacgggaccgacgccaaggugaagcucaucaagcaggagcuggacaaguacaagaacgcggucacggagcugcagcuccugaugcaguccacccccgccaccggcagcggguccgccaucgccagcggcguggcggugugcaagguccugcaccucgagggcgaggugaacaagaucaaguccgcccugcugagcaccaacaaggccguggucucccucagcaacgggguguccgugcugacguucaagguccuggaccucaagaacuacaucgacaagcagcugcugccgauccucaacaagcagagcugcuccaucagcaacaucgagaccgugaucgaguuccagcagaagaacaaccggcugcuggagaucacccgcgaguucuccgugaacgccggcgucaccacgcccgugagcaccuacaugcucaccaacagcgagcugcugucccucaucaacgacaugcccaucaccaacgaccagaagaagcugaugagcaacaacgugcagaucguccggcagcaguccuacagcaucaugugcaucaucaaggaggaggugcuggccuacgugguccagcucccccuguacggggugaucgacacgccgugcuggaagcugcacaccagcccccucugcaccaccaacacgaaggagggcuccaacaucugccugacccgcaccgaccgggggugguacugcgacaacgcgggcuccgugagcuucuucccccaggccgagaccugcaagguccaguccaaccgcguguucugcgacacgaugaacagccggacccuccccuccgaggucaaccugugcaacguggacaucuucaacccgaaguacgacugcaagaucaugaccagcaagaccgacguguccagcuccgucaucacgagccugggcgccaucguguccugcuacgggaagaccaagugcaccgccagcaacaagaaccggggcaucaucaagaccuucuccaacgggugcgacuacgugagcaacaagggcgucgacacggugagcgugggcaacacccucuacuacgucaacaagcaggaggggaagucccuguacgugaagggcgagcccaucaucaacuucuacgacccccugguguuccccagcgacgaguucgacgccuccaucagccaggucaacgagaagaucaaccagucccucgcguucauccgcaagagcgacgagcugcugcacaacgugaacgccgggaaguccaccaccaacaucaugaucaccacgaucaucaucgugaucaucgucauccuccugagccugaucgccgugggccuccugcuguacugcaaggcccggugaggacuaguacuggcugcaucucccuuuccucuguccuccauccuucucccaggauggugaagggggaccugguacccagugauccccaccccaggauccuaaaucaugacuuaccugcuaauaaaaacucauuggaaaagugagaagaucuaaaaaaaaaaaaaaaaaaaaaaaaaaaaaaaaaaaaaaaaaaaaaaaaaaaaaaaaaaaaaaaaugcaucccccccccccccccccccccccccccccccaaaggcucuuuucagagccaccagaauu

SEQ ID NO: 4550 - RNA, 1998 nt, Artificial Sequence
  mRNA product Design h-5 comprising derived and/or modified sequence from HRSV(A2)__F-del_DSCav1_mut0 (opt2)
gggagagggcgcuuggcuugcaaggacccugagcugcggcauugaagcacacccaacccaacucgacugaagucagccucacugaaccggaucugagaaucuucucucucugggcuugccagggcucuccgaaccuagcuagcauccucuucaauuccaacuagaaagcuuaccauggagcuccucauccucaaggccaacgccaucaccaccauccucaccgccgucaccuucugcuucgccuccggccagaacaucaccgaggaguucuaccaguccaccugcuccgccgucuccaagggcuaccucuccgcccuccgcaccggcugguacaccuccgucaucaccaucgagcucuccaacaucaaggagaacaagugcaacggcaccgacgccaaggucaagcucaucaagcaggagcucgacaaguacaagaacgccgucaccgagcuccagcuccucaugcaguccacccccgccaccggcuccggcuccgccaucgccuccggcgucgccgucugcaagguccuccaccucgagggcgaggucaacaagaucaaguccgcccuccucuccaccaacaaggccgucgucucccucuccaacggcgucuccguccucaccuucaagguccucgaccucaagaacuacaucgacaagcagcuccuccccauccucaacaagcaguccugcuccaucuccaacaucgagaccgucaucgaguuccagcagaagaacaaccgccuccucgagaucacccgcgaguucuccgucaacgccggcgucaccacccccgucuccaccuacaugcucaccaacuccgagcuccucucccucaucaacgacaugcccaucaccaacgaccagaagaagcucauguccaacaacguccagaucguccgccagcaguccuacuccaucaugugcaucaucaaggaggagguccucgccuacgucguccagcucccccucuacggcgucaucgacacccccugcuggaagcuccacaccuccccccucugcaccaccaacaccaaggagggcuccaacaucugccucacccgcaccgaccgcggcugguacugcgacaacgccggcuccgucuccuucuucccccaggccgagaccugcaagguccaguccaaccgcgucuucugcgacaccaugaacucccgcacccuccccuccgaggucaaccucugcaacgucgacaucuucaaccccaaguacgacugcaagaucaugaccuccaagaccgacgucuccuccuccgucaucaccucccucggcgccaucgucuccugcuacggcaagaccaagugcaccgccuccaacaagaaccgcggcaucaucaagaccuucuccaacggcugcgacuacgucuccaacaagggcgucgacaccgucuccgucggcaacacccucuacuacgucaacaagcaggagggcaagucccucuacgucaagggcgagcccaucaucaacuucuacgacccccucgucuuccccuccgacgaguucgacgccuccaucucccaggucaacgagaagaucaaccagucccucgccuucauccgcaaguccgacgagcuccuccacaacgucaacgccggcaaguccaccaccaacaucaugaucaccaccaucaucaucgucaucaucgucauccuccucucccucaucgccgucggccuccuccucuacugcaaggcccgcugaggacuaguacuggcugcaucucccuuuccucuguccuccauccuucucccaggauggugaagggggaccugguacccagugauccccaccccaggauccuaaaucaugacuuaccugcuaauaaaaacucauuggaaaagugagaagaucuaaaaaaaaaaaaaaaaaaaaaaaaaaaaaaaaaaaaaaaaaaaaaaaaaaaaaaaaaaaaaaaaugcaucccccccccccccccccccccccccccccccaaaggcucuuuucagagccaccagaauu

SEQ ID NO: 4551 - RNA, 1998 nt, Artificial Sequence
  mRNA product Design h-5 comprising derived and/or modified sequence from HRSV(A2)__F-del_DSCav1_mut0 (opt3)
gggagagggcgcuuggcuugcaaggacccugagcugcggcauugaagcacacccaacccaacucgacugaagucagccucacugaaccggaucugagaaucuucucucucugggcuugccagggcucuccgaaccuagcuagcauccucuucaauuccaacuagaaagcuuaccauggagcugcucauccuuaaggccaacgcuauuaccacaauacugacugcagugacguucugcuuugccagcggccagaauaucaccgaagaguucuaccaauccacauguucugcggucucaaaaggguauuugagugcuuuaagaacuggaugguacaccagcguuauuacaaucgaacuguccaacauuaaggagaauaaaugcaacgguaccgacgccaaggugaaacuaaucaagcaggaacucgauaaguauaaaaaugcaguaacugagcugcagcuucugaugcagucuacacccgccaccggcucggggucagcuauagcaagcggaguggccgucuguaagguguugcaccucgagggcgaaguuaacaaaaucaagagugcucugcuguccacgaauaaagccguggucucucucagcaacgguguguccguauuaacuuuuaagguucuggaccuuaagaauuacauugauaaacaauugcugccuauccuaaacaagcagucaugcaguauuagcaauaucgagaccgugauagaguuccagcagaaaaacaauaggcuccuggaaauuacacgggaguuuucugucaacgcgggggugacuaccccaguguccacauauaugcuuaccaauucagaacuguugagccucaucaacgacaugccgauuacgaacgaucaaaagaaacugaugaguaauaacguccagaucguucgccagcagucuuacuccaucauguguauuauaaaggaggaaguguuagcauauguagugcaacugccccucuacggagucaucgacacuccuugcuggaaacuucauacaagcccacuguguaccacuaauacaaaggagggcucgaacauuugcuugacccgaacggaucguggcugguacugugacaaugccgggucuguguccuucuuuccccaggcugaaaccugcaagguucagucaaacagaguguucugugauacaaugaauaguagaacucugccuagcgaggucaaccucugcaauguggacaucuuuaacccaaaauaugauugcaagauaaugaccuccaaaacagacguaucuagcucaguuauuaccagucugggagccaucguguccuguuacgguaagacuaaaugcacagcaagcaauaagaacaggggcaucauuaagaccuucucuaaugggugugauuaugucucaaacaaaggaguggacacugucagugugggcaauacgcuuuacuauguuaacaagcaagaggguaaaagccuguacgugaagggggaacccaucauuaacuuuuaugacccuuugguauucccauccgaugaguuugacgcuucuauaucgcaggucaaugagaaaaucaaccagagccucgccuucauucggaaguccgaugaacuguuacacaaugugaacgcgggaaagucaacaaccaauaucaugaucacuaccauuauaaucguuauuaucgugauucugcuaagucucaucgccgucggccugcuuuuguacugcaaagcacgcugaggacuaguacuggcugcaucucccuuuccucuguccuccauccuucucccaggauggugaagggggaccugguacccagugauccccaccccaggauccuaaaucaugacuuaccugcuaauaaaaacucauuggaaaagugagaagaucuaaaaaaaaaaaaaaaaaaaaaaaaaaaaaaaaaaaaaaaaaaaaaaaaaaaaaaaaaaaaaaaaugcaucccccccccccccccccccccccccccccccaaaggcucuuuucagagccaccagaauu

SEQ ID NO: 4552 - RNA, 1998 nt, Artificial Sequence
  mRNA product Design h-5 comprising derived and/or modified sequence from HRSV(A2)__F-del_DSCav1_mut0 (opt4)
gggagagggcgcuuggcuugcaaggacccugagcugcggcauugaagcacacccaacccaacucgacugaagucagccucacugaaccggaucugagaaucuucucucucugggcuugccagggcucuccgaaccuagcuagcauccucuucaauuccaacuagaaagcuuaccauggagcugcugauccugaaggccaacgccaucaccaccauccugaccgccgugaccuucugcuucgccagcggccagaacaucaccgaggaguucuaccagagcaccugcagcgccgugagcaagggcuaccugagcgcccugagaaccggcugguacaccagcgugaucaccaucgagcugagcaacaucaaggagaacaagugcaacggcaccgacgccaaggugaagcugaucaagcaggagcuggacaaguacaagaacgccgugaccgagcugcagcugcugaugcagagcacccccgccaccggcagcggcagcgccaucgccagcggcguggccgugugcaaggugcugcaccuggagggcgaggugaacaagaucaagagcgcccugcugagcaccaacaaggccguggugagccugagcaacggcgugagcgugcugaccuucaaggugcuggaccugaagaacuacaucgacaagcagcugcugcccauccugaacaagcagagcugcagcaucagcaacaucgagaccgugaucgaguuccagcagaagaacaacagacugcuggagaucaccagagaguucagcgugaacgccggcgugaccacccccgugagcaccuacaugcugaccaacagcgagcugcugagccugaucaacgacaugcccaucaccaacgaccagaagaagcugaugagcaacaacgugcagaucgugagacagcagagcuacagcaucaugugcaucaucaaggaggaggugcuggccuacguggugcagcugccccuguacggcgugaucgacacccccugcuggaagcugcacaccagcccccugugcaccaccaacaccaaggagggcagcaacaucugccugaccagaaccgacagaggcugguacugcgacaacgccggcagcgugagcuucuucccccaggccgagaccugcaaggugcagagcaacagaguguucugcgacaccaugaacagcagaacccugcccagcgaggugaaccugugcaacguggacaucuucaaccccaaguacgacugcaagaucaugaccagcaagaccgacgugagcagcagcgugaucaccagccugggcgccaucgugagcugcuacggcaagaccaagugcaccgccagcaacaagaacagaggcaucaucaagaccuucagcaacggcugcgacuacgugagcaacaagggcguggacaccgugagcgugggcaacacccuguacuacgugaacaagcaggagggcaagagccuguacgugaagggcgagcccaucaucaacuucuacgacccccugguguuccccagcgacgaguucgacgccagcaucagccaggugaacgagaagaucaaccagagccuggccuucaucagaaagagcgacgagcugcugcacaacgugaacgccggcaagagcaccaccaacaucaugaucaccaccaucaucaucgugaucaucgugauccugcugagccugaucgccgugggccugcugcuguacugcaaggccagaugaggacuaguacuggcugcaucucccuuuccucuguccuccauccuucucccaggauggugaagggggaccugguacccagugauccccaccccaggauccuaaaucaugacuuaccugcuaauaaaaacucauuggaaaagugagaagaucuaaaaaaaaaaaaaaaaaaaaaaaaaaaaaaaaaaaaaaaaaaaaaaaaaaaaaaaaaaaaaaaaugcaucccccccccccccccccccccccccccccccaaaggcucuuuucagagccaccagaauu

SEQ ID NO: 4553 - RNA, 1998 nt, Artificial Sequence
  mRNA product Design h-5 comprising derived and/or modified sequence from HRSV(A2)__F-del_DSCav1_mut0 (opt5)
gggagagggcgcuuggcuugcaaggacccugagcugcggcauugaagcacacccaacccaacucgacugaagucagccucacugaaccggaucugagaaucuucucucucugggcuugccagggcucuccgaaccuagcuagcauccucuucaauuccaacuagaaagcuuaccauggagcugcucauccugaaggccaacgcuauuaccacaauccuuacggccgugaccuucugcuuugcgagcggccagaauauuacagaagaguucuaccaauccaccuguucugcugucagcaaaggguaucuguccgcccucagaacaggaugguacaccucuguuaucacaauugaacugagcaacaucaaggagaauaaaugcaacggcaccgacgccaaggugaaacuuaucaagcaggaacuggauaaguauaaaaaugcugugacggagcuccagcugcugaugcaguccacccccgccacagggucuggaagcgcuauugccuccggcgucgcgguguguaagguucuccaccuggagggggaagugaacaaaaucaagagcgcccuucugucuaccaauaaagcugucgugucccucagcaacggaguuucugugcugacauuuaagguccuugaccugaagaauuacauugauaaacaacuccugccuauccugaacaagcaguccugcagcauuucuaauaucgagaccgugauugaguuccagcagaaaaacaaucggcuccuggaaaucacgcgcgaguuuuccgugaacgccggcgucacaaccccgguuagcacauauaugcuuaccaauuccgaacugcucucucugaucaacgacaugcccauuaccaacgaucaaaagaaacuuaugagcaauaacgugcagaucgugagacagcaguccuacagcauuauguguaucauuaaggaggaaguccuggcuuaugugguucaacucccucuguacggcgugaucgacacacccugcuggaaacugcauacgucuccucucuguaccacaaauaccaaggagggguccaacaucugccugacacggaccgaucgcggaugguacugugacaaugccggcagcgucucuuucuuuccccaggcggaaacgugcaaggugcagagcaacagaguuuucugugauacaaugaacuccagaacccugccuucugaggugaaucucugcaaugucgacauuuuuaacccgaaauaugauugcaagaucaugaccagcaaaacagacguguccagcucugucauuaccucccugggggccaucgugagcuguuacggaaagacaaaaugcacggcuucuaauaagaaccggggcauuaucaagaccuucuccaaugggugugauuauguuagcaacaaaggaguggacacagucuccgugggcaauacccuuuacuauguuaacaagcaagagggcaaaucucuguacgugaagggggaacccaucauuaacuuuuaugacccucucgucuuccccagcgaugaguuugacgccuccaucucucaggugaaugagaaaauuaaccagagccuggcuuucauccgcaaguccgaugaacugcuccacaaugugaacgccggaaagagcacaaccaauauuaugaucacgaccauuaucaucguuauuaucgucauucugcuuucucugaucgccgugggccuccugcuguacugcaaagcuagaugaggacuaguacuggcugcaucucccuuuccucuguccuccauccuucucccaggauggugaagggggaccugguacccagugauccccaccccaggauccuaaaucaugacuuaccugcuaauaaaaacucauuggaaaagugagaagaucuaaaaaaaaaaaaaaaaaaaaaaaaaaaaaaaaaaaaaaaaaaaaaaaaaaaaaaaaaaaaaaaaugcaucccccccccccccccccccccccccccccccaaaggcucuuuucagagccaccagaauu

SEQ ID NO: 4554 - RNA, 1998 nt, Artificial Sequence
  mRNA product Design h-5 comprising derived and/or modified sequence from HRSV(A2)__F-del_DSCav1_mut0 (opt6)
gggagagggcgcuuggcuugcaaggacccugagcugcggcauugaagcacacccaacccaacucgacugaagucagccucacugaaccggaucugagaaucuucucucucugggcuugccagggcucuccgaaccuagcuagcauccucuucaauuccaacuagaaagcuuaccauggaauuacucauccucaaagcaaacgcaauaacaacaauacuaacagcagucacuuucugcuucgcauccggacaaaauaucacagaagaauuuuaccaauccaccugcucugcugucuccaaaggauaccuaucugcccucagaaccgguugguauacaucugucauaaccauagaacuaucaaacauuaaagaaaacaaauguaacggaacagacgcaaaagucaaacuuauaaaacaagaauuagacaaauacaaaaacgcagucacagaauuacaacuacuaaugcaaucaaccccagcaaccggaucaggauccgcaauagcuucaggaguagcaguauguaaaguucuacacuuagaaggagaagucaacaaaauuaaauccgcacuauuaucaaccaacaaagcagucguaucuuuaucaaacggaguaucuguacuuacauucaaaguacuagaccuaaaaaauuacauugauaaacaauuacuaccaauacuaaacaaacaaucauguuccaucucuaacauagaaacaguaauagaauuucaacaaaaaaauaacagauuacuugaaaucacccgagaauuuucaguaaacgcaggaguaaccacacccguaucuacauacaugcuaacaaacucugaacuucugagccuaauaaaugacaugccaauaaccaacgaccaaaaaaaacuaauguccaacaacguacaaauaguacgacaacaaucuuacucaaucaugugcauaaucaaagaagaaguacuagcuuauguaguccaacuuccacucuacggaguaauagacacccccugcuggaaacuacacacaucaccacuaugcacaacaaacacaaaagaaggcucaaacauaugccuaacaagaacugacagaggaugguauugugacaaugcaggcucugucucauucuuuccacaagccgaaacaugcaaaguucaaucaaaccgaguuuucugugacacaaugaacucuagaacucucccaucagaagucaacuuaugcaacguugacauauucaacccaaaauaugacuguaaaauaaugacuuccaaaacugauguaucauccuccgucauaacaucccuaggagcuauuguaucauguuacgggaaaaccaaaugcacagccucaaacaaaaaccgcgguaucauaaaaacauuuucaaacggaugugauuacguaagcaauaaaggaguagacaccguaucaguaggaaauacacuauacuauguaaauaaacaagaaggaaaaucacuauaugucaaaggagaaccaaucauaaauuucuaugacccacuuguauucccauccgaugaauuugacgcaagcauuucacaggucaacgaaaaaauaaaccaaucacuagccuucaucagaaaaucagacgaacuacuacauaacguaaacgccggaaaaucaacaaccaacauaaugauaacaacaaucauaauaguuaucauaguaauacuacuaucucuaauagcugucggacucuuacuauauugcaaagcccgauaaggacuaguacuggcugcaucucccuuuccucuguccuccauccuucucccaggauggugaagggggaccugguacccagugauccccaccccaggauccuaaaucaugacuuaccugcuaauaaaaacucauuggaaaagugagaagaucuaaaaaaaaaaaaaaaaaaaaaaaaaaaaaaaaaaaaaaaaaaaaaaaaaaaaaaaaaaaaaaaaugcaucccccccccccccccccccccccccccccccaaaggcucuuuucagagccaccagaauu

SEQ ID NO: 4555 - RNA, 1998 nt, Artificial Sequence
  mRNA product Design h-5 comprising derived and/or modified sequence from HRSV(A2)__F-del_DSCav1_mut0 (opt11)
gggagagggcgcuuggcuugcaaggacccugagcugcggcauugaagcacacccaacccaacucgacugaagucagccucacugaaccggaucugagaaucuucucucucugggcuugccagggcucuccgaaccuagcuagcauccucuucaauuccaacuagaaagcuuaccauggaacuacuaauccugaaagccaacgccauaaccacaauccuuaccgcagucaccuucugcuucgccuccggucaaaacaucacagaagaguucuaccaauccaccuguuccgcagucagcaaaggcuaccucuccgcacuccgaaccggaugguacaccagcgucaucaccaucgaacuauccaacauaaaggaaaauaagugcaaugguacagaugccaaggucaaacucauaaagcaagaacucgacaaauacaaaaacgccgucaccgaacuacaacuacuaaugcaaucuacccccgcaacaggcucagguuccgccauagccuccggcgucgccguuugcaaaguccuccaccucgaaggcgaaguaaacaaaaucaaauccgcccuacucucaaccaacaaagcagucgucucccucucaaacggagucucgguccucaccuucaaaguccucgaccucaaaaacuauauagacaaacaacuccuacccauacucaacaaacaguccugcagcauauccaacaucgaaaccgugaucgaguuccaacagaaaaacaacagacuccucgaaaucacucgagaguucuccguaaacgccggcgucacaaccccagucucaacauacaugcucaccaacagcgaacuccuaucacuaaucaacgacaugccuaucacaaaugaucagaagaaacuaaugagcaacaacguccaaaucguccgccaacaaucauacuccaucaugugcaucauaaaagaagaaguccuagccuacgugguccagcuaccccucuacggcguaauugacaccccuugcuggaaacuacacacuucaccccucugcacaaccaacaccaaagaagguucaaacaucugccucacacgaacagaccgcggcugguacugcgacaacgccggauccguauccuucuucccccaagcagaaaccugcaaaguucaauccaaccggguauucugcgacaccaugaacucaagaacccuucccuccgaaguaaaucuaugcaacgucgacauauucaacccaaaauacgacugcaaaaucaugaccuccaaaaccgaugucuccagcagcgucaucaccagccucggcgccaucgucuccugcuacggcaaaacaaaauguacagcauccaacaaaaaccgaggcauaaucaaaaccuucuccaacgggugcgauuacgucagcaacaaaggcgucgacaccgucuccgugggcaacacccuauacuacgucaacaaacaagaaggcaaaucacuguacguaaagggcgaacccaucaucaacuucuaugacccucugguguucccauccgaugaauuugacgcauccauaucucaggucaacgaaaagaucaaccaaucccucgccuucauacgcaaauccgacgaacuccuacacaacgucaacgcugguaaaagcaccaccaacaucaugaucaccacaaucaucaucgucauaaucguuauccuacucucccuuauagcagucggacuccuccucuacugcaaagcccgcuaaggacuaguacuggcugcaucucccuuuccucuguccuccauccuucucccaggauggugaagggggaccugguacccagugauccccaccccaggauccuaaaucaugacuuaccugcuaauaaaaacucauuggaaaagugagaagaucuaaaaaaaaaaaaaaaaaaaaaaaaaaaaaaaaaaaaaaaaaaaaaaaaaaaaaaaaaaaaaaaaugcaucccccccccccccccccccccccccccccccaaaggcucuuuucagagccaccagaauu

SEQ ID NO: 4556 - RNA, 1931 nt, Artificial Sequence
  mRNA product Design i-1 comprising derived and/or modified sequence from HRSV(A2)__F-del_DSCav1_mut0 (opt1)
gggagagggcgcuuggcuugcaaggacccugagcugcggcauugaagcacacccaacccaacucgacugaagucagccucacugaaccggaucugagaaucuucucucucugggcuugccagggcucuccgaaccuagcuagcauccucuucaauuccaacuagaaagcuuaccauggagcugcucauccugaaggccaacgccaucaccaccauccugacggcggugaccuucugcuucgccagcggccagaacaucaccgaggaguucuaccaguccacgugcagcgccgucuccaagggguaccucagcgcccugcggaccggcugguacaccuccgugaucaccaucgagcugagcaacaucaaggagaacaagugcaacgggaccgacgccaaggugaagcucaucaagcaggagcuggacaaguacaagaacgcggucacggagcugcagcuccugaugcaguccaccccggcaaccggcuccggcuccgccaucgcgagcggcgucgccgugugcaaggugcugcaccucgagggggaggucaacaagaucaagagcgcccugcuguccaccaacaaggccguggugagccucuccaacggcgucagcgugcugaccuucaaggugcuggaccucaagaacuacaucgacaagcagcugcugcccauccugaacaagcagagcugcuccaucagcaacaucgagacggugaucgaguuccagcagaagaacaaccggcuccuggagaucacccgcgaguucagcgugaacgccggggucaccacccccguguccacguacaugcugaccaacagcgagcuccugucccugaucaacgacaugccgaucaccaacgaccagaagaagcucaugagcaacaacgugcagaucguccggcagcaguccuacagcaucaugugcaucaucaaggaggaggugcuggcguacgugguccagcugccccucuacggcgugaucgacacccccugcuggaagcugcacacgagcccccugugcaccaccaacaccaaggagggguccaacaucugccucacgcgcaccgaccggggcugguacugcgacaacgccggcagcgucuccuucuucccgcaggccgagaccugcaaggugcagagcaaccgcguguucugcgacaccaugaacucccggacgcugcccagcgagguaaaccucugcaacgucgacaucuucaaccccaaguacgacugcaagaucaugaccuccaagaccgacgugagcuccagcgugaucaccucccugggggccaucgucagcugcuacggcaagacgaagugcaccgccagcaacaagaaccgggggaucaucaagaccuucuccaacggcugcgacuacgugagcaacaagggcguggacaccguguccgucgggaacacccuguacuacgugaacaagcaggagggcaagagccucuacgugaagggggagcccaucaucaacuucuacgacccgcuggucuuccccuccgacgaguucgacgcgagcaucucccaggugaacgagaagaucaaccagagccuggccuucauccgcaaguccgacgagcugcuccacaacgugaacgccggcaagagcacgaccaacaucaugaucaccaccaucaucaucgucaucaucgugauccugcugucccucaucgccguggggcugcugcucuacugcaaggcccggugaggacuaguguccaccugucccuccugggcugcuggauugucucguuuuccugccaaauaaacaggaucagcgcuuuacagaucuaaaaaaaaaaaaaaaaaaaaaaaaaaaaaaaaaaaaaaaaaaaaaaaaaaaaaaaaaaaaaaaaugcaucccccccccccccccccccccccccccccccaaaggcucuuuucagagccaccagaauu

SEQ ID NO: 4557 - RNA, 1931 nt, Artificial Sequence
  mRNA product Design i-1 comprising derived and/or modified sequence from HRSV(A2)__F-del_DSCav1_mut0 (opt1)
gggagagggcgcuuggcuugcaaggacccugagcugcggcauugaagcacacccaacccaacucgacugaagucagccucacugaaccggaucugagaaucuucucucucugggcuugccagggcucuccgaaccuagcuagcauccucuucaauuccaacuagaaagcuuaccauggagcugcucauccugaaggccaacgccaucaccaccauccugacggcggugaccuucugcuucgccagcggccagaacaucaccgaggaguucuaccaguccacgugcagcgccgucuccaagggguaccucagcgcccugcgcaccggcugguacaccuccgugaucaccaucgagcugagcaacaucaaggagaacaagugcaacgggaccgacgccaaggugaagcucaucaagcaggagcuggacaaguacaagaacgcggucacggagcugcagcuccugaugcaguccacccccgccaccggcagcggguccgccaucgccagcggcguggcggugugcaagguccugcaccucgagggcgaggugaacaagaucaaguccgcccugcugagcaccaacaaggccguggucucccucagcaacgggguguccgugcugacguucaagguccuggaccucaagaacuacaucgacaagcagcugcugccgauccucaacaagcagagcugcuccaucagcaacaucgagaccgugaucgaguuccagcagaagaacaaccggcugcuggagaucacccgcgaguucuccgugaacgccggcgucaccacgcccgugagcaccuacaugcucaccaacagcgagcugcugucccucaucaacgacaugcccaucaccaacgaccagaagaagcugaugagcaacaacgugcagaucguccggcagcaguccuacagcaucaugugcaucaucaaggaggaggugcuggccuacgugguccagcucccccuguacggggugaucgacacgccgugcuggaagcugcacaccagcccccucugcaccaccaacacgaaggagggcuccaacaucugccugacccgcaccgaccgggggugguacugcgacaacgcgggcuccgugagcuucuucccccaggccgagaccugcaagguccaguccaaccgcguguucugcgacacgaugaacagccggacccuccccuccgaggucaaccugugcaacguggacaucuucaacccgaaguacgacugcaagaucaugaccagcaagaccgacguguccagcuccgucaucacgagccugggcgccaucguguccugcuacgggaagaccaagugcaccgccagcaacaagaaccggggcaucaucaagaccuucuccaacgggugcgacuacgugagcaacaagggcgucgacacggugagcgugggcaacacccucuacuacgucaacaagcaggaggggaagucccuguacgugaagggcgagcccaucaucaacuucuacgacccccugguguuccccagcgacgaguucgacgccuccaucagccaggucaacgagaagaucaaccagucccucgcguucauccgcaagagcgacgagcugcugcacaacgugaacgccgggaaguccaccaccaacaucaugaucaccacgaucaucaucgugaucaucgucauccuccugagccugaucgccgugggccuccugcuguacugcaaggcccggugaggacuaguguccaccugucccuccugggcugcuggauugucucguuuuccugccaaauaaacaggaucagcgcuuuacagaucuaaaaaaaaaaaaaaaaaaaaaaaaaaaaaaaaaaaaaaaaaaaaaaaaaaaaaaaaaaaaaaaaugcaucccccccccccccccccccccccccccccccaaaggcucuuuucagagccaccagaauu

SEQ ID NO: 4558 - RNA, 1931 nt, Artificial Sequence
  mRNA product Design i-1 comprising derived and/or modified sequence from HRSV(A2)__F-del_DSCav1_mut0 (opt2)
gggagagggcgcuuggcuugcaaggacccugagcugcggcauugaagcacacccaacccaacucgacugaagucagccucacugaaccggaucugagaaucuucucucucugggcuugccagggcucuccgaaccuagcuagcauccucuucaauuccaacuagaaagcuuaccauggagcuccucauccucaaggccaacgccaucaccaccauccucaccgccgucaccuucugcuucgccuccggccagaacaucaccgaggaguucuaccaguccaccugcuccgccgucuccaagggcuaccucuccgcccuccgcaccggcugguacaccuccgucaucaccaucgagcucuccaacaucaaggagaacaagugcaacggcaccgacgccaaggucaagcucaucaagcaggagcucgacaaguacaagaacgccgucaccgagcuccagcuccucaugcaguccacccccgccaccggcuccggcuccgccaucgccuccggcgucgccgucugcaagguccuccaccucgagggcgaggucaacaagaucaaguccgcccuccucuccaccaacaaggccgucgucucccucuccaacggcgucuccguccucaccuucaagguccucgaccucaagaacuacaucgacaagcagcuccuccccauccucaacaagcaguccugcuccaucuccaacaucgagaccgucaucgaguuccagcagaagaacaaccgccuccucgagaucacccgcgaguucuccgucaacgccggcgucaccacccccgucuccaccuacaugcucaccaacuccgagcuccucucccucaucaacgacaugcccaucaccaacgaccagaagaagcucauguccaacaacguccagaucguccgccagcaguccuacuccaucaugugcaucaucaaggaggagguccucgccuacgucguccagcucccccucuacggcgucaucgacacccccugcuggaagcuccacaccuccccccucugcaccaccaacaccaaggagggcuccaacaucugccucacccgcaccgaccgcggcugguacugcgacaacgccggcuccgucuccuucuucccccaggccgagaccugcaagguccaguccaaccgcgucuucugcgacaccaugaacucccgcacccuccccuccgaggucaaccucugcaacgucgacaucuucaaccccaaguacgacugcaagaucaugaccuccaagaccgacgucuccuccuccgucaucaccucccucggcgccaucgucuccugcuacggcaagaccaagugcaccgccuccaacaagaaccgcggcaucaucaagaccuucuccaacggcugcgacuacgucuccaacaagggcgucgacaccgucuccgucggcaacacccucuacuacgucaacaagcaggagggcaagucccucuacgucaagggcgagcccaucaucaacuucuacgacccccucgucuuccccuccgacgaguucgacgccuccaucucccaggucaacgagaagaucaaccagucccucgccuucauccgcaaguccgacgagcuccuccacaacgucaacgccggcaaguccaccaccaacaucaugaucaccaccaucaucaucgucaucaucgucauccuccucucccucaucgccgucggccuccuccucuacugcaaggcccgcugaggacuaguguccaccugucccuccugggcugcuggauugucucguuuuccugccaaauaaacaggaucagcgcuuuacagaucuaaaaaaaaaaaaaaaaaaaaaaaaaaaaaaaaaaaaaaaaaaaaaaaaaaaaaaaaaaaaaaaaugcaucccccccccccccccccccccccccccccccaaaggcucuuuucagagccaccagaauu

SEQ ID NO: 4559 - RNA, 1931 nt, Artificial Sequence
  mRNA product Design i-1 comprising derived and/or modified sequence from HRSV(A2)__F-del_DSCav1_mut0 (opt3)
gggagagggcgcuuggcuugcaaggacccugagcugcggcauugaagcacacccaacccaacucgacugaagucagccucacugaaccggaucugagaaucuucucucucugggcuugccagggcucuccgaaccuagcuagcauccucuucaauuccaacuagaaagcuuaccauggagcugcucauccuuaaggccaacgcuauuaccacaauacugacugcagugacguucugcuuugccagcggccagaauaucaccgaagaguucuaccaauccacauguucugcggucucaaaaggguauuugagugcuuuaagaacuggaugguacaccagcguuauuacaaucgaacuguccaacauuaaggagaauaaaugcaacgguaccgacgccaaggugaaacuaaucaagcaggaacucgauaaguauaaaaaugcaguaacugagcugcagcuucugaugcagucuacacccgccaccggcucggggucagcuauagcaagcggaguggccgucuguaagguguugcaccucgagggcgaaguuaacaaaaucaagagugcucugcuguccacgaauaaagccguggucucucucagcaacgguguguccguauuaacuuuuaagguucuggaccuuaagaauuacauugauaaacaauugcugccuauccuaaacaagcagucaugcaguauuagcaauaucgagaccgugauagaguuccagcagaaaaacaauaggcuccuggaaauuacacgggaguuuucugucaacgcgggggugacuaccccaguguccacauauaugcuuaccaauucagaacuguugagccucaucaacgacaugccgauuacgaacgaucaaaagaaacugaugaguaauaacguccagaucguucgccagcagucuuacuccaucauguguauuauaaaggaggaaguguuagcauauguagugcaacugccccucuacggagucaucgacacuccuugcuggaaacuucauacaagcccacuguguaccacuaauacaaaggagggcucgaacauuugcuugacccgaacggaucguggcugguacugugacaaugccgggucuguguccuucuuuccccaggcugaaaccugcaagguucagucaaacagaguguucugugauacaaugaauaguagaacucugccuagcgaggucaaccucugcaauguggacaucuuuaacccaaaauaugauugcaagauaaugaccuccaaaacagacguaucuagcucaguuauuaccagucugggagccaucguguccuguuacgguaagacuaaaugcacagcaagcaauaagaacaggggcaucauuaagaccuucucuaaugggugugauuaugucucaaacaaaggaguggacacugucagugugggcaauacgcuuuacuauguuaacaagcaagaggguaaaagccuguacgugaagggggaacccaucauuaacuuuuaugacccuuugguauucccauccgaugaguuugacgcuucuauaucgcaggucaaugagaaaaucaaccagagccucgccuucauucggaaguccgaugaacuguuacacaaugugaacgcgggaaagucaacaaccaauaucaugaucacuaccauuauaaucguuauuaucgugauucugcuaagucucaucgccgucggccugcuuuuguacugcaaagcacgcugaggacuaguguccaccugucccuccugggcugcuggauugucucguuuuccugccaaauaaacaggaucagcgcuuuacagaucuaaaaaaaaaaaaaaaaaaaaaaaaaaaaaaaaaaaaaaaaaaaaaaaaaaaaaaaaaaaaaaaaugcaucccccccccccccccccccccccccccccccaaaggcucuuuucagagccaccagaauu

SEQ ID NO: 4560 - RNA, 1931 nt, Artificial Sequence
  mRNA product Design i-1 comprising derived and/or modified sequence from HRSV(A2)__F-del_DSCav1_mut0 (opt4)
gggagagggcgcuuggcuugcaaggacccugagcugcggcauugaagcacacccaacccaacucgacugaagucagccucacugaaccggaucugagaaucuucucucucugggcuugccagggcucuccgaaccuagcuagcauccucuucaauuccaacuagaaagcuuaccauggagcugcugauccugaaggccaacgccaucaccaccauccugaccgccgugaccuucugcuucgccagcggccagaacaucaccgaggaguucuaccagagcaccugcagcgccgugagcaagggcuaccugagcgcccugagaaccggcugguacaccagcgugaucaccaucgagcugagcaacaucaaggagaacaagugcaacggcaccgacgccaaggugaagcugaucaagcaggagcuggacaaguacaagaacgccgugaccgagcugcagcugcugaugcagagcacccccgccaccggcagcggcagcgccaucgccagcggcguggccgugugcaaggugcugcaccuggagggcgaggugaacaagaucaagagcgcccugcugagcaccaacaaggccguggugagccugagcaacggcgugagcgugcugaccuucaaggugcuggaccugaagaacuacaucgacaagcagcugcugcccauccugaacaagcagagcugcagcaucagcaacaucgagaccgugaucgaguuccagcagaagaacaacagacugcuggagaucaccagagaguucagcgugaacgccggcgugaccacccccgugagcaccuacaugcugaccaacagcgagcugcugagccugaucaacgacaugcccaucaccaacgaccagaagaagcugaugagcaacaacgugcagaucgugagacagcagagcuacagcaucaugugcaucaucaaggaggaggugcuggccuacguggugcagcugccccuguacggcgugaucgacacccccugcuggaagcugcacaccagcccccugugcaccaccaacaccaaggagggcagcaacaucugccugaccagaaccgacagaggcugguacugcgacaacgccggcagcgugagcuucuucccccaggccgagaccugcaaggugcagagcaacagaguguucugcgacaccaugaacagcagaacccugcccagcgaggugaaccugugcaacguggacaucuucaaccccaaguacgacugcaagaucaugaccagcaagaccgacgugagcagcagcgugaucaccagccugggcgccaucgugagcugcuacggcaagaccaagugcaccgccagcaacaagaacagaggcaucaucaagaccuucagcaacggcugcgacuacgugagcaacaagggcguggacaccgugagcgugggcaacacccuguacuacgugaacaagcaggagggcaagagccuguacgugaagggcgagcccaucaucaacuucuacgacccccugguguuccccagcgacgaguucgacgccagcaucagccaggugaacgagaagaucaaccagagccuggccuucaucagaaagagcgacgagcugcugcacaacgugaacgccggcaagagcaccaccaacaucaugaucaccaccaucaucaucgugaucaucgugauccugcugagccugaucgccgugggccugcugcuguacugcaaggccagaugaggacuaguguccaccugucccuccugggcugcuggauugucucguuuuccugccaaauaaacaggaucagcgcuuuacagaucuaaaaaaaaaaaaaaaaaaaaaaaaaaaaaaaaaaaaaaaaaaaaaaaaaaaaaaaaaaaaaaaaugcaucccccccccccccccccccccccccccccccaaaggcucuuuucagagccaccagaauu

SEQ ID NO: 4561 - RNA, 1931 nt, Artificial Sequence
  mRNA product Design i-1 comprising derived and/or modified sequence from HRSV(A2)__F-del_DSCav1_mut0 (opt5)
gggagagggcgcuuggcuugcaaggacccugagcugcggcauugaagcacacccaacccaacucgacugaagucagccucacugaaccggaucugagaaucuucucucucugggcuugccagggcucuccgaaccuagcuagcauccucuucaauuccaacuagaaagcuuaccauggagcugcucauccugaaggccaacgcuauuaccacaauccuuacggccgugaccuucugcuuugcgagcggccagaauauuacagaagaguucuaccaauccaccuguucugcugucagcaaaggguaucuguccgcccucagaacaggaugguacaccucuguuaucacaauugaacugagcaacaucaaggagaauaaaugcaacggcaccgacgccaaggugaaacuuaucaagcaggaacuggauaaguauaaaaaugcugugacggagcuccagcugcugaugcaguccacccccgccacagggucuggaagcgcuauugccuccggcgucgcgguguguaagguucuccaccuggagggggaagugaacaaaaucaagagcgcccuucugucuaccaauaaagcugucgugucccucagcaacggaguuucugugcugacauuuaagguccuugaccugaagaauuacauugauaaacaacuccugccuauccugaacaagcaguccugcagcauuucuaauaucgagaccgugauugaguuccagcagaaaaacaaucggcuccuggaaaucacgcgcgaguuuuccgugaacgccggcgucacaaccccgguuagcacauauaugcuuaccaauuccgaacugcucucucugaucaacgacaugcccauuaccaacgaucaaaagaaacuuaugagcaauaacgugcagaucgugagacagcaguccuacagcauuauguguaucauuaaggaggaaguccuggcuuaugugguucaacucccucuguacggcgugaucgacacacccugcuggaaacugcauacgucuccucucuguaccacaaauaccaaggagggguccaacaucugccugacacggaccgaucgcggaugguacugugacaaugccggcagcgucucuuucuuuccccaggcggaaacgugcaaggugcagagcaacagaguuuucugugauacaaugaacuccagaacccugccuucugaggugaaucucugcaaugucgacauuuuuaacccgaaauaugauugcaagaucaugaccagcaaaacagacguguccagcucugucauuaccucccugggggccaucgugagcuguuacggaaagacaaaaugcacggcuucuaauaagaaccggggcauuaucaagaccuucuccaaugggugugauuauguuagcaacaaaggaguggacacagucuccgugggcaauacccuuuacuauguuaacaagcaagagggcaaaucucuguacgugaagggggaacccaucauuaacuuuuaugacccucucgucuuccccagcgaugaguuugacgccuccaucucucaggugaaugagaaaauuaaccagagccuggcuuucauccgcaaguccgaugaacugcuccacaaugugaacgccggaaagagcacaaccaauauuaugaucacgaccauuaucaucguuauuaucgucauucugcuuucucugaucgccgugggccuccugcuguacugcaaagcuagaugaggacuaguguccaccugucccuccugggcugcuggauugucucguuuuccugccaaauaaacaggaucagcgcuuuacagaucuaaaaaaaaaaaaaaaaaaaaaaaaaaaaaaaaaaaaaaaaaaaaaaaaaaaaaaaaaaaaaaaaugcaucccccccccccccccccccccccccccccccaaaggcucuuuucagagccaccagaauu

SEQ ID NO: 4562 - RNA, 1931 nt, Artificial Sequence
  mRNA product Design i-1 comprising derived and/or modified sequence from HRSV(A2)__F-del_DSCav1_mut0 (opt6)
gggagagggcgcuuggcuugcaaggacccugagcugcggcauugaagcacacccaacccaacucgacugaagucagccucacugaaccggaucugagaaucuucucucucugggcuugccagggcucuccgaaccuagcuagcauccucuucaauuccaacuagaaagcuuaccauggaauuacucauccucaaagcaaacgcaauaacaacaauacuaacagcagucacuuucugcuucgcauccggacaaaauaucacagaagaauuuuaccaauccaccugcucugcugucuccaaaggauaccuaucugcccucagaaccgguugguauacaucugucauaaccauagaacuaucaaacauuaaagaaaacaaauguaacggaacagacgcaaaagucaaacuuauaaaacaagaauuagacaaauacaaaaacgcagucacagaauuacaacuacuaaugcaaucaaccccagcaaccggaucaggauccgcaauagcuucaggaguagcaguauguaaaguucuacacuuagaaggagaagucaacaaaauuaaauccgcacuauuaucaaccaacaaagcagucguaucuuuaucaaacggaguaucuguacuuacauucaaaguacuagaccuaaaaaauuacauugauaaacaauuacuaccaauacuaaacaaacaaucauguuccaucucuaacauagaaacaguaauagaauuucaacaaaaaaauaacagauuacuugaaaucacccgagaauuuucaguaaacgcaggaguaaccacacccguaucuacauacaugcuaacaaacucugaacuucugagccuaauaaaugacaugccaauaaccaacgaccaaaaaaaacuaauguccaacaacguacaaauaguacgacaacaaucuuacucaaucaugugcauaaucaaagaagaaguacuagcuuauguaguccaacuuccacucuacggaguaauagacacccccugcuggaaacuacacacaucaccacuaugcacaacaaacacaaaagaaggcucaaacauaugccuaacaagaacugacagaggaugguauugugacaaugcaggcucugucucauucuuuccacaagccgaaacaugcaaaguucaaucaaaccgaguuuucugugacacaaugaacucuagaacucucccaucagaagucaacuuaugcaacguugacauauucaacccaaaauaugacuguaaaauaaugacuuccaaaacugauguaucauccuccgucauaacaucccuaggagcuauuguaucauguuacgggaaaaccaaaugcacagccucaaacaaaaaccgcgguaucauaaaaacauuuucaaacggaugugauuacguaagcaauaaaggaguagacaccguaucaguaggaaauacacuauacuauguaaauaaacaagaaggaaaaucacuauaugucaaaggagaaccaaucauaaauuucuaugacccacuuguauucccauccgaugaauuugacgcaagcauuucacaggucaacgaaaaaauaaaccaaucacuagccuucaucagaaaaucagacgaacuacuacauaacguaaacgccggaaaaucaacaaccaacauaaugauaacaacaaucauaauaguuaucauaguaauacuacuaucucuaauagcugucggacucuuacuauauugcaaagcccgauaaggacuaguguccaccugucccuccugggcugcuggauugucucguuuuccugccaaauaaacaggaucagcgcuuuacagaucuaaaaaaaaaaaaaaaaaaaaaaaaaaaaaaaaaaaaaaaaaaaaaaaaaaaaaaaaaaaaaaaaugcaucccccccccccccccccccccccccccccccaaaggcucuuuucagagccaccagaauu

SEQ ID NO: 4563 - RNA, 1931 nt, Artificial Sequence
  mRNA product Design i-1 comprising derived and/or modified sequence from HRSV(A2)__F-del_DSCav1_mut0 (opt11)
gggagagggcgcuuggcuugcaaggacccugagcugcggcauugaagcacacccaacccaacucgacugaagucagccucacugaaccggaucugagaaucuucucucucugggcuugccagggcucuccgaaccuagcuagcauccucuucaauuccaacuagaaagcuuaccauggaacuacuaauccugaaagccaacgccauaaccacaauccuuaccgcagucaccuucugcuucgccuccggucaaaacaucacagaagaguucuaccaauccaccuguuccgcagucagcaaaggcuaccucuccgcacuccgaaccggaugguacaccagcgucaucaccaucgaacuauccaacauaaaggaaaauaagugcaaugguacagaugccaaggucaaacucauaaagcaagaacucgacaaauacaaaaacgccgucaccgaacuacaacuacuaaugcaaucuacccccgcaacaggcucagguuccgccauagccuccggcgucgccguuugcaaaguccuccaccucgaaggcgaaguaaacaaaaucaaauccgcccuacucucaaccaacaaagcagucgucucccucucaaacggagucucgguccucaccuucaaaguccucgaccucaaaaacuauauagacaaacaacuccuacccauacucaacaaacaguccugcagcauauccaacaucgaaaccgugaucgaguuccaacagaaaaacaacagacuccucgaaaucacucgagaguucuccguaaacgccggcgucacaaccccagucucaacauacaugcucaccaacagcgaacuccuaucacuaaucaacgacaugccuaucacaaaugaucagaagaaacuaaugagcaacaacguccaaaucguccgccaacaaucauacuccaucaugugcaucauaaaagaagaaguccuagccuacgugguccagcuaccccucuacggcguaauugacaccccuugcuggaaacuacacacuucaccccucugcacaaccaacaccaaagaagguucaaacaucugccucacacgaacagaccgcggcugguacugcgacaacgccggauccguauccuucuucccccaagcagaaaccugcaaaguucaauccaaccggguauucugcgacaccaugaacucaagaacccuucccuccgaaguaaaucuaugcaacgucgacauauucaacccaaaauacgacugcaaaaucaugaccuccaaaaccgaugucuccagcagcgucaucaccagccucggcgccaucgucuccugcuacggcaaaacaaaauguacagcauccaacaaaaaccgaggcauaaucaaaaccuucuccaacgggugcgauuacgucagcaacaaaggcgucgacaccgucuccgugggcaacacccuauacuacgucaacaaacaagaaggcaaaucacuguacguaaagggcgaacccaucaucaacuucuaugacccucugguguucccauccgaugaauuugacgcauccauaucucaggucaacgaaaagaucaaccaaucccucgccuucauacgcaaauccgacgaacuccuacacaacgucaacgcugguaaaagcaccaccaacaucaugaucaccacaaucaucaucgucauaaucguuauccuacucucccuuauagcagucggacuccuccucuacugcaaagcccgcuaaggacuaguguccaccugucccuccugggcugcuggauugucucguuuuccugccaaauaaacaggaucagcgcuuuacagaucuaaaaaaaaaaaaaaaaaaaaaaaaaaaaaaaaaaaaaaaaaaaaaaaaaaaaaaaaaaaaaaaaugcaucccccccccccccccccccccccccccccccaaaggcucuuuucagagccaccagaauu

SEQ ID NO: 4564 - RNA, 1931 nt, Artificial Sequence
  mRNA product Design i-2 comprising derived and/or modified sequence from HRSV(A2)__F-del_DSCav1_mut0 (opt1)
gggagaggcgcugccuacggagguggcagccaucuccuucucggcaucaagcuuaccauggagcugcucauccugaaggccaacgccaucaccaccauccugacggcggugaccuucugcuucgccagcggccagaacaucaccgaggaguucuaccaguccacgugcagcgccgucuccaagggguaccucagcgcccugcggaccggcugguacaccuccgugaucaccaucgagcugagcaacaucaaggagaacaagugcaacgggaccgacgccaaggugaagcucaucaagcaggagcuggacaaguacaagaacgcggucacggagcugcagcuccugaugcaguccaccccggcaaccggcuccggcuccgccaucgcgagcggcgucgccgugugcaaggugcugcaccucgagggggaggucaacaagaucaagagcgcccugcuguccaccaacaaggccguggugagccucuccaacggcgucagcgugcugaccuucaaggugcuggaccucaagaacuacaucgacaagcagcugcugcccauccugaacaagcagagcugcuccaucagcaacaucgagacggugaucgaguuccagcagaagaacaaccggcuccuggagaucacccgcgaguucagcgugaacgccggggucaccacccccguguccacguacaugcugaccaacagcgagcuccugucccugaucaacgacaugccgaucaccaacgaccagaagaagcucaugagcaacaacgugcagaucguccggcagcaguccuacagcaucaugugcaucaucaaggaggaggugcuggcguacgugguccagcugccccucuacggcgugaucgacacccccugcuggaagcugcacacgagcccccugugcaccaccaacaccaaggagggguccaacaucugccucacgcgcaccgaccggggcugguacugcgacaacgccggcagcgucuccuucuucccgcaggccgagaccugcaaggugcagagcaaccgcguguucugcgacaccaugaacucccggacgcugcccagcgagguaaaccucugcaacgucgacaucuucaaccccaaguacgacugcaagaucaugaccuccaagaccgacgugagcuccagcgugaucaccucccugggggccaucgucagcugcuacggcaagacgaagugcaccgccagcaacaagaaccgggggaucaucaagaccuucuccaacggcugcgacuacgugagcaacaagggcguggacaccguguccgucgggaacacccuguacuacgugaacaagcaggagggcaagagccucuacgugaagggggagcccaucaucaacuucuacgacccgcuggucuuccccuccgacgaguucgacgcgagcaucucccaggugaacgagaagaucaaccagagccuggccuucauccgcaaguccgacgagcugcuccacaacgugaacgccggcaagagcacgaccaacaucaugaucaccaccaucaucaucgucaucaucgugauccugcugucccucaucgccguggggcugcugcucuacugcaaggcccggugaggacuagugcaucacauuuaaaagcaucucagccuaccaugagaauaagagaaagaaaaugaagaucaauagcuuauucaucucuuuuucuuuuucguugguguaaagccaacacccugucuaaaaaacauaaauuucuuuaaucauuuugccucuuuucucugugcuucaauuaauaaaaaauggaaagaaccuagaucuaaaaaaaaaaaaaaaaaaaaaaaaaaaaaaaaaaaaaaaaaaaaaaaaaaaaaaaaaaaaaaaaugcaucccccccccccccccccccccccccccccccaaaggcucuuuucagagccaccagaauu

SEQ ID NO: 4565 - RNA, 1931 nt, Artificial Sequence
  mRNA product Design i-2 comprising derived and/or modified sequence from HRSV(A2)__F-del_DSCav1_mut0 (opt1)
gggagaggcgcugccuacggagguggcagccaucuccuucucggcaucaagcuuaccauggagcugcucauccugaaggccaacgccaucaccaccauccugacggcggugaccuucugcuucgccagcggccagaacaucaccgaggaguucuaccaguccacgugcagcgccgucuccaagggguaccucagcgcccugcgcaccggcugguacaccuccgugaucaccaucgagcugagcaacaucaaggagaacaagugcaacgggaccgacgccaaggugaagcucaucaagcaggagcuggacaaguacaagaacgcggucacggagcugcagcuccugaugcaguccacccccgccaccggcagcggguccgccaucgccagcggcguggcggugugcaagguccugcaccucgagggcgaggugaacaagaucaaguccgcccugcugagcaccaacaaggccguggucucccucagcaacgggguguccgugcugacguucaagguccuggaccucaagaacuacaucgacaagcagcugcugccgauccucaacaagcagagcugcuccaucagcaacaucgagaccgugaucgaguuccagcagaagaacaaccggcugcuggagaucacccgcgaguucuccgugaacgccggcgucaccacgcccgugagcaccuacaugcucaccaacagcgagcugcugucccucaucaacgacaugcccaucaccaacgaccagaagaagcugaugagcaacaacgugcagaucguccggcagcaguccuacagcaucaugugcaucaucaaggaggaggugcuggccuacgugguccagcucccccuguacggggugaucgacacgccgugcuggaagcugcacaccagcccccucugcaccaccaacacgaaggagggcuccaacaucugccugacccgcaccgaccgggggugguacugcgacaacgcgggcuccgugagcuucuucccccaggccgagaccugcaagguccaguccaaccgcguguucugcgacacgaugaacagccggacccuccccuccgaggucaaccugugcaacguggacaucuucaacccgaaguacgacugcaagaucaugaccagcaagaccgacguguccagcuccgucaucacgagccugggcgccaucguguccugcuacgggaagaccaagugcaccgccagcaacaagaaccggggcaucaucaagaccuucuccaacgggugcgacuacgugagcaacaagggcgucgacacggugagcgugggcaacacccucuacuacgucaacaagcaggaggggaagucccuguacgugaagggcgagcccaucaucaacuucuacgacccccugguguuccccagcgacgaguucgacgccuccaucagccaggucaacgagaagaucaaccagucccucgcguucauccgcaagagcgacgagcugcugcacaacgugaacgccgggaaguccaccaccaacaucaugaucaccacgaucaucaucgugaucaucgucauccuccugagccugaucgccgugggccuccugcuguacugcaaggcccggugaggacuagugcaucacauuuaaaagcaucucagccuaccaugagaauaagagaaagaaaaugaagaucaauagcuuauucaucucuuuuucuuuuucguugguguaaagccaacacccugucuaaaaaacauaaauuucuuuaaucauuuugccucuuuucucugugcuucaauuaauaaaaaauggaaagaaccuagaucuaaaaaaaaaaaaaaaaaaaaaaaaaaaaaaaaaaaaaaaaaaaaaaaaaaaaaaaaaaaaaaaaugcaucccccccccccccccccccccccccccccccaaaggcucuuuucagagccaccagaauu

SEQ ID NO: 4566 - RNA, 1931 nt, Artificial Sequence
  mRNA product Design i-2 comprising derived and/or modified sequence from HRSV(A2)__F-del_DSCav1_mut0 (opt2)
gggagaggcgcugccuacggagguggcagccaucuccuucucggcaucaagcuuaccauggagcuccucauccucaaggccaacgccaucaccaccauccucaccgccgucaccuucugcuucgccuccggccagaacaucaccgaggaguucuaccaguccaccugcuccgccgucuccaagggcuaccucuccgcccuccgcaccggcugguacaccuccgucaucaccaucgagcucuccaacaucaaggagaacaagugcaacggcaccgacgccaaggucaagcucaucaagcaggagcucgacaaguacaagaacgccgucaccgagcuccagcuccucaugcaguccacccccgccaccggcuccggcuccgccaucgccuccggcgucgccgucugcaagguccuccaccucgagggcgaggucaacaagaucaaguccgcccuccucuccaccaacaaggccgucgucucccucuccaacggcgucuccguccucaccuucaagguccucgaccucaagaacuacaucgacaagcagcuccuccccauccucaacaagcaguccugcuccaucuccaacaucgagaccgucaucgaguuccagcagaagaacaaccgccuccucgagaucacccgcgaguucuccgucaacgccggcgucaccacccccgucuccaccuacaugcucaccaacuccgagcuccucucccucaucaacgacaugcccaucaccaacgaccagaagaagcucauguccaacaacguccagaucguccgccagcaguccuacuccaucaugugcaucaucaaggaggagguccucgccuacgucguccagcucccccucuacggcgucaucgacacccccugcuggaagcuccacaccuccccccucugcaccaccaacaccaaggagggcuccaacaucugccucacccgcaccgaccgcggcugguacugcgacaacgccggcuccgucuccuucuucccccaggccgagaccugcaagguccaguccaaccgcgucuucugcgacaccaugaacucccgcacccuccccuccgaggucaaccucugcaacgucgacaucuucaaccccaaguacgacugcaagaucaugaccuccaagaccgacgucuccuccuccgucaucaccucccucggcgccaucgucuccugcuacggcaagaccaagugcaccgccuccaacaagaaccgcggcaucaucaagaccuucuccaacggcugcgacuacgucuccaacaagggcgucgacaccgucuccgucggcaacacccucuacuacgucaacaagcaggagggcaagucccucuacgucaagggcgagcccaucaucaacuucuacgacccccucgucuuccccuccgacgaguucgacgccuccaucucccaggucaacgagaagaucaaccagucccucgccuucauccgcaaguccgacgagcuccuccacaacgucaacgccggcaaguccaccaccaacaucaugaucaccaccaucaucaucgucaucaucgucauccuccucucccucaucgccgucggccuccuccucuacugcaaggcccgcugaggacuagugcaucacauuuaaaagcaucucagccuaccaugagaauaagagaaagaaaaugaagaucaauagcuuauucaucucuuuuucuuuuucguugguguaaagccaacacccugucuaaaaaacauaaauuucuuuaaucauuuugccucuuuucucugugcuucaauuaauaaaaaauggaaagaaccuagaucuaaaaaaaaaaaaaaaaaaaaaaaaaaaaaaaaaaaaaaaaaaaaaaaaaaaaaaaaaaaaaaaaugcaucccccccccccccccccccccccccccccccaaaggcucuuuucagagccaccagaauu

SEQ ID NO: 4567 - RNA, 1931 nt, Artificial Sequence
  mRNA product Design i-2 comprising derived and/or modified sequence from HRSV(A2)__F-del_DSCav1_mut0 (opt3)
gggagaggcgcugccuacggagguggcagccaucuccuucucggcaucaagcuuaccauggagcugcucauccuuaaggccaacgcuauuaccacaauacugacugcagugacguucugcuuugccagcggccagaauaucaccgaagaguucuaccaauccacauguucugcggucucaaaaggguauuugagugcuuuaagaacuggaugguacaccagcguuauuacaaucgaacuguccaacauuaaggagaauaaaugcaacgguaccgacgccaaggugaaacuaaucaagcaggaacucgauaaguauaaaaaugcaguaacugagcugcagcuucugaugcagucuacacccgccaccggcucggggucagcuauagcaagcggaguggccgucuguaagguguugcaccucgagggcgaaguuaacaaaaucaagagugcucugcuguccacgaauaaagccguggucucucucagcaacgguguguccguauuaacuuuuaagguucuggaccuuaagaauuacauugauaaacaauugcugccuauccuaaacaagcagucaugcaguauuagcaauaucgagaccgugauagaguuccagcagaaaaacaauaggcuccuggaaauuacacgggaguuuucugucaacgcgggggugacuaccccaguguccacauauaugcuuaccaauucagaacuguugagccucaucaacgacaugccgauuacgaacgaucaaaagaaacugaugaguaauaacguccagaucguucgccagcagucuuacuccaucauguguauuauaaaggaggaaguguuagcauauguagugcaacugccccucuacggagucaucgacacuccuugcuggaaacuucauacaagcccacuguguaccacuaauacaaaggagggcucgaacauuugcuugacccgaacggaucguggcugguacugugacaaugccgggucuguguccuucuuuccccaggcugaaaccugcaagguucagucaaacagaguguucugugauacaaugaauaguagaacucugccuagcgaggucaaccucugcaauguggacaucuuuaacccaaaauaugauugcaagauaaugaccuccaaaacagacguaucuagcucaguuauuaccagucugggagccaucguguccuguuacgguaagacuaaaugcacagcaagcaauaagaacaggggcaucauuaagaccuucucuaaugggugugauuaugucucaaacaaaggaguggacacugucagugugggcaauacgcuuuacuauguuaacaagcaagaggguaaaagccuguacgugaagggggaacccaucauuaacuuuuaugacccuuugguauucccauccgaugaguuugacgcuucuauaucgcaggucaaugagaaaaucaaccagagccucgccuucauucggaaguccgaugaacuguuacacaaugugaacgcgggaaagucaacaaccaauaucaugaucacuaccauuauaaucguuauuaucgugauucugcuaagucucaucgccgucggccugcuuuuguacugcaaagcacgcugaggacuagugcaucacauuuaaaagcaucucagccuaccaugagaauaagagaaagaaaaugaagaucaauagcuuauucaucucuuuuucuuuuucguugguguaaagccaacacccugucuaaaaaacauaaauuucuuuaaucauuuugccucuuuucucugugcuucaauuaauaaaaaauggaaagaaccuagaucuaaaaaaaaaaaaaaaaaaaaaaaaaaaaaaaaaaaaaaaaaaaaaaaaaaaaaaaaaaaaaaaaugcaucccccccccccccccccccccccccccccccaaaggcucuuuucagagccaccagaauu

SEQ ID NO: 4568 - RNA, 1931 nt, Artificial Sequence
  mRNA product Design i-2 comprising derived and/or modified sequence from HRSV(A2)__F-del_DSCav1_mut0 (opt4)
gggagaggcgcugccuacggagguggcagccaucuccuucucggcaucaagcuuaccauggagcugcugauccugaaggccaacgccaucaccaccauccugaccgccgugaccuucugcuucgccagcggccagaacaucaccgaggaguucuaccagagcaccugcagcgccgugagcaagggcuaccugagcgcccugagaaccggcugguacaccagcgugaucaccaucgagcugagcaacaucaaggagaacaagugcaacggcaccgacgccaaggugaagcugaucaagcaggagcuggacaaguacaagaacgccgugaccgagcugcagcugcugaugcagagcacccccgccaccggcagcggcagcgccaucgccagcggcguggccgugugcaaggugcugcaccuggagggcgaggugaacaagaucaagagcgcccugcugagcaccaacaaggccguggugagccugagcaacggcgugagcgugcugaccuucaaggugcuggaccugaagaacuacaucgacaagcagcugcugcccauccugaacaagcagagcugcagcaucagcaacaucgagaccgugaucgaguuccagcagaagaacaacagacugcuggagaucaccagagaguucagcgugaacgccggcgugaccacccccgugagcaccuacaugcugaccaacagcgagcugcugagccugaucaacgacaugcccaucaccaacgaccagaagaagcugaugagcaacaacgugcagaucgugagacagcagagcuacagcaucaugugcaucaucaaggaggaggugcuggccuacguggugcagcugccccuguacggcgugaucgacacccccugcuggaagcugcacaccagcccccugugcaccaccaacaccaaggagggcagcaacaucugccugaccagaaccgacagaggcugguacugcgacaacgccggcagcgugagcuucuucccccaggccgagaccugcaaggugcagagcaacagaguguucugcgacaccaugaacagcagaacccugcccagcgaggugaaccugugcaacguggacaucuucaaccccaaguacgacugcaagaucaugaccagcaagaccgacgugagcagcagcgugaucaccagccugggcgccaucgugagcugcuacggcaagaccaagugcaccgccagcaacaagaacagaggcaucaucaagaccuucagcaacggcugcgacuacgugagcaacaagggcguggacaccgugagcgugggcaacacccuguacuacgugaacaagcaggagggcaagagccuguacgugaagggcgagcccaucaucaacuucuacgacccccugguguuccccagcgacgaguucgacgccagcaucagccaggugaacgagaagaucaaccagagccuggccuucaucagaaagagcgacgagcugcugcacaacgugaacgccggcaagagcaccaccaacaucaugaucaccaccaucaucaucgugaucaucgugauccugcugagccugaucgccgugggccugcugcuguacugcaaggccagaugaggacuagugcaucacauuuaaaagcaucucagccuaccaugagaauaagagaaagaaaaugaagaucaauagcuuauucaucucuuuuucuuuuucguugguguaaagccaacacccugucuaaaaaacauaaauuucuuuaaucauuuugccucuuuucucugugcuucaauuaauaaaaaauggaaagaaccuagaucuaaaaaaaaaaaaaaaaaaaaaaaaaaaaaaaaaaaaaaaaaaaaaaaaaaaaaaaaaaaaaaaaugcaucccccccccccccccccccccccccccccccaaaggcucuuuucagagccaccagaauu

SEQ ID NO: 4569 - RNA, 1931 nt, Artificial Sequence
  mRNA product Design i-2 comprising derived and/or modified sequence from HRSV(A2)__F-del_DSCav1_mut0 (opt5)
gggagaggcgcugccuacggagguggcagccaucuccuucucggcaucaagcuuaccauggagcugcucauccugaaggccaacgcuauuaccacaauccuuacggccgugaccuucugcuuugcgagcggccagaauauuacagaagaguucuaccaauccaccuguucugcugucagcaaaggguaucuguccgcccucagaacaggaugguacaccucuguuaucacaauugaacugagcaacaucaaggagaauaaaugcaacggcaccgacgccaaggugaaacuuaucaagcaggaacuggauaaguauaaaaaugcugugacggagcuccagcugcugaugcaguccacccccgccacagggucuggaagcgcuauugccuccggcgucgcgguguguaagguucuccaccuggagggggaagugaacaaaaucaagagcgcccuucugucuaccaauaaagcugucgugucccucagcaacggaguuucugugcugacauuuaagguccuugaccugaagaauuacauugauaaacaacuccugccuauccugaacaagcaguccugcagcauuucuaauaucgagaccgugauugaguuccagcagaaaaacaaucggcuccuggaaaucacgcgcgaguuuuccgugaacgccggcgucacaaccccgguuagcacauauaugcuuaccaauuccgaacugcucucucugaucaacgacaugcccauuaccaacgaucaaaagaaacuuaugagcaauaacgugcagaucgugagacagcaguccuacagcauuauguguaucauuaaggaggaaguccuggcuuaugugguucaacucccucuguacggcgugaucgacacacccugcuggaaacugcauacgucuccucucuguaccacaaauaccaaggagggguccaacaucugccugacacggaccgaucgcggaugguacugugacaaugccggcagcgucucuuucuuuccccaggcggaaacgugcaaggugcagagcaacagaguuuucugugauacaaugaacuccagaacccugccuucugaggugaaucucugcaaugucgacauuuuuaacccgaaauaugauugcaagaucaugaccagcaaaacagacguguccagcucugucauuaccucccugggggccaucgugagcuguuacggaaagacaaaaugcacggcuucuaauaagaaccggggcauuaucaagaccuucuccaaugggugugauuauguuagcaacaaaggaguggacacagucuccgugggcaauacccuuuacuauguuaacaagcaagagggcaaaucucuguacgugaagggggaacccaucauuaacuuuuaugacccucucgucuuccccagcgaugaguuugacgccuccaucucucaggugaaugagaaaauuaaccagagccuggcuuucauccgcaaguccgaugaacugcuccacaaugugaacgccggaaagagcacaaccaauauuaugaucacgaccauuaucaucguuauuaucgucauucugcuuucucugaucgccgugggccuccugcuguacugcaaagcuagaugaggacuagugcaucacauuuaaaagcaucucagccuaccaugagaauaagagaaagaaaaugaagaucaauagcuuauucaucucuuuuucuuuuucguugguguaaagccaacacccugucuaaaaaacauaaauuucuuuaaucauuuugccucuuuucucugugcuucaauuaauaaaaaauggaaagaaccuagaucuaaaaaaaaaaaaaaaaaaaaaaaaaaaaaaaaaaaaaaaaaaaaaaaaaaaaaaaaaaaaaaaaugcaucccccccccccccccccccccccccccccccaaaggcucuuuucagagccaccagaauu

SEQ ID NO: 4570 - RNA, 1931 nt, Artificial Sequence
  mRNA product Design i-2 comprising derived and/or modified sequence from HRSV(A2)__F-del_DSCav1_mut0 (opt6)
gggagaggcgcugccuacggagguggcagccaucuccuucucggcaucaagcuuaccauggaauuacucauccucaaagcaaacgcaauaacaacaauacuaacagcagucacuuucugcuucgcauccggacaaaauaucacagaagaauuuuaccaauccaccugcucugcugucuccaaaggauaccuaucugcccucagaaccgguugguauacaucugucauaaccauagaacuaucaaacauuaaagaaaacaaauguaacggaacagacgcaaaagucaaacuuauaaaacaagaauuagacaaauacaaaaacgcagucacagaauuacaacuacuaaugcaaucaaccccagcaaccggaucaggauccgcaauagcuucaggaguagcaguauguaaaguucuacacuuagaaggagaagucaacaaaauuaaauccgcacuauuaucaaccaacaaagcagucguaucuuuaucaaacggaguaucuguacuuacauucaaaguacuagaccuaaaaaauuacauugauaaacaauuacuaccaauacuaaacaaacaaucauguuccaucucuaacauagaaacaguaauagaauuucaacaaaaaaauaacagauuacuugaaaucacccgagaauuuucaguaaacgcaggaguaaccacacccguaucuacauacaugcuaacaaacucugaacuucugagccuaauaaaugacaugccaauaaccaacgaccaaaaaaaacuaauguccaacaacguacaaauaguacgacaacaaucuuacucaaucaugugcauaaucaaagaagaaguacuagcuuauguaguccaacuuccacucuacggaguaauagacacccccugcuggaaacuacacacaucaccacuaugcacaacaaacacaaaagaaggcucaaacauaugccuaacaagaacugacagaggaugguauugugacaaugcaggcucugucucauucuuuccacaagccgaaacaugcaaaguucaaucaaaccgaguuuucugugacacaaugaacucuagaacucucccaucagaagucaacuuaugcaacguugacauauucaacccaaaauaugacuguaaaauaaugacuuccaaaacugauguaucauccuccgucauaacaucccuaggagcuauuguaucauguuacgggaaaaccaaaugcacagccucaaacaaaaaccgcgguaucauaaaaacauuuucaaacggaugugauuacguaagcaauaaaggaguagacaccguaucaguaggaaauacacuauacuauguaaauaaacaagaaggaaaaucacuauaugucaaaggagaaccaaucauaaauuucuaugacccacuuguauucccauccgaugaauuugacgcaagcauuucacaggucaacgaaaaaauaaaccaaucacuagccuucaucagaaaaucagacgaacuacuacauaacguaaacgccggaaaaucaacaaccaacauaaugauaacaacaaucauaauaguuaucauaguaauacuacuaucucuaauagcugucggacucuuacuauauugcaaagcccgauaaggacuagugcaucacauuuaaaagcaucucagccuaccaugagaauaagagaaagaaaaugaagaucaauagcuuauucaucucuuuuucuuuuucguugguguaaagccaacacccugucuaaaaaacauaaauuucuuuaaucauuuugccucuuuucucugugcuucaauuaauaaaaaauggaaagaaccuagaucuaaaaaaaaaaaaaaaaaaaaaaaaaaaaaaaaaaaaaaaaaaaaaaaaaaaaaaaaaaaaaaaaugcaucccccccccccccccccccccccccccccccaaaggcucuuuucagagccaccagaauu

SEQ ID NO: 4571 - RNA, 1931 nt, Artificial Sequence
  mRNA product Design i-2 comprising derived and/or modified sequence from HRSV(A2)__F-del_DSCav1_mut0 (opt11)
gggagaggcgcugccuacggagguggcagccaucuccuucucggcaucaagcuuaccauggaacuacuaauccugaaagccaacgccauaaccacaauccuuaccgcagucaccuucugcuucgccuccggucaaaacaucacagaagaguucuaccaauccaccuguuccgcagucagcaaaggcuaccucuccgcacuccgaaccggaugguacaccagcgucaucaccaucgaacuauccaacauaaaggaaaauaagugcaaugguacagaugccaaggucaaacucauaaagcaagaacucgacaaauacaaaaacgccgucaccgaacuacaacuacuaaugcaaucuacccccgcaacaggcucagguuccgccauagccuccggcgucgccguuugcaaaguccuccaccucgaaggcgaaguaaacaaaaucaaauccgcccuacucucaaccaacaaagcagucgucucccucucaaacggagucucgguccucaccuucaaaguccucgaccucaaaaacuauauagacaaacaacuccuacccauacucaacaaacaguccugcagcauauccaacaucgaaaccgugaucgaguuccaacagaaaaacaacagacuccucgaaaucacucgagaguucuccguaaacgccggcgucacaaccccagucucaacauacaugcucaccaacagcgaacuccuaucacuaaucaacgacaugccuaucacaaaugaucagaagaaacuaaugagcaacaacguccaaaucguccgccaacaaucauacuccaucaugugcaucauaaaagaagaaguccuagccuacgugguccagcuaccccucuacggcguaauugacaccccuugcuggaaacuacacacuucaccccucugcacaaccaacaccaaagaagguucaaacaucugccucacacgaacagaccgcggcugguacugcgacaacgccggauccguauccuucuucccccaagcagaaaccugcaaaguucaauccaaccggguauucugcgacaccaugaacucaagaacccuucccuccgaaguaaaucuaugcaacgucgacauauucaacccaaaauacgacugcaaaaucaugaccuccaaaaccgaugucuccagcagcgucaucaccagccucggcgccaucgucuccugcuacggcaaaacaaaauguacagcauccaacaaaaaccgaggcauaaucaaaaccuucuccaacgggugcgauuacgucagcaacaaaggcgucgacaccgucuccgugggcaacacccuauacuacgucaacaaacaagaaggcaaaucacuguacguaaagggcgaacccaucaucaacuucuaugacccucugguguucccauccgaugaauuugacgcauccauaucucaggucaacgaaaagaucaaccaaucccucgccuucauacgcaaauccgacgaacuccuacacaacgucaacgcugguaaaagcaccaccaacaucaugaucaccacaaucaucaucgucauaaucguuauccuacucucccuuauagcagucggacuccuccucuacugcaaagcccgcuaaggacuagugcaucacauuuaaaagcaucucagccuaccaugagaauaagagaaagaaaaugaagaucaauagcuuauucaucucuuuuucuuuuucguugguguaaagccaacacccugucuaaaaaacauaaauuucuuuaaucauuuugccucuuuucucugugcuucaauuaauaaaaaauggaaagaaccuagaucuaaaaaaaaaaaaaaaaaaaaaaaaaaaaaaaaaaaaaaaaaaaaaaaaaaaaaaaaaaaaaaaaugcaucccccccccccccccccccccccccccccccaaaggcucuuuucagagccaccagaauu

SEQ ID NO: 4572 - RNA, 1927 nt, Artificial Sequence
  mRNA product Design i-2 comprising derived and/or modified sequence from HRSV(A2)__F-del_DSCav1_mut0 (opt1)
ggggcgcugccuacggagguggcagccaucuccuucucggcaucaagcuuaccauggagcugcucauccugaaggccaacgccaucaccaccauccugacggcggugaccuucugcuucgccagcggccagaacaucaccgaggaguucuaccaguccacgugcagcgccgucuccaagggguaccucagcgcccugcggaccggcugguacaccuccgugaucaccaucgagcugagcaacaucaaggagaacaagugcaacgggaccgacgccaaggugaagcucaucaagcaggagcuggacaaguacaagaacgcggucacggagcugcagcuccugaugcaguccaccccggcaaccggcuccggcuccgccaucgcgagcggcgucgccgugugcaaggugcugcaccucgagggggaggucaacaagaucaagagcgcccugcuguccaccaacaaggccguggugagccucuccaacggcgucagcgugcugaccuucaaggugcuggaccucaagaacuacaucgacaagcagcugcugcccauccugaacaagcagagcugcuccaucagcaacaucgagacggugaucgaguuccagcagaagaacaaccggcuccuggagaucacccgcgaguucagcgugaacgccggggucaccacccccguguccacguacaugcugaccaacagcgagcuccugucccugaucaacgacaugccgaucaccaacgaccagaagaagcucaugagcaacaacgugcagaucguccggcagcaguccuacagcaucaugugcaucaucaaggaggaggugcuggcguacgugguccagcugccccucuacggcgugaucgacacccccugcuggaagcugcacacgagcccccugugcaccaccaacaccaaggagggguccaacaucugccucacgcgcaccgaccggggcugguacugcgacaacgccggcagcgucuccuucuucccgcaggccgagaccugcaaggugcagagcaaccgcguguucugcgacaccaugaacucccggacgcugcccagcgagguaaaccucugcaacgucgacaucuucaaccccaaguacgacugcaagaucaugaccuccaagaccgacgugagcuccagcgugaucaccucccugggggccaucgucagcugcuacggcaagacgaagugcaccgccagcaacaagaaccgggggaucaucaagaccuucuccaacggcugcgacuacgugagcaacaagggcguggacaccguguccgucgggaacacccuguacuacgugaacaagcaggagggcaagagccucuacgugaagggggagcccaucaucaacuucuacgacccgcuggucuuccccuccgacgaguucgacgcgagcaucucccaggugaacgagaagaucaaccagagccuggccuucauccgcaaguccgacgagcugcuccacaacgugaacgccggcaagagcacgaccaacaucaugaucaccaccaucaucaucgucaucaucgugauccugcugucccucaucgccguggggcugcugcucuacugcaaggcccggugaggacuagugcaucacauuuaaaagcaucucagccuaccaugagaauaagagaaagaaaaugaagaucaauagcuuauucaucucuuuuucuuuuucguugguguaaagccaacacccugucuaaaaaacauaaauuucuuuaaucauuuugccucuuuucucugugcuucaauuaauaaaaaauggaaagaaccuagaucuaaaaaaaaaaaaaaaaaaaaaaaaaaaaaaaaaaaaaaaaaaaaaaaaaaaaaaaaaaaaaaaaugcaucccccccccccccccccccccccccccccccaaaggcucuuuucagagccaccagaauu

SEQ ID NO: 4573 - RNA, 1927 nt, Artificial Sequence
  mRNA product Design i-2 comprising derived and/or modified sequence from HRSV(A2)__F-del_DSCav1_mut0 (opt1)
ggggcgcugccuacggagguggcagccaucuccuucucggcaucaagcuuaccauggagcugcucauccugaaggccaacgccaucaccaccauccugacggcggugaccuucugcuucgccagcggccagaacaucaccgaggaguucuaccaguccacgugcagcgccgucuccaagggguaccucagcgcccugcgcaccggcugguacaccuccgugaucaccaucgagcugagcaacaucaaggagaacaagugcaacgggaccgacgccaaggugaagcucaucaagcaggagcuggacaaguacaagaacgcggucacggagcugcagcuccugaugcaguccacccccgccaccggcagcggguccgccaucgccagcggcguggcggugugcaagguccugcaccucgagggcgaggugaacaagaucaaguccgcccugcugagcaccaacaaggccguggucucccucagcaacgggguguccgugcugacguucaagguccuggaccucaagaacuacaucgacaagcagcugcugccgauccucaacaagcagagcugcuccaucagcaacaucgagaccgugaucgaguuccagcagaagaacaaccggcugcuggagaucacccgcgaguucuccgugaacgccggcgucaccacgcccgugagcaccuacaugcucaccaacagcgagcugcugucccucaucaacgacaugcccaucaccaacgaccagaagaagcugaugagcaacaacgugcagaucguccggcagcaguccuacagcaucaugugcaucaucaaggaggaggugcuggccuacgugguccagcucccccuguacggggugaucgacacgccgugcuggaagcugcacaccagcccccucugcaccaccaacacgaaggagggcuccaacaucugccugacccgcaccgaccgggggugguacugcgacaacgcgggcuccgugagcuucuucccccaggccgagaccugcaagguccaguccaaccgcguguucugcgacacgaugaacagccggacccuccccuccgaggucaaccugugcaacguggacaucuucaacccgaaguacgacugcaagaucaugaccagcaagaccgacguguccagcuccgucaucacgagccugggcgccaucguguccugcuacgggaagaccaagugcaccgccagcaacaagaaccggggcaucaucaagaccuucuccaacgggugcgacuacgugagcaacaagggcgucgacacggugagcgugggcaacacccucuacuacgucaacaagcaggaggggaagucccuguacgugaagggcgagcccaucaucaacuucuacgacccccugguguuccccagcgacgaguucgacgccuccaucagccaggucaacgagaagaucaaccagucccucgcguucauccgcaagagcgacgagcugcugcacaacgugaacgccgggaaguccaccaccaacaucaugaucaccacgaucaucaucgugaucaucgucauccuccugagccugaucgccgugggccuccugcuguacugcaaggcccggugaggacuagugcaucacauuuaaaagcaucucagccuaccaugagaauaagagaaagaaaaugaagaucaauagcuuauucaucucuuuuucuuuuucguugguguaaagccaacacccugucuaaaaaacauaaauuucuuuaaucauuuugccucuuuucucugugcuucaauuaauaaaaaauggaaagaaccuagaucuaaaaaaaaaaaaaaaaaaaaaaaaaaaaaaaaaaaaaaaaaaaaaaaaaaaaaaaaaaaaaaaaugcaucccccccccccccccccccccccccccccccaaaggcucuuuucagagccaccagaauu

SEQ ID NO: 4574 - RNA, 1927 nt, Artificial Sequence
  mRNA product Design i-2 comprising derived and/or modified sequence from HRSV(A2)__F-del_DSCav1_mut0 (opt2)
ggggcgcugccuacggagguggcagccaucuccuucucggcaucaagcuuaccauggagcuccucauccucaaggccaacgccaucaccaccauccucaccgccgucaccuucugcuucgccuccggccagaacaucaccgaggaguucuaccaguccaccugcuccgccgucuccaagggcuaccucuccgcccuccgcaccggcugguacaccuccgucaucaccaucgagcucuccaacaucaaggagaacaagugcaacggcaccgacgccaaggucaagcucaucaagcaggagcucgacaaguacaagaacgccgucaccgagcuccagcuccucaugcaguccacccccgccaccggcuccggcuccgccaucgccuccggcgucgccgucugcaagguccuccaccucgagggcgaggucaacaagaucaaguccgcccuccucuccaccaacaaggccgucgucucccucuccaacggcgucuccguccucaccuucaagguccucgaccucaagaacuacaucgacaagcagcuccuccccauccucaacaagcaguccugcuccaucuccaacaucgagaccgucaucgaguuccagcagaagaacaaccgccuccucgagaucacccgcgaguucuccgucaacgccggcgucaccacccccgucuccaccuacaugcucaccaacuccgagcuccucucccucaucaacgacaugcccaucaccaacgaccagaagaagcucauguccaacaacguccagaucguccgccagcaguccuacuccaucaugugcaucaucaaggaggagguccucgccuacgucguccagcucccccucuacggcgucaucgacacccccugcuggaagcuccacaccuccccccucugcaccaccaacaccaaggagggcuccaacaucugccucacccgcaccgaccgcggcugguacugcgacaacgccggcuccgucuccuucuucccccaggccgagaccugcaagguccaguccaaccgcgucuucugcgacaccaugaacucccgcacccuccccuccgaggucaaccucugcaacgucgacaucuucaaccccaaguacgacugcaagaucaugaccuccaagaccgacgucuccuccuccgucaucaccucccucggcgccaucgucuccugcuacggcaagaccaagugcaccgccuccaacaagaaccgcggcaucaucaagaccuucuccaacggcugcgacuacgucuccaacaagggcgucgacaccgucuccgucggcaacacccucuacuacgucaacaagcaggagggcaagucccucuacgucaagggcgagcccaucaucaacuucuacgacccccucgucuuccccuccgacgaguucgacgccuccaucucccaggucaacgagaagaucaaccagucccucgccuucauccgcaaguccgacgagcuccuccacaacgucaacgccggcaaguccaccaccaacaucaugaucaccaccaucaucaucgucaucaucgucauccuccucucccucaucgccgucggccuccuccucuacugcaaggcccgcugaggacuagugcaucacauuuaaaagcaucucagccuaccaugagaauaagagaaagaaaaugaagaucaauagcuuauucaucucuuuuucuuuuucguugguguaaagccaacacccugucuaaaaaacauaaauuucuuuaaucauuuugccucuuuucucugugcuucaauuaauaaaaaauggaaagaaccuagaucuaaaaaaaaaaaaaaaaaaaaaaaaaaaaaaaaaaaaaaaaaaaaaaaaaaaaaaaaaaaaaaaaugcaucccccccccccccccccccccccccccccccaaaggcucuuuucagagccaccagaauu

SEQ ID NO: 4575 - RNA, 1927 nt, Artificial Sequence
  mRNA product Design i-2 comprising derived and/or modified sequence from HRSV(A2)__F-del_DSCav1_mut0 (opt3)
ggggcgcugccuacggagguggcagccaucuccuucucggcaucaagcuuaccauggagcugcucauccuuaaggccaacgcuauuaccacaauacugacugcagugacguucugcuuugccagcggccagaauaucaccgaagaguucuaccaauccacauguucugcggucucaaaaggguauuugagugcuuuaagaacuggaugguacaccagcguuauuacaaucgaacuguccaacauuaaggagaauaaaugcaacgguaccgacgccaaggugaaacuaaucaagcaggaacucgauaaguauaaaaaugcaguaacugagcugcagcuucugaugcagucuacacccgccaccggcucggggucagcuauagcaagcggaguggccgucuguaagguguugcaccucgagggcgaaguuaacaaaaucaagagugcucugcuguccacgaauaaagccguggucucucucagcaacgguguguccguauuaacuuuuaagguucuggaccuuaagaauuacauugauaaacaauugcugccuauccuaaacaagcagucaugcaguauuagcaauaucgagaccgugauagaguuccagcagaaaaacaauaggcuccuggaaauuacacgggaguuuucugucaacgcgggggugacuaccccaguguccacauauaugcuuaccaauucagaacuguugagccucaucaacgacaugccgauuacgaacgaucaaaagaaacugaugaguaauaacguccagaucguucgccagcagucuuacuccaucauguguauuauaaaggaggaaguguuagcauauguagugcaacugccccucuacggagucaucgacacuccuugcuggaaacuucauacaagcccacuguguaccacuaauacaaaggagggcucgaacauuugcuugacccgaacggaucguggcugguacugugacaaugccgggucuguguccuucuuuccccaggcugaaaccugcaagguucagucaaacagaguguucugugauacaaugaauaguagaacucugccuagcgaggucaaccucugcaauguggacaucuuuaacccaaaauaugauugcaagauaaugaccuccaaaacagacguaucuagcucaguuauuaccagucugggagccaucguguccuguuacgguaagacuaaaugcacagcaagcaauaagaacaggggcaucauuaagaccuucucuaaugggugugauuaugucucaaacaaaggaguggacacugucagugugggcaauacgcuuuacuauguuaacaagcaagaggguaaaagccuguacgugaagggggaacccaucauuaacuuuuaugacccuuugguauucccauccgaugaguuugacgcuucuauaucgcaggucaaugagaaaaucaaccagagccucgccuucauucggaaguccgaugaacuguuacacaaugugaacgcgggaaagucaacaaccaauaucaugaucacuaccauuauaaucguuauuaucgugauucugcuaagucucaucgccgucggccugcuuuuguacugcaaagcacgcugaggacuagugcaucacauuuaaaagcaucucagccuaccaugagaauaagagaaagaaaaugaagaucaauagcuuauucaucucuuuuucuuuuucguugguguaaagccaacacccugucuaaaaaacauaaauuucuuuaaucauuuugccucuuuucucugugcuucaauuaauaaaaaauggaaagaaccuagaucuaaaaaaaaaaaaaaaaaaaaaaaaaaaaaaaaaaaaaaaaaaaaaaaaaaaaaaaaaaaaaaaaugcaucccccccccccccccccccccccccccccccaaaggcucuuuucagagccaccagaauu

SEQ ID NO: 4576 - RNA, 1927 nt, Artificial Sequence
  mRNA product Design i-2 comprising derived and/or modified sequence from HRSV(A2)__F-del_DSCav1_mut0 (opt4)
ggggcgcugccuacggagguggcagccaucuccuucucggcaucaagcuuaccauggagcugcugauccugaaggccaacgccaucaccaccauccugaccgccgugaccuucugcuucgccagcggccagaacaucaccgaggaguucuaccagagcaccugcagcgccgugagcaagggcuaccugagcgcccugagaaccggcugguacaccagcgugaucaccaucgagcugagcaacaucaaggagaacaagugcaacggcaccgacgccaaggugaagcugaucaagcaggagcuggacaaguacaagaacgccgugaccgagcugcagcugcugaugcagagcacccccgccaccggcagcggcagcgccaucgccagcggcguggccgugugcaaggugcugcaccuggagggcgaggugaacaagaucaagagcgcccugcugagcaccaacaaggccguggugagccugagcaacggcgugagcgugcugaccuucaaggugcuggaccugaagaacuacaucgacaagcagcugcugcccauccugaacaagcagagcugcagcaucagcaacaucgagaccgugaucgaguuccagcagaagaacaacagacugcuggagaucaccagagaguucagcgugaacgccggcgugaccacccccgugagcaccuacaugcugaccaacagcgagcugcugagccugaucaacgacaugcccaucaccaacgaccagaagaagcugaugagcaacaacgugcagaucgugagacagcagagcuacagcaucaugugcaucaucaaggaggaggugcuggccuacguggugcagcugccccuguacggcgugaucgacacccccugcuggaagcugcacaccagcccccugugcaccaccaacaccaaggagggcagcaacaucugccugaccagaaccgacagaggcugguacugcgacaacgccggcagcgugagcuucuucccccaggccgagaccugcaaggugcagagcaacagaguguucugcgacaccaugaacagcagaacccugcccagcgaggugaaccugugcaacguggacaucuucaaccccaaguacgacugcaagaucaugaccagcaagaccgacgugagcagcagcgugaucaccagccugggcgccaucgugagcugcuacggcaagaccaagugcaccgccagcaacaagaacagaggcaucaucaagaccuucagcaacggcugcgacuacgugagcaacaagggcguggacaccgugagcgugggcaacacccuguacuacgugaacaagcaggagggcaagagccuguacgugaagggcgagcccaucaucaacuucuacgacccccugguguuccccagcgacgaguucgacgccagcaucagccaggugaacgagaagaucaaccagagccuggccuucaucagaaagagcgacgagcugcugcacaacgugaacgccggcaagagcaccaccaacaucaugaucaccaccaucaucaucgugaucaucgugauccugcugagccugaucgccgugggccugcugcuguacugcaaggccagaugaggacuagugcaucacauuuaaaagcaucucagccuaccaugagaauaagagaaagaaaaugaagaucaauagcuuauucaucucuuuuucuuuuucguugguguaaagccaacacccugucuaaaaaacauaaauuucuuuaaucauuuugccucuuuucucugugcuucaauuaauaaaaaauggaaagaaccuagaucuaaaaaaaaaaaaaaaaaaaaaaaaaaaaaaaaaaaaaaaaaaaaaaaaaaaaaaaaaaaaaaaaugcaucccccccccccccccccccccccccccccccaaaggcucuuuucagagccaccagaauu

SEQ ID NO: 4577 - RNA, 1927 nt, Artificial Sequence
  mRNA product Design i-2 comprising derived and/or modified sequence from HRSV(A2)__F-del_DSCav1_mut0 (opt5)
ggggcgcugccuacggagguggcagccaucuccuucucggcaucaagcuuaccauggagcugcucauccugaaggccaacgcuauuaccacaauccuuacggccgugaccuucugcuuugcgagcggccagaauauuacagaagaguucuaccaauccaccuguucugcugucagcaaaggguaucuguccgcccucagaacaggaugguacaccucuguuaucacaauugaacugagcaacaucaaggagaauaaaugcaacggcaccgacgccaaggugaaacuuaucaagcaggaacuggauaaguauaaaaaugcugugacggagcuccagcugcugaugcaguccacccccgccacagggucuggaagcgcuauugccuccggcgucgcgguguguaagguucuccaccuggagggggaagugaacaaaaucaagagcgcccuucugucuaccaauaaagcugucgugucccucagcaacggaguuucugugcugacauuuaagguccuugaccugaagaauuacauugauaaacaacuccugccuauccugaacaagcaguccugcagcauuucuaauaucgagaccgugauugaguuccagcagaaaaacaaucggcuccuggaaaucacgcgcgaguuuuccgugaacgccggcgucacaaccccgguuagcacauauaugcuuaccaauuccgaacugcucucucugaucaacgacaugcccauuaccaacgaucaaaagaaacuuaugagcaauaacgugcagaucgugagacagcaguccuacagcauuauguguaucauuaaggaggaaguccuggcuuaugugguucaacucccucuguacggcgugaucgacacacccugcuggaaacugcauacgucuccucucuguaccacaaauaccaaggagggguccaacaucugccugacacggaccgaucgcggaugguacugugacaaugccggcagcgucucuuucuuuccccaggcggaaacgugcaaggugcagagcaacagaguuuucugugauacaaugaacuccagaacccugccuucugaggugaaucucugcaaugucgacauuuuuaacccgaaauaugauugcaagaucaugaccagcaaaacagacguguccagcucugucauuaccucccugggggccaucgugagcuguuacggaaagacaaaaugcacggcuucuaauaagaaccggggcauuaucaagaccuucuccaaugggugugauuauguuagcaacaaaggaguggacacagucuccgugggcaauacccuuuacuauguuaacaagcaagagggcaaaucucuguacgugaagggggaacccaucauuaacuuuuaugacccucucgucuuccccagcgaugaguuugacgccuccaucucucaggugaaugagaaaauuaaccagagccuggcuuucauccgcaaguccgaugaacugcuccacaaugugaacgccggaaagagcacaaccaauauuaugaucacgaccauuaucaucguuauuaucgucauucugcuuucucugaucgccgugggccuccugcuguacugcaaagcuagaugaggacuagugcaucacauuuaaaagcaucucagccuaccaugagaauaagagaaagaaaaugaagaucaauagcuuauucaucucuuuuucuuuuucguugguguaaagccaacacccugucuaaaaaacauaaauuucuuuaaucauuuugccucuuuucucugugcuucaauuaauaaaaaauggaaagaaccuagaucuaaaaaaaaaaaaaaaaaaaaaaaaaaaaaaaaaaaaaaaaaaaaaaaaaaaaaaaaaaaaaaaaugcaucccccccccccccccccccccccccccccccaaaggcucuuuucagagccaccagaauu

SEQ ID NO: 4578 - RNA, 1927 nt, Artificial Sequence
  mRNA product Design i-2 comprising derived and/or modified sequence from HRSV(A2)__F-del_DSCav1_mut0 (opt6)
ggggcgcugccuacggagguggcagccaucuccuucucggcaucaagcuuaccauggaauuacucauccucaaagcaaacgcaauaacaacaauacuaacagcagucacuuucugcuucgcauccggacaaaauaucacagaagaauuuuaccaauccaccugcucugcugucuccaaaggauaccuaucugcccucagaaccgguugguauacaucugucauaaccauagaacuaucaaacauuaaagaaaacaaauguaacggaacagacgcaaaagucaaacuuauaaaacaagaauuagacaaauacaaaaacgcagucacagaauuacaacuacuaaugcaaucaaccccagcaaccggaucaggauccgcaauagcuucaggaguagcaguauguaaaguucuacacuuagaaggagaagucaacaaaauuaaauccgcacuauuaucaaccaacaaagcagucguaucuuuaucaaacggaguaucuguacuuacauucaaaguacuagaccuaaaaaauuacauugauaaacaauuacuaccaauacuaaacaaacaaucauguuccaucucuaacauagaaacaguaauagaauuucaacaaaaaaauaacagauuacuugaaaucacccgagaauuuucaguaaacgcaggaguaaccacacccguaucuacauacaugcuaacaaacucugaacuucugagccuaauaaaugacaugccaauaaccaacgaccaaaaaaaacuaauguccaacaacguacaaauaguacgacaacaaucuuacucaaucaugugcauaaucaaagaagaaguacuagcuuauguaguccaacuuccacucuacggaguaauagacacccccugcuggaaacuacacacaucaccacuaugcacaacaaacacaaaagaaggcucaaacauaugccuaacaagaacugacagaggaugguauugugacaaugcaggcucugucucauucuuuccacaagccgaaacaugcaaaguucaaucaaaccgaguuuucugugacacaaugaacucuagaacucucccaucagaagucaacuuaugcaacguugacauauucaacccaaaauaugacuguaaaauaaugacuuccaaaacugauguaucauccuccgucauaacaucccuaggagcuauuguaucauguuacgggaaaaccaaaugcacagccucaaacaaaaaccgcgguaucauaaaaacauuuucaaacggaugugauuacguaagcaauaaaggaguagacaccguaucaguaggaaauacacuauacuauguaaauaaacaagaaggaaaaucacuauaugucaaaggagaaccaaucauaaauuucuaugacccacuuguauucccauccgaugaauuugacgcaagcauuucacaggucaacgaaaaaauaaaccaaucacuagccuucaucagaaaaucagacgaacuacuacauaacguaaacgccggaaaaucaacaaccaacauaaugauaacaacaaucauaauaguuaucauaguaauacuacuaucucuaauagcugucggacucuuacuauauugcaaagcccgauaaggacuagugcaucacauuuaaaagcaucucagccuaccaugagaauaagagaaagaaaaugaagaucaauagcuuauucaucucuuuuucuuuuucguugguguaaagccaacacccugucuaaaaaacauaaauuucuuuaaucauuuugccucuuuucucugugcuucaauuaauaaaaaauggaaagaaccuagaucuaaaaaaaaaaaaaaaaaaaaaaaaaaaaaaaaaaaaaaaaaaaaaaaaaaaaaaaaaaaaaaaaugcaucccccccccccccccccccccccccccccccaaaggcucuuuucagagccaccagaauu

SEQ ID NO: 4579 - RNA, 1927 nt, Artificial Sequence
  mRNA product Design i-2 comprising derived and/or modified sequence from HRSV(A2)__F-del_DSCav1_mut0 (opt11)
ggggcgcugccuacggagguggcagccaucuccuucucggcaucaagcuuaccauggaacuacuaauccugaaagccaacgccauaaccacaauccuuaccgcagucaccuucugcuucgccuccggucaaaacaucacagaagaguucuaccaauccaccuguuccgcagucagcaaaggcuaccucuccgcacuccgaaccggaugguacaccagcgucaucaccaucgaacuauccaacauaaaggaaaauaagugcaaugguacagaugccaaggucaaacucauaaagcaagaacucgacaaauacaaaaacgccgucaccgaacuacaacuacuaaugcaaucuacccccgcaacaggcucagguuccgccauagccuccggcgucgccguuugcaaaguccuccaccucgaaggcgaaguaaacaaaaucaaauccgcccuacucucaaccaacaaagcagucgucucccucucaaacggagucucgguccucaccuucaaaguccucgaccucaaaaacuauauagacaaacaacuccuacccauacucaacaaacaguccugcagcauauccaacaucgaaaccgugaucgaguuccaacagaaaaacaacagacuccucgaaaucacucgagaguucuccguaaacgccggcgucacaaccccagucucaacauacaugcucaccaacagcgaacuccuaucacuaaucaacgacaugccuaucacaaaugaucagaagaaacuaaugagcaacaacguccaaaucguccgccaacaaucauacuccaucaugugcaucauaaaagaagaaguccuagccuacgugguccagcuaccccucuacggcguaauugacaccccuugcuggaaacuacacacuucaccccucugcacaaccaacaccaaagaagguucaaacaucugccucacacgaacagaccgcggcugguacugcgacaacgccggauccguauccuucuucccccaagcagaaaccugcaaaguucaauccaaccggguauucugcgacaccaugaacucaagaacccuucccuccgaaguaaaucuaugcaacgucgacauauucaacccaaaauacgacugcaaaaucaugaccuccaaaaccgaugucuccagcagcgucaucaccagccucggcgccaucgucuccugcuacggcaaaacaaaauguacagcauccaacaaaaaccgaggcauaaucaaaaccuucuccaacgggugcgauuacgucagcaacaaaggcgucgacaccgucuccgugggcaacacccuauacuacgucaacaaacaagaaggcaaaucacuguacguaaagggcgaacccaucaucaacuucuaugacccucugguguucccauccgaugaauuugacgcauccauaucucaggucaacgaaaagaucaaccaaucccucgccuucauacgcaaauccgacgaacuccuacacaacgucaacgcugguaaaagcaccaccaacaucaugaucaccacaaucaucaucgucauaaucguuauccuacucucccuuauagcagucggacuccuccucuacugcaaagcccgcuaaggacuagugcaucacauuuaaaagcaucucagccuaccaugagaauaagagaaagaaaaugaagaucaauagcuuauucaucucuuuuucuuuuucguugguguaaagccaacacccugucuaaaaaacauaaauuucuuuaaucauuuugccucuuuucucugugcuucaauuaauaaaaaauggaaagaaccuagaucuaaaaaaaaaaaaaaaaaaaaaaaaaaaaaaaaaaaaaaaaaaaaaaaaaaaaaaaaaaaaaaaaugcaucccccccccccccccccccccccccccccccaaaggcucuuuucagagccaccagaauu

SEQ ID NO: 4580 - RNA, 1762 nt, Artificial Sequence
  mRNA product Design i-3 comprising derived and/or modified sequence from HRSV(A2)__F-del_DSCav1_mut0 (opt1) R7455
gggagaaagcuuaccauggagcugcucauccugaaggccaacgccaucaccaccauccugacggcggugaccuucugcuucgccagcggccagaacaucaccgaggaguucuaccaguccacgugcagcgccgucuccaagggguaccucagcgcccugcggaccggcugguacaccuccgugaucaccaucgagcugagcaacaucaaggagaacaagugcaacgggaccgacgccaaggugaagcucaucaagcaggagcuggacaaguacaagaacgcggucacggagcugcagcuccugaugcaguccaccccggcaaccggcuccggcuccgccaucgcgagcggcgucgccgugugcaaggugcugcaccucgagggggaggucaacaagaucaagagcgcccugcuguccaccaacaaggccguggugagccucuccaacggcgucagcgugcugaccuucaaggugcuggaccucaagaacuacaucgacaagcagcugcugcccauccugaacaagcagagcugcuccaucagcaacaucgagacggugaucgaguuccagcagaagaacaaccggcuccuggagaucacccgcgaguucagcgugaacgccggggucaccacccccguguccacguacaugcugaccaacagcgagcuccugucccugaucaacgacaugccgaucaccaacgaccagaagaagcucaugagcaacaacgugcagaucguccggcagcaguccuacagcaucaugugcaucaucaaggaggaggugcuggcguacgugguccagcugccccucuacggcgugaucgacacccccugcuggaagcugcacacgagcccccugugcaccaccaacaccaaggagggguccaacaucugccucacgcgcaccgaccggggcugguacugcgacaacgccggcagcgucuccuucuucccgcaggccgagaccugcaaggugcagagcaaccgcguguucugcgacaccaugaacucccggacgcugcccagcgagguaaaccucugcaacgucgacaucuucaaccccaaguacgacugcaagaucaugaccuccaagaccgacgugagcuccagcgugaucaccucccugggggccaucgucagcugcuacggcaagacgaagugcaccgccagcaacaagaaccgggggaucaucaagaccuucuccaacggcugcgacuacgugagcaacaagggcguggacaccguguccgucgggaacacccuguacuacgugaacaagcaggagggcaagagccucuacgugaagggggagcccaucaucaacuucuacgacccgcuggucuuccccuccgacgaguucgacgcgagcaucucccaggugaacgagaagaucaaccagagccuggccuucauccgcaaguccgacgagcugcuccacaacgugaacgccggcaagagcacgaccaacaucaugaucaccaccaucaucaucgucaucaucgugauccugcugucccucaucgccguggggcugcugcucuacugcaaggcccggugaggacuaguuauaagacugacuagcccgaugggccucccaacgggcccuccuccccuccuugcaccgagauuaauaaaaaaaaaaaaaaaaaaaaaaaaaaaaaaaaaaaaaaaaaaaaaaaaaaaaaaaaaaaaaaaaugcaucccccccccccccccccccccccccccccccaaaggcucuuuucagagccaccagaauu

SEQ ID NO: 4581 - RNA, 1762 nt, Artificial Sequence
  mRNA product Design i-3 comprising derived and/or modified sequence from HRSV(A2)__F-del_DSCav1_mut0 (opt1)
gggagaaagcuuaccauggagcugcucauccugaaggccaacgccaucaccaccauccugacggcggugaccuucugcuucgccagcggccagaacaucaccgaggaguucuaccaguccacgugcagcgccgucuccaagggguaccucagcgcccugcgcaccggcugguacaccuccgugaucaccaucgagcugagcaacaucaaggagaacaagugcaacgggaccgacgccaaggugaagcucaucaagcaggagcuggacaaguacaagaacgcggucacggagcugcagcuccugaugcaguccacccccgccaccggcagcggguccgccaucgccagcggcguggcggugugcaagguccugcaccucgagggcgaggugaacaagaucaaguccgcccugcugagcaccaacaaggccguggucucccucagcaacgggguguccgugcugacguucaagguccuggaccucaagaacuacaucgacaagcagcugcugccgauccucaacaagcagagcugcuccaucagcaacaucgagaccgugaucgaguuccagcagaagaacaaccggcugcuggagaucacccgcgaguucuccgugaacgccggcgucaccacgcccgugagcaccuacaugcucaccaacagcgagcugcugucccucaucaacgacaugcccaucaccaacgaccagaagaagcugaugagcaacaacgugcagaucguccggcagcaguccuacagcaucaugugcaucaucaaggaggaggugcuggccuacgugguccagcucccccuguacggggugaucgacacgccgugcuggaagcugcacaccagcccccucugcaccaccaacacgaaggagggcuccaacaucugccugacccgcaccgaccgggggugguacugcgacaacgcgggcuccgugagcuucuucccccaggccgagaccugcaagguccaguccaaccgcguguucugcgacacgaugaacagccggacccuccccuccgaggucaaccugugcaacguggacaucuucaacccgaaguacgacugcaagaucaugaccagcaagaccgacguguccagcuccgucaucacgagccugggcgccaucguguccugcuacgggaagaccaagugcaccgccagcaacaagaaccggggcaucaucaagaccuucuccaacgggugcgacuacgugagcaacaagggcgucgacacggugagcgugggcaacacccucuacuacgucaacaagcaggaggggaagucccuguacgugaagggcgagcccaucaucaacuucuacgacccccugguguuccccagcgacgaguucgacgccuccaucagccaggucaacgagaagaucaaccagucccucgcguucauccgcaagagcgacgagcugcugcacaacgugaacgccgggaaguccaccaccaacaucaugaucaccacgaucaucaucgugaucaucgucauccuccugagccugaucgccgugggccuccugcuguacugcaaggcccggugaggacuaguuauaagacugacuagcccgaugggccucccaacgggcccuccuccccuccuugcaccgagauuaauaaaaaaaaaaaaaaaaaaaaaaaaaaaaaaaaaaaaaaaaaaaaaaaaaaaaaaaaaaaaaaaaugcaucccccccccccccccccccccccccccccccaaaggcucuuuucagagccaccagaauu

SEQ ID NO: 4582 - RNA, 1762 nt, Artificial Sequence
  mRNA product Design i-3 comprising derived and/or modified sequence from HRSV(A2)__F-del_DSCav1_mut0 (opt2)
gggagaaagcuuaccauggagcuccucauccucaaggccaacgccaucaccaccauccucaccgccgucaccuucugcuucgccuccggccagaacaucaccgaggaguucuaccaguccaccugcuccgccgucuccaagggcuaccucuccgcccuccgcaccggcugguacaccuccgucaucaccaucgagcucuccaacaucaaggagaacaagugcaacggcaccgacgccaaggucaagcucaucaagcaggagcucgacaaguacaagaacgccgucaccgagcuccagcuccucaugcaguccacccccgccaccggcuccggcuccgccaucgccuccggcgucgccgucugcaagguccuccaccucgagggcgaggucaacaagaucaaguccgcccuccucuccaccaacaaggccgucgucucccucuccaacggcgucuccguccucaccuucaagguccucgaccucaagaacuacaucgacaagcagcuccuccccauccucaacaagcaguccugcuccaucuccaacaucgagaccgucaucgaguuccagcagaagaacaaccgccuccucgagaucacccgcgaguucuccgucaacgccggcgucaccacccccgucuccaccuacaugcucaccaacuccgagcuccucucccucaucaacgacaugcccaucaccaacgaccagaagaagcucauguccaacaacguccagaucguccgccagcaguccuacuccaucaugugcaucaucaaggaggagguccucgccuacgucguccagcucccccucuacggcgucaucgacacccccugcuggaagcuccacaccuccccccucugcaccaccaacaccaaggagggcuccaacaucugccucacccgcaccgaccgcggcugguacugcgacaacgccggcuccgucuccuucuucccccaggccgagaccugcaagguccaguccaaccgcgucuucugcgacaccaugaacucccgcacccuccccuccgaggucaaccucugcaacgucgacaucuucaaccccaaguacgacugcaagaucaugaccuccaagaccgacgucuccuccuccgucaucaccucccucggcgccaucgucuccugcuacggcaagaccaagugcaccgccuccaacaagaaccgcggcaucaucaagaccuucuccaacggcugcgacuacgucuccaacaagggcgucgacaccgucuccgucggcaacacccucuacuacgucaacaagcaggagggcaagucccucuacgucaagggcgagcccaucaucaacuucuacgacccccucgucuuccccuccgacgaguucgacgccuccaucucccaggucaacgagaagaucaaccagucccucgccuucauccgcaaguccgacgagcuccuccacaacgucaacgccggcaaguccaccaccaacaucaugaucaccaccaucaucaucgucaucaucgucauccuccucucccucaucgccgucggccuccuccucuacugcaaggcccgcugaggacuaguuauaagacugacuagcccgaugggccucccaacgggcccuccuccccuccuugcaccgagauuaauaaaaaaaaaaaaaaaaaaaaaaaaaaaaaaaaaaaaaaaaaaaaaaaaaaaaaaaaaaaaaaaaugcaucccccccccccccccccccccccccccccccaaaggcucuuuucagagccaccagaauu

SEQ ID NO: 4583 - RNA, 1762 nt, Artificial Sequence
  mRNA product Design i-3 comprising derived and/or modified sequence from HRSV(A2)__F-del_DSCav1_mut0 (opt3)
gggagaaagcuuaccauggagcugcucauccuuaaggccaacgcuauuaccacaauacugacugcagugacguucugcuuugccagcggccagaauaucaccgaagaguucuaccaauccacauguucugcggucucaaaaggguauuugagugcuuuaagaacuggaugguacaccagcguuauuacaaucgaacuguccaacauuaaggagaauaaaugcaacgguaccgacgccaaggugaaacuaaucaagcaggaacucgauaaguauaaaaaugcaguaacugagcugcagcuucugaugcagucuacacccgccaccggcucggggucagcuauagcaagcggaguggccgucuguaagguguugcaccucgagggcgaaguuaacaaaaucaagagugcucugcuguccacgaauaaagccguggucucucucagcaacgguguguccguauuaacuuuuaagguucuggaccuuaagaauuacauugauaaacaauugcugccuauccuaaacaagcagucaugcaguauuagcaauaucgagaccgugauagaguuccagcagaaaaacaauaggcuccuggaaauuacacgggaguuuucugucaacgcgggggugacuaccccaguguccacauauaugcuuaccaauucagaacuguugagccucaucaacgacaugccgauuacgaacgaucaaaagaaacugaugaguaauaacguccagaucguucgccagcagucuuacuccaucauguguauuauaaaggaggaaguguuagcauauguagugcaacugccccucuacggagucaucgacacuccuugcuggaaacuucauacaagcccacuguguaccacuaauacaaaggagggcucgaacauuugcuugacccgaacggaucguggcugguacugugacaaugccgggucuguguccuucuuuccccaggcugaaaccugcaagguucagucaaacagaguguucugugauacaaugaauaguagaacucugccuagcgaggucaaccucugcaauguggacaucuuuaacccaaaauaugauugcaagauaaugaccuccaaaacagacguaucuagcucaguuauuaccagucugggagccaucguguccuguuacgguaagacuaaaugcacagcaagcaauaagaacaggggcaucauuaagaccuucucuaaugggugugauuaugucucaaacaaaggaguggacacugucagugugggcaauacgcuuuacuauguuaacaagcaagaggguaaaagccuguacgugaagggggaacccaucauuaacuuuuaugacccuuugguauucccauccgaugaguuugacgcuucuauaucgcaggucaaugagaaaaucaaccagagccucgccuucauucggaaguccgaugaacuguuacacaaugugaacgcgggaaagucaacaaccaauaucaugaucacuaccauuauaaucguuauuaucgugauucugcuaagucucaucgccgucggccugcuuuuguacugcaaagcacgcugaggacuaguuauaagacugacuagcccgaugggccucccaacgggcccuccuccccuccuugcaccgagauuaauaaaaaaaaaaaaaaaaaaaaaaaaaaaaaaaaaaaaaaaaaaaaaaaaaaaaaaaaaaaaaaaaugcaucccccccccccccccccccccccccccccccaaaggcucuuuucagagccaccagaauu

SEQ ID NO: 4584 - RNA, 1762 nt, Artificial Sequence
  mRNA product Design i-3 comprising derived and/or modified sequence from HRSV(A2)__F-del_DSCav1_mut0 (opt4)
gggagaaagcuuaccauggagcugcugauccugaaggccaacgccaucaccaccauccugaccgccgugaccuucugcuucgccagcggccagaacaucaccgaggaguucuaccagagcaccugcagcgccgugagcaagggcuaccugagcgcccugagaaccggcugguacaccagcgugaucaccaucgagcugagcaacaucaaggagaacaagugcaacggcaccgacgccaaggugaagcugaucaagcaggagcuggacaaguacaagaacgccgugaccgagcugcagcugcugaugcagagcacccccgccaccggcagcggcagcgccaucgccagcggcguggccgugugcaaggugcugcaccuggagggcgaggugaacaagaucaagagcgcccugcugagcaccaacaaggccguggugagccugagcaacggcgugagcgugcugaccuucaaggugcuggaccugaagaacuacaucgacaagcagcugcugcccauccugaacaagcagagcugcagcaucagcaacaucgagaccgugaucgaguuccagcagaagaacaacagacugcuggagaucaccagagaguucagcgugaacgccggcgugaccacccccgugagcaccuacaugcugaccaacagcgagcugcugagccugaucaacgacaugcccaucaccaacgaccagaagaagcugaugagcaacaacgugcagaucgugagacagcagagcuacagcaucaugugcaucaucaaggaggaggugcuggccuacguggugcagcugccccuguacggcgugaucgacacccccugcuggaagcugcacaccagcccccugugcaccaccaacaccaaggagggcagcaacaucugccugaccagaaccgacagaggcugguacugcgacaacgccggcagcgugagcuucuucccccaggccgagaccugcaaggugcagagcaacagaguguucugcgacaccaugaacagcagaacccugcccagcgaggugaaccugugcaacguggacaucuucaaccccaaguacgacugcaagaucaugaccagcaagaccgacgugagcagcagcgugaucaccagccugggcgccaucgugagcugcuacggcaagaccaagugcaccgccagcaacaagaacagaggcaucaucaagaccuucagcaacggcugcgacuacgugagcaacaagggcguggacaccgugagcgugggcaacacccuguacuacgugaacaagcaggagggcaagagccuguacgugaagggcgagcccaucaucaacuucuacgacccccugguguuccccagcgacgaguucgacgccagcaucagccaggugaacgagaagaucaaccagagccuggccuucaucagaaagagcgacgagcugcugcacaacgugaacgccggcaagagcaccaccaacaucaugaucaccaccaucaucaucgugaucaucgugauccugcugagccugaucgccgugggccugcugcuguacugcaaggccagaugaggacuaguuauaagacugacuagcccgaugggccucccaacgggcccuccuccccuccuugcaccgagauuaauaaaaaaaaaaaaaaaaaaaaaaaaaaaaaaaaaaaaaaaaaaaaaaaaaaaaaaaaaaaaaaaaugcaucccccccccccccccccccccccccccccccaaaggcucuuuucagagccaccagaauu

SEQ ID NO: 4585 - RNA, 1762 nt, Artificial Sequence
  mRNA product Design i-3 comprising derived and/or modified sequence from HRSV(A2)__F-del_DSCav1_mut0 (opt5)
gggagaaagcuuaccauggagcugcucauccugaaggccaacgcuauuaccacaauccuuacggccgugaccuucugcuuugcgagcggccagaauauuacagaagaguucuaccaauccaccuguucugcugucagcaaaggguaucuguccgcccucagaacaggaugguacaccucuguuaucacaauugaacugagcaacaucaaggagaauaaaugcaacggcaccgacgccaaggugaaacuuaucaagcaggaacuggauaaguauaaaaaugcugugacggagcuccagcugcugaugcaguccacccccgccacagggucuggaagcgcuauugccuccggcgucgcgguguguaagguucuccaccuggagggggaagugaacaaaaucaagagcgcccuucugucuaccaauaaagcugucgugucccucagcaacggaguuucugugcugacauuuaagguccuugaccugaagaauuacauugauaaacaacuccugccuauccugaacaagcaguccugcagcauuucuaauaucgagaccgugauugaguuccagcagaaaaacaaucggcuccuggaaaucacgcgcgaguuuuccgugaacgccggcgucacaaccccgguuagcacauauaugcuuaccaauuccgaacugcucucucugaucaacgacaugcccauuaccaacgaucaaaagaaacuuaugagcaauaacgugcagaucgugagacagcaguccuacagcauuauguguaucauuaaggaggaaguccuggcuuaugugguucaacucccucuguacggcgugaucgacacacccugcuggaaacugcauacgucuccucucuguaccacaaauaccaaggagggguccaacaucugccugacacggaccgaucgcggaugguacugugacaaugccggcagcgucucuuucuuuccccaggcggaaacgugcaaggugcagagcaacagaguuuucugugauacaaugaacuccagaacccugccuucugaggugaaucucugcaaugucgacauuuuuaacccgaaauaugauugcaagaucaugaccagcaaaacagacguguccagcucugucauuaccucccugggggccaucgugagcuguuacggaaagacaaaaugcacggcuucuaauaagaaccggggcauuaucaagaccuucuccaaugggugugauuauguuagcaacaaaggaguggacacagucuccgugggcaauacccuuuacuauguuaacaagcaagagggcaaaucucuguacgugaagggggaacccaucauuaacuuuuaugacccucucgucuuccccagcgaugaguuugacgccuccaucucucaggugaaugagaaaauuaaccagagccuggcuuucauccgcaaguccgaugaacugcuccacaaugugaacgccggaaagagcacaaccaauauuaugaucacgaccauuaucaucguuauuaucgucauucugcuuucucugaucgccgugggccuccugcuguacugcaaagcuagaugaggacuaguuauaagacugacuagcccgaugggccucccaacgggcccuccuccccuccuugcaccgagauuaauaaaaaaaaaaaaaaaaaaaaaaaaaaaaaaaaaaaaaaaaaaaaaaaaaaaaaaaaaaaaaaaaugcaucccccccccccccccccccccccccccccccaaaggcucuuuucagagccaccagaauu

SEQ ID NO: 4586 - RNA, 1762 nt, Artificial Sequence
  mRNA product Design i-3 comprising derived and/or modified sequence from HRSV(A2)__F-del_DSCav1_mut0 (opt6)
gggagaaagcuuaccauggaauuacucauccucaaagcaaacgcaauaacaacaauacuaacagcagucacuuucugcuucgcauccggacaaaauaucacagaagaauuuuaccaauccaccugcucugcugucuccaaaggauaccuaucugcccucagaaccgguugguauacaucugucauaaccauagaacuaucaaacauuaaagaaaacaaauguaacggaacagacgcaaaagucaaacuuauaaaacaagaauuagacaaauacaaaaacgcagucacagaauuacaacuacuaaugcaaucaaccccagcaaccggaucaggauccgcaauagcuucaggaguagcaguauguaaaguucuacacuuagaaggagaagucaacaaaauuaaauccgcacuauuaucaaccaacaaagcagucguaucuuuaucaaacggaguaucuguacuuacauucaaaguacuagaccuaaaaaauuacauugauaaacaauuacuaccaauacuaaacaaacaaucauguuccaucucuaacauagaaacaguaauagaauuucaacaaaaaaauaacagauuacuugaaaucacccgagaauuuucaguaaacgcaggaguaaccacacccguaucuacauacaugcuaacaaacucugaacuucugagccuaauaaaugacaugccaauaaccaacgaccaaaaaaaacuaauguccaacaacguacaaauaguacgacaacaaucuuacucaaucaugugcauaaucaaagaagaaguacuagcuuauguaguccaacuuccacucuacggaguaauagacacccccugcuggaaacuacacacaucaccacuaugcacaacaaacacaaaagaaggcucaaacauaugccuaacaagaacugacagaggaugguauugugacaaugcaggcucugucucauucuuuccacaagccgaaacaugcaaaguucaaucaaaccgaguuuucugugacacaaugaacucuagaacucucccaucagaagucaacuuaugcaacguugacauauucaacccaaaauaugacuguaaaauaaugacuuccaaaacugauguaucauccuccgucauaacaucccuaggagcuauuguaucauguuacgggaaaaccaaaugcacagccucaaacaaaaaccgcgguaucauaaaaacauuuucaaacggaugugauuacguaagcaauaaaggaguagacaccguaucaguaggaaauacacuauacuauguaaauaaacaagaaggaaaaucacuauaugucaaaggagaaccaaucauaaauuucuaugacccacuuguauucccauccgaugaauuugacgcaagcauuucacaggucaacgaaaaaauaaaccaaucacuagccuucaucagaaaaucagacgaacuacuacauaacguaaacgccggaaaaucaacaaccaacauaaugauaacaacaaucauaauaguuaucauaguaauacuacuaucucuaauagcugucggacucuuacuauauugcaaagcccgauaaggacuaguuauaagacugacuagcccgaugggccucccaacgggcccuccuccccuccuugcaccgagauuaauaaaaaaaaaaaaaaaaaaaaaaaaaaaaaaaaaaaaaaaaaaaaaaaaaaaaaaaaaaaaaaaaugcaucccccccccccccccccccccccccccccccaaaggcucuuuucagagccaccagaauu

SEQ ID NO: 4587 - RNA, 1762 nt, Artificial Sequence
  mRNA product Design i-3 comprising derived and/or modified sequence from HRSV(A2)__F-del_DSCav1_mut0 (opt11)
gggagaaagcuuaccauggaacuacuaauccugaaagccaacgccauaaccacaauccuuaccgcagucaccuucugcuucgccuccggucaaaacaucacagaagaguucuaccaauccaccuguuccgcagucagcaaaggcuaccucuccgcacuccgaaccggaugguacaccagcgucaucaccaucgaacuauccaacauaaaggaaaauaagugcaaugguacagaugccaaggucaaacucauaaagcaagaacucgacaaauacaaaaacgccgucaccgaacuacaacuacuaaugcaaucuacccccgcaacaggcucagguuccgccauagccuccggcgucgccguuugcaaaguccuccaccucgaaggcgaaguaaacaaaaucaaauccgcccuacucucaaccaacaaagcagucgucucccucucaaacggagucucgguccucaccuucaaaguccucgaccucaaaaacuauauagacaaacaacuccuacccauacucaacaaacaguccugcagcauauccaacaucgaaaccgugaucgaguuccaacagaaaaacaacagacuccucgaaaucacucgagaguucuccguaaacgccggcgucacaaccccagucucaacauacaugcucaccaacagcgaacuccuaucacuaaucaacgacaugccuaucacaaaugaucagaagaaacuaaugagcaacaacguccaaaucguccgccaacaaucauacuccaucaugugcaucauaaaagaagaaguccuagccuacgugguccagcuaccccucuacggcguaauugacaccccuugcuggaaacuacacacuucaccccucugcacaaccaacaccaaagaagguucaaacaucugccucacacgaacagaccgcggcugguacugcgacaacgccggauccguauccuucuucccccaagcagaaaccugcaaaguucaauccaaccggguauucugcgacaccaugaacucaagaacccuucccuccgaaguaaaucuaugcaacgucgacauauucaacccaaaauacgacugcaaaaucaugaccuccaaaaccgaugucuccagcagcgucaucaccagccucggcgccaucgucuccugcuacggcaaaacaaaauguacagcauccaacaaaaaccgaggcauaaucaaaaccuucuccaacgggugcgauuacgucagcaacaaaggcgucgacaccgucuccgugggcaacacccuauacuacgucaacaaacaagaaggcaaaucacuguacguaaagggcgaacccaucaucaacuucuaugacccucugguguucccauccgaugaauuugacgcauccauaucucaggucaacgaaaagaucaaccaaucccucgccuucauacgcaaauccgacgaacuccuacacaacgucaacgcugguaaaagcaccaccaacaucaugaucaccacaaucaucaucgucauaaucguuauccuacucucccuuauagcagucggacuccuccucuacugcaaagcccgcuaaggacuaguuauaagacugacuagcccgaugggccucccaacgggcccuccuccccuccuugcaccgagauuaauaaaaaaaaaaaaaaaaaaaaaaaaaaaaaaaaaaaaaaaaaaaaaaaaaaaaaaaaaaaaaaaaugcaucccccccccccccccccccccccccccccccaaaggcucuuuucagagccaccagaauu

SEQ ID NO: 4588 - protein, 535 aa, Artificial Sequence
  derived and/or modified protein sequence (artificial) from HRSV(A2)__F_DSCav1_mut4
MELLILKANAITTILTAVTFCFASGQNITEEFYQSTCSAVSKGYLSALRTGWYTSVITIELSNIKENKCNGTDAKVKLIKQELDKYKNAVTELQLLMQSTPATGSGSAICSGVAVCKVLHLEGEVNKIKSALLSTNKAVVSLSNGVSVLTFKVLDLKNYIDKQLLPILNKQSCSISNIETVIEFQQKNNRLLEITREFSVNAGVTTPVSTYMLTNSELLSLINDMPITNDQKKLMSNNVQIVRQQSYSIMCIIKEEVLAYVVQLPLYGVIDTPCWKLHTSPLCTTNTKEGSNICLTRTDRGWYCDNAGSVSFFPQAETCKVQSNRVFCDTMNSRTLPSEVNLCNVDIFNPKYDCKIMTSKTDVSSSVITSLGAIVSCYGKTKCTASNKNRGIIKTFSNGCDYVSNKGVDTVSVGNTLYCVNKQEGKSLYVKGEPIINFYDPLVFPSDEFDASISQVNEKINQSLAFIRKSDELLHNVNAGKSTTNIMITTIIIVIIVILLSLIAVGLLLYCKARSTPVTLSKDQLSGINNIAFSN

SEQ ID NO: 4589 - RNA, 1608 nt, Artificial Sequence
  derived and/or modified CDS sequence (opt1) from HRSV(A2)__F_DSCav1_mut4
auggagcugcucauccugaaggccaacgccaucaccaccauccugacggcggugaccuucugcuucgccagcggccagaacaucaccgaggaguucuaccaguccacgugcagcgccgucuccaagggguaccucagcgcccugcggaccggcugguacaccuccgugaucaccaucgagcugagcaacaucaaggagaacaagugcaacgggaccgacgccaaggugaagcucaucaagcaggagcuggacaaguacaagaacgcggucacggagcugcagcuccugaugcaguccaccccggcaaccggcuccggcuccgccaucugcagcggcgucgccgugugcaaggugcugcaccucgagggggaggucaacaagaucaagagcgcccugcuguccaccaacaaggccguggugagccucuccaacggcgucagcgugcugaccuucaaggugcuggaccucaagaacuacaucgacaagcagcugcugcccauccugaacaagcagagcugcuccaucagcaacaucgagacggugaucgaguuccagcagaagaacaaccggcuccuggagaucacccgcgaguucagcgugaacgccggggucaccacccccguguccacguacaugcugaccaacagcgagcuccugucccugaucaacgacaugccgaucaccaacgaccagaagaagcucaugagcaacaacgugcagaucguccggcagcaguccuacagcaucaugugcaucaucaaggaggaggugcuggcguacgugguccagcugccccucuacggcgugaucgacacccccugcuggaagcugcacacgagcccccugugcaccaccaacaccaaggagggguccaacaucugccucacgcgcaccgaccggggcugguacugcgacaacgccggcagcgucuccuucuucccgcaggccgagaccugcaaggugcagagcaaccgcguguucugcgacaccaugaacucccggacgcugcccagcgagguaaaccucugcaacgucgacaucuucaaccccaaguacgacugcaagaucaugaccuccaagaccgacgugagcuccagcgugaucaccucccugggggccaucgucagcugcuacggcaagacgaagugcaccgccagcaacaagaaccgggggaucaucaagaccuucuccaacggcugcgacuacgugagcaacaagggcguggacaccguguccgucgggaacacccuguacugcgugaacaagcaggagggcaagagccucuacgugaagggggagcccaucaucaacuucuacgacccgcuggucuuccccuccgacgaguucgacgcgagcaucucccaggugaacgagaagaucaaccagagccuggccuucauccgcaaguccgacgagcugcuccacaacgugaacgccggcaagagcacgaccaacaucaugaucaccaccaucaucaucgucaucaucgugauccugcugucccucaucgccguggggcugcugcucuacugcaaggcccggagcacgcccgucacccuguccaaggaccagcugagcggcaucaacaacaucgcguucuccaacuga

SEQ ID NO: 4590 - RNA, 1608 nt, Artificial Sequence
  derived and/or modified CDS sequence (opt1) from HRSV(A2)__F_DSCav1_mut4
auggagcugcucauccugaaggccaacgccaucaccaccauccugacggcggugaccuucugcuucgccagcggccagaacaucaccgaggaguucuaccaguccacgugcagcgccgucuccaagggguaccucagcgcccugcgcaccggcugguacaccuccgugaucaccaucgagcugagcaacaucaaggagaacaagugcaacgggaccgacgccaaggugaagcucaucaagcaggagcuggacaaguacaagaacgcggucacggagcugcagcuccugaugcaguccacccccgccaccggcagcggguccgccaucugcagcggcguggccgugugcaagguccugcaccucgagggcgaggugaacaagaucaaguccgcgcugcugagcaccaacaaggccguggucucccucagcaacgggguguccgugcugacguucaagguccuggaccucaagaacuacaucgacaagcagcugcugccgauccucaacaagcagagcugcuccaucagcaacaucgagaccgugaucgaguuccagcagaagaacaaccggcugcuggagaucacccgcgaguucuccgugaacgccggcgucaccacgcccgugagcaccuacaugcucaccaacagcgagcugcugucccucaucaacgacaugcccaucaccaacgaccagaagaagcugaugagcaacaacgugcagaucguccggcagcaguccuacagcaucaugugcaucaucaaggaggaggugcuggccuacgugguccagcucccccuguacggggugaucgacacgccgugcuggaagcugcacaccagcccccucugcaccaccaacacgaaggagggcuccaacaucugccugacccgcaccgaccgggggugguacugcgacaacgccggcuccgugagcuucuucccccaggcggagaccugcaagguccaguccaaccgcguguucugcgacacgaugaacagccggacccuccccuccgaggucaaccugugcaacguggacaucuucaacccgaaguacgacugcaagaucaugaccagcaagaccgacguguccagcuccgucaucacgagccugggcgccaucguguccugcuacgggaagaccaagugcaccgccagcaacaagaaccggggcaucaucaagaccuucuccaacgggugcgacuacgugagcaacaagggcgucgacacggugagcgugggcaacacccucuacugcgucaacaagcaggaggggaagucccuguacgugaagggcgagcccaucaucaacuucuacgacccccugguguuccccagcgacgaguucgacgccuccaucagccaggucaacgagaagaucaaccagucccucgccuucauccgcaagagcgacgagcugcugcacaacgugaacgcggggaaguccaccaccaacaucaugaucaccacgaucaucaucgugaucaucgucauccuccugagccugaucgccgugggccuccugcuguacugcaaggcccgguccaccccggugacccugagcaaggaccagcucuccgggaucaacaacaucgccuucagcaacuga

SEQ ID NO: 4591 - RNA, 1608 nt, Artificial Sequence
  derived and/or modified CDS sequence (opt2) from HRSV(A2)__F_DSCav1_mut4
auggagcuccucauccucaaggccaacgccaucaccaccauccucaccgccgucaccuucugcuucgccuccggccagaacaucaccgaggaguucuaccaguccaccugcuccgccgucuccaagggcuaccucuccgcccuccgcaccggcugguacaccuccgucaucaccaucgagcucuccaacaucaaggagaacaagugcaacggcaccgacgccaaggucaagcucaucaagcaggagcucgacaaguacaagaacgccgucaccgagcuccagcuccucaugcaguccacccccgccaccggcuccggcuccgccaucugcuccggcgucgccgucugcaagguccuccaccucgagggcgaggucaacaagaucaaguccgcccuccucuccaccaacaaggccgucgucucccucuccaacggcgucuccguccucaccuucaagguccucgaccucaagaacuacaucgacaagcagcuccuccccauccucaacaagcaguccugcuccaucuccaacaucgagaccgucaucgaguuccagcagaagaacaaccgccuccucgagaucacccgcgaguucuccgucaacgccggcgucaccacccccgucuccaccuacaugcucaccaacuccgagcuccucucccucaucaacgacaugcccaucaccaacgaccagaagaagcucauguccaacaacguccagaucguccgccagcaguccuacuccaucaugugcaucaucaaggaggagguccucgccuacgucguccagcucccccucuacggcgucaucgacacccccugcuggaagcuccacaccuccccccucugcaccaccaacaccaaggagggcuccaacaucugccucacccgcaccgaccgcggcugguacugcgacaacgccggcuccgucuccuucuucccccaggccgagaccugcaagguccaguccaaccgcgucuucugcgacaccaugaacucccgcacccuccccuccgaggucaaccucugcaacgucgacaucuucaaccccaaguacgacugcaagaucaugaccuccaagaccgacgucuccuccuccgucaucaccucccucggcgccaucgucuccugcuacggcaagaccaagugcaccgccuccaacaagaaccgcggcaucaucaagaccuucuccaacggcugcgacuacgucuccaacaagggcgucgacaccgucuccgucggcaacacccucuacugcgucaacaagcaggagggcaagucccucuacgucaagggcgagcccaucaucaacuucuacgacccccucgucuuccccuccgacgaguucgacgccuccaucucccaggucaacgagaagaucaaccagucccucgccuucauccgcaaguccgacgagcuccuccacaacgucaacgccggcaaguccaccaccaacaucaugaucaccaccaucaucaucgucaucaucgucauccuccucucccucaucgccgucggccuccuccucuacugcaaggcccgcuccacccccgucacccucuccaaggaccagcucuccggcaucaacaacaucgccuucuccaacuga

SEQ ID NO: 4592 - RNA, 1608 nt, Artificial Sequence
  derived and/or modified CDS sequence (opt3) from HRSV(A2)__F_DSCav1_mut4
auggagcugcucauccuuaaggccaacgcuauuaccacaauacugacugcagugacguucugcuuugccagcggccagaauaucaccgaagaguucuaccaauccacauguucugcggucucaaaaggguauuugagugcuuuaagaacuggaugguacaccagcguuauuacaaucgaacuguccaacauuaaggagaauaaaugcaacgguaccgacgccaaggugaaacuaaucaagcaggaacucgauaaguauaaaaaugcaguaacugagcugcagcuucugaugcagucuacacccgccaccggcucggggucagcuauauguagcggaguggcagucugcaagguguugcaccucgagggcgaaguuaacaaaaucaagagugcccugcuguccacgaauaaagcuguggucucucucagcaacgguguguccguauuaacuuuuaagguucuggaccuuaagaauuacauugauaaacaauugcugccuauccuaaacaagcagucauguaguauuagcaauaucgagaccgugauagaguuccagcagaaaaacaauaggcuccuggaaauuacacgggaguuuucugucaacgccggggugacuaccccaguguccacauauaugcuuaccaauucagaacuguugagccucaucaacgacaugccgauuacgaacgaucaaaagaaacugaugaguaauaacguccagaucguucgccagcagucuuacuccaucaugugcauuauaaaggaggaaguguuagcguauguagugcaacugccccucuacggagucaucgacacuccuuguuggaaacuucauacaagcccacugugcaccacuaauacaaaggagggcucgaacauuuguuugacccgaacggaucguggcugguacugcgacaaugcagggucuguguccuucuuuccccaggccgaaaccuguaagguucagucaaacagaguguucugcgauacaaugaauaguagaacucugccuagcgaggucaaccucugcaauguggacaucuuuaacccaaaauaugauuguaagauaaugaccuccaaaacagacguaucuagcucaguuauuaccagucugggagcuaucguguccugcuacgguaagacuaaauguacagccagcaauaagaacaggggcaucauuaagaccuucucuaaugggugcgauuaugucucaaacaaaggaguggacacugucagugugggcaauacgcuuuacuguguuaacaagcaagaggguaaaagccuguaugugaagggggaacccaucauuaacuuuuacgacccuuugguauucccauccgaugaguuugacgcaucuauaucgcaggucaaugagaaaaucaaccagagccucgcuuucauucggaaguccgaugaacuguuacacaaugugaacgccggaaagucaacaaccaauaucaugaucacuaccauuauaaucguuauuaucgugauucugcuaagucucaucgcggucggccugcuuuuguauugcaaagcccgcucuacaccggugacccugagcaaggaccagcucuccggcauaaacaauaucgcauucucaaacuga

SEQ ID NO: 4593 - RNA, 1608 nt, Artificial Sequence
  derived and/or modified CDS sequence (opt4) from HRSV(A2)__F_DSCav1_mut4
auggagcugcugauccugaaggccaacgccaucaccaccauccugaccgccgugaccuucugcuucgccagcggccagaacaucaccgaggaguucuaccagagcaccugcagcgccgugagcaagggcuaccugagcgcccugagaaccggcugguacaccagcgugaucaccaucgagcugagcaacaucaaggagaacaagugcaacggcaccgacgccaaggugaagcugaucaagcaggagcuggacaaguacaagaacgccgugaccgagcugcagcugcugaugcagagcacccccgccaccggcagcggcagcgccaucugcagcggcguggccgugugcaaggugcugcaccuggagggcgaggugaacaagaucaagagcgcccugcugagcaccaacaaggccguggugagccugagcaacggcgugagcgugcugaccuucaaggugcuggaccugaagaacuacaucgacaagcagcugcugcccauccugaacaagcagagcugcagcaucagcaacaucgagaccgugaucgaguuccagcagaagaacaacagacugcuggagaucaccagagaguucagcgugaacgccggcgugaccacccccgugagcaccuacaugcugaccaacagcgagcugcugagccugaucaacgacaugcccaucaccaacgaccagaagaagcugaugagcaacaacgugcagaucgugagacagcagagcuacagcaucaugugcaucaucaaggaggaggugcuggccuacguggugcagcugccccuguacggcgugaucgacacccccugcuggaagcugcacaccagcccccugugcaccaccaacaccaaggagggcagcaacaucugccugaccagaaccgacagaggcugguacugcgacaacgccggcagcgugagcuucuucccccaggccgagaccugcaaggugcagagcaacagaguguucugcgacaccaugaacagcagaacccugcccagcgaggugaaccugugcaacguggacaucuucaaccccaaguacgacugcaagaucaugaccagcaagaccgacgugagcagcagcgugaucaccagccugggcgccaucgugagcugcuacggcaagaccaagugcaccgccagcaacaagaacagaggcaucaucaagaccuucagcaacggcugcgacuacgugagcaacaagggcguggacaccgugagcgugggcaacacccuguacugcgugaacaagcaggagggcaagagccuguacgugaagggcgagcccaucaucaacuucuacgacccccugguguuccccagcgacgaguucgacgccagcaucagccaggugaacgagaagaucaaccagagccuggccuucaucagaaagagcgacgagcugcugcacaacgugaacgccggcaagagcaccaccaacaucaugaucaccaccaucaucaucgugaucaucgugauccugcugagccugaucgccgugggccugcugcuguacugcaaggccagaagcacccccgugacccugagcaaggaccagcugagcggcaucaacaacaucgccuucagcaacuga

SEQ ID NO: 4594 - RNA, 1608 nt, Artificial Sequence
  derived and/or modified CDS sequence (opt5) from HRSV(A2)__F_DSCav1_mut4
auggagcugcucauccugaaggccaacgcuauuaccacaauccuuacggccgugaccuucugcuuugcgagcggccagaauauuacagaagaguucuaccaauccaccuguucugcugucagcaaaggguaucuguccgcccucagaacaggaugguacaccucuguuaucacaauugaacugagcaacaucaaggagaauaaaugcaacggcaccgacgccaaggugaaacuuaucaagcaggaacuggauaaguauaaaaaugcugugacggagcuccagcugcugaugcaguccacccccgccacagggucuggaagcgcuauuuguuccggcgucgccgugugcaagguucuccaccuggagggggaagugaacaaaaucaagagcgcgcuucugucuaccaauaaagccgucgugucccucagcaacggaguuucugugcugacauuuaagguccuugaccugaagaauuacauugauaaacaacuccugccuauccugaacaagcaguccuguagcauuucuaauaucgagaccgugauugaguuccagcagaaaaacaaucggcuccuggaaaucacgcgcgaguuuuccgugaacgcuggcgucacaaccccgguuagcacauauaugcuuaccaauuccgaacugcucucucugaucaacgacaugcccauuaccaacgaucaaaagaaacuuaugagcaauaacgugcagaucgugagacagcaguccuacagcauuaugugcaucauuaaggaggaaguccuggccuaugugguucaacucccucuguacggcgugaucgacacacccuguuggaaacugcauacgucuccucucugcaccacaaauaccaaggagggguccaacaucugucugacacggaccgaucgcggaugguacugcgacaaugcuggcagcgucucuuucuuuccccaggccgaaacguguaaggugcagagcaacagaguuuucugcgauacaaugaacuccagaacccugccuucugaggugaaucucugcaaugucgacauuuuuaacccgaaauaugauuguaagaucaugaccagcaaaacagacguguccagcucugucauuaccucccugggggcgaucgugagcugcuacggaaagacaaaauguacggccucuaauaagaaccggggcauuaucaagaccuucuccaaugggugcgauuauguuagcaacaaaggaguggacacagucuccgugggcaauacccuuuacuguguuaacaagcaagagggcaaaucucuguaugugaagggggaacccaucauuaacuuuuacgacccucucgucuuccccagcgaugaguuugacgcuuccaucucucaggugaaugagaaaauuaaccagagccuggccuucauccgcaaguccgaugaacugcuccacaaugugaacgcuggaaagagcacaaccaauauuaugaucacgaccauuaucaucguuauuaucgucauucugcuuucucugaucgccgugggccuccugcuguauugcaaagccagauccacaccugugacccuuagcaaggaccagcucucugggauuaacaauaucgcuuucuccaacuga

SEQ ID NO: 4595 - RNA, 1608 nt, Artificial Sequence
  derived and/or modified CDS sequence (opt6) from HRSV(A2)__F_DSCav1_mut4
auggaacuucuaauacucaaagccaacgcaauaacaacaauauuaacagccguaacauuuugcuucgcaucaggucaaaacauaacagaagaguucuaccaauccacaugcucagcaguaucaaaaggauauuuaagugcucuaagaacaggaugguacacauccguaauaacaaucgaacuaucaaacauaaaagaaaauaaauguaauggaacagacgccaaaguaaaauuaaucaaacaagaacuagacaaauacaaaaacgcaguuacugaauuacaauuauuaaugcaaucaacaccggccacaggaucuggaucagcaauaugcucaggaguagcagucugcaaaguauuacaccuagaaggggaaguuaauaaaaucaaaucagcauuacuauccaccaacaaagcgguaguuucacucuccaacggcguaucugucuuaacauucaaaguauuagaccuaaaaaacuacauugacaaacaacuacuaccaauccuaaacaaacaaucauguuccauaagcaauauagaaacaguaauagaauuucaacaaaaaaacaacagacuauuagaaauaacaagagaauuuuccgucaaugcaggaguuacuaccccugucuccaccuauaugcuaaccaauuccgaacucuuaucauuaauaaacgacaugccuaucacaaaugaccaaaaaaaauuaaugagcaacaacguacaaauaguacgacaacaaucauacucaaucaugugcauaauaaaagaagaaguccuagcauacguuguacaacuaccacuauacggagucauagauaccccaugcuggaaacuccauacaagcccacuaugcacuacaaacacaaaagaaggcucuaauauaugucuaacaagaacagaccgaggaugguacugcgauaaugccggcucagucucauucuuuccgcaagccgaaacuuguaaaguacaaaguaacagaguauuuugugacaccaugaacucaagaacccucccaagcgaagucaaucuaugcaacguugauauauucaaucccaaauacgacugcaaaaucaugaccucaaaaacagacgucagcucauccguuauaacaucacuaggagccaucguaucuugcuauggaaaaacaaaaugcacagcaagcaauaaaaacagaggcauaauaaaaacauucucaaauggaugcgacuacguaucaaacaaaggagucgacacaguuuccguaggaaacacuuuauacugcguaaacaaacaagaaggaaaaucauuauacgucaaaggugaaccaauaauaaacuucuacgauccacuuguauucccaucagacgaauuugacgcaucaauuucacaaguaaacgaaaaaauaaaccaaucacucgcauucauaagaaaaucagaugaacuacuacauaacguaaacgcaggaaaauccacaacaaacaucaugauaacaaccaucauaaucguaauaaucguaauacuauuaucccuaauugcaguaggauuacucuuauauugcaaagcaagaucaacaccaguaacccucaguaaagaccaacuauccggaauaaauaacaucgcauucucaaacuaa

SEQ ID NO: 4596 - RNA, 1608 nt, Artificial Sequence
  derived and/or modified CDS sequence (opt11) from HRSV(A2)__F_DSCav1_mut4
auggaacugcucauccucaaagccaacgccaucaccaccauucuuaccgccgucacauucugcuucgccucaggccaaaacaucaccgaagaauuuuaccaauccacuuguucagccgucucaaaaggauaccuaucagcccuccguaccggcugguacaccucggucauaacaauagaacucuccaacauaaaagaaaacaaaugcaacggcaccgacgccaaggucaaacugauaaaacaagaacuugauaaauacaaaaacgccgucacugaacuccaacuccucaugcaauccacucccgcuacuggcucuggcuccgccaucugcucuggcgucgccgucuguaaaguacuccaccucgaaggggaagucaacaaaaucaaaucagcccuccuuagcaccaacaaggccgucgucucccucucaaacggagucagcguccucaccuucaagguccucgaccucaagaacuacaucgacaaacaacuccugcccauccuaaauaaacaauccugcucuaucuccaauaucgaaaccguuauagaguuccaacagaaaaacaaccgacuccucgaaaucacccgcgaguucuccgucaacgcaggcgucaccaccccugugucaaccuacaugcucaccaacagcgaacuacucucacucaucaaugacaugcccaucaccaacgaccaaaagaaacucauguccaacaacguccaaaucguacgucaacaauccuacagcaucaugugcaucauaaaagaagaaguccucgccuacgucguccaacuuccccucuacggcgucauagacacccccugcuggaaacugcauaccucaccccuaugcaccaccaacacuaaagaaggcuccaacaucugccucacccgcacggaccgcggcugguacugcgacaacgccggcuccgucuccuucuucccccaagccgaaacuuguaaaguccaauccaacagagucuucugcgacaccaugaacucuagaacgcugccauccgagguaaaccuaugcaacgucgacaucuucaaucccaaauacgacugcaagaucaugaccucaaaaaccgacguauccuccucaguaaucaccagucucggagcuaucgucuccugcuacggcaaaaccaaaugcacggccucuaacaaaaaccgcggcaucaucaaaaccuucucaaacggaugcgacuacgucagcaacaaaggcguagauaccgucucugucggcaacacacuguacugcguaaacaagcaagaaggaaaaucccucuacguaaaaggcgaacccaucaucaacuucuacgacccccucguuuuccccucagaugaauuugacgccucgauaucacaagucaacgaaaagauaaaucagucccucgccuucauccgaaaauccgacgaacuccuccacaacguuaacgcaggaaaguccaccacaaacaucaugauaacuacaaucauaauagucauuaucgucauacuccucucccuaaucgccguaggccugcuacucuacugcaaagcccgcucaacccccgucacucucucaaaagaccaacucuccggcaucaauaacaucgccuucucaaacuaa

SEQ ID NO: 4597 - RNA, 1884 nt, Artificial Sequence
  mRNA product Design a-1 comprising derived and/or modified sequence from HRSV(A2)__F_DSCav1_mut4 (opt1)
gggagagucccgcagucggcguccagcggcucugcuuguucgugugugugucguugcaggccuuauucaagcuuaccauggagcugcucauccugaaggccaacgccaucaccaccauccugacggcggugaccuucugcuucgccagcggccagaacaucaccgaggaguucuaccaguccacgugcagcgccgucuccaagggguaccucagcgcccugcggaccggcugguacaccuccgugaucaccaucgagcugagcaacaucaaggagaacaagugcaacgggaccgacgccaaggugaagcucaucaagcaggagcuggacaaguacaagaacgcggucacggagcugcagcuccugaugcaguccaccccggcaaccggcuccggcuccgccaucugcagcggcgucgccgugugcaaggugcugcaccucgagggggaggucaacaagaucaagagcgcccugcuguccaccaacaaggccguggugagccucuccaacggcgucagcgugcugaccuucaaggugcuggaccucaagaacuacaucgacaagcagcugcugcccauccugaacaagcagagcugcuccaucagcaacaucgagacggugaucgaguuccagcagaagaacaaccggcuccuggagaucacccgcgaguucagcgugaacgccggggucaccacccccguguccacguacaugcugaccaacagcgagcuccugucccugaucaacgacaugccgaucaccaacgaccagaagaagcucaugagcaacaacgugcagaucguccggcagcaguccuacagcaucaugugcaucaucaaggaggaggugcuggcguacgugguccagcugccccucuacggcgugaucgacacccccugcuggaagcugcacacgagcccccugugcaccaccaacaccaaggagggguccaacaucugccucacgcgcaccgaccggggcugguacugcgacaacgccggcagcgucuccuucuucccgcaggccgagaccugcaaggugcagagcaaccgcguguucugcgacaccaugaacucccggacgcugcccagcgagguaaaccucugcaacgucgacaucuucaaccccaaguacgacugcaagaucaugaccuccaagaccgacgugagcuccagcgugaucaccucccugggggccaucgucagcugcuacggcaagacgaagugcaccgccagcaacaagaaccgggggaucaucaagaccuucuccaacggcugcgacuacgugagcaacaagggcguggacaccguguccgucgggaacacccuguacugcgugaacaagcaggagggcaagagccucuacgugaagggggagcccaucaucaacuucuacgacccgcuggucuuccccuccgacgaguucgacgcgagcaucucccaggugaacgagaagaucaaccagagccuggccuucauccgcaaguccgacgagcugcuccacaacgugaacgccggcaagagcacgaccaacaucaugaucaccaccaucaucaucgucaucaucgugauccugcugucccucaucgccguggggcugcugcucuacugcaaggcccggagcacgcccgucacccuguccaaggaccagcugagcggcaucaacaacaucgcguucuccaacugaggacuagucccuguucccagagcccacuuuuuuuucuuuuuuugaaauaaaauagccugucuuucagaucuaaaaaaaaaaaaaaaaaaaaaaaaaaaaaaaaaaaaaaaaaaaaaaaaaaaaaaaaaaaaaaaaugcaucccccccccccccccccccccccccccccccaaaggcucuuuucagagccaccagaauu

SEQ ID NO: 4598 - RNA, 1884 nt, Artificial Sequence
  mRNA product Design a-1 comprising derived and/or modified sequence from HRSV(A2)__F_DSCav1_mut4 (opt1)
gggagagucccgcagucggcguccagcggcucugcuuguucgugugugugucguugcaggccuuauucaagcuuaccauggagcugcucauccugaaggccaacgccaucaccaccauccugacggcggugaccuucugcuucgccagcggccagaacaucaccgaggaguucuaccaguccacgugcagcgccgucuccaagggguaccucagcgcccugcgcaccggcugguacaccuccgugaucaccaucgagcugagcaacaucaaggagaacaagugcaacgggaccgacgccaaggugaagcucaucaagcaggagcuggacaaguacaagaacgcggucacggagcugcagcuccugaugcaguccacccccgccaccggcagcggguccgccaucugcagcggcguggccgugugcaagguccugcaccucgagggcgaggugaacaagaucaaguccgcgcugcugagcaccaacaaggccguggucucccucagcaacgggguguccgugcugacguucaagguccuggaccucaagaacuacaucgacaagcagcugcugccgauccucaacaagcagagcugcuccaucagcaacaucgagaccgugaucgaguuccagcagaagaacaaccggcugcuggagaucacccgcgaguucuccgugaacgccggcgucaccacgcccgugagcaccuacaugcucaccaacagcgagcugcugucccucaucaacgacaugcccaucaccaacgaccagaagaagcugaugagcaacaacgugcagaucguccggcagcaguccuacagcaucaugugcaucaucaaggaggaggugcuggccuacgugguccagcucccccuguacggggugaucgacacgccgugcuggaagcugcacaccagcccccucugcaccaccaacacgaaggagggcuccaacaucugccugacccgcaccgaccgggggugguacugcgacaacgccggcuccgugagcuucuucccccaggcggagaccugcaagguccaguccaaccgcguguucugcgacacgaugaacagccggacccuccccuccgaggucaaccugugcaacguggacaucuucaacccgaaguacgacugcaagaucaugaccagcaagaccgacguguccagcuccgucaucacgagccugggcgccaucguguccugcuacgggaagaccaagugcaccgccagcaacaagaaccggggcaucaucaagaccuucuccaacgggugcgacuacgugagcaacaagggcgucgacacggugagcgugggcaacacccucuacugcgucaacaagcaggaggggaagucccuguacgugaagggcgagcccaucaucaacuucuacgacccccugguguuccccagcgacgaguucgacgccuccaucagccaggucaacgagaagaucaaccagucccucgccuucauccgcaagagcgacgagcugcugcacaacgugaacgcggggaaguccaccaccaacaucaugaucaccacgaucaucaucgugaucaucgucauccuccugagccugaucgccgugggccuccugcuguacugcaaggcccgguccaccccggugacccugagcaaggaccagcucuccgggaucaacaacaucgccuucagcaacugaggacuagucccuguucccagagcccacuuuuuuuucuuuuuuugaaauaaaauagccugucuuucagaucuaaaaaaaaaaaaaaaaaaaaaaaaaaaaaaaaaaaaaaaaaaaaaaaaaaaaaaaaaaaaaaaaugcaucccccccccccccccccccccccccccccccaaaggcucuuuucagagccaccagaauu

SEQ ID NO: 4599 - RNA, 1884 nt, Artificial Sequence
  mRNA product Design a-1 comprising derived and/or modified sequence from HRSV(A2)__F_DSCav1_mut4 (opt2)
gggagagucccgcagucggcguccagcggcucugcuuguucgugugugugucguugcaggccuuauucaagcuuaccauggagcuccucauccucaaggccaacgccaucaccaccauccucaccgccgucaccuucugcuucgccuccggccagaacaucaccgaggaguucuaccaguccaccugcuccgccgucuccaagggcuaccucuccgcccuccgcaccggcugguacaccuccgucaucaccaucgagcucuccaacaucaaggagaacaagugcaacggcaccgacgccaaggucaagcucaucaagcaggagcucgacaaguacaagaacgccgucaccgagcuccagcuccucaugcaguccacccccgccaccggcuccggcuccgccaucugcuccggcgucgccgucugcaagguccuccaccucgagggcgaggucaacaagaucaaguccgcccuccucuccaccaacaaggccgucgucucccucuccaacggcgucuccguccucaccuucaagguccucgaccucaagaacuacaucgacaagcagcuccuccccauccucaacaagcaguccugcuccaucuccaacaucgagaccgucaucgaguuccagcagaagaacaaccgccuccucgagaucacccgcgaguucuccgucaacgccggcgucaccacccccgucuccaccuacaugcucaccaacuccgagcuccucucccucaucaacgacaugcccaucaccaacgaccagaagaagcucauguccaacaacguccagaucguccgccagcaguccuacuccaucaugugcaucaucaaggaggagguccucgccuacgucguccagcucccccucuacggcgucaucgacacccccugcuggaagcuccacaccuccccccucugcaccaccaacaccaaggagggcuccaacaucugccucacccgcaccgaccgcggcugguacugcgacaacgccggcuccgucuccuucuucccccaggccgagaccugcaagguccaguccaaccgcgucuucugcgacaccaugaacucccgcacccuccccuccgaggucaaccucugcaacgucgacaucuucaaccccaaguacgacugcaagaucaugaccuccaagaccgacgucuccuccuccgucaucaccucccucggcgccaucgucuccugcuacggcaagaccaagugcaccgccuccaacaagaaccgcggcaucaucaagaccuucuccaacggcugcgacuacgucuccaacaagggcgucgacaccgucuccgucggcaacacccucuacugcgucaacaagcaggagggcaagucccucuacgucaagggcgagcccaucaucaacuucuacgacccccucgucuuccccuccgacgaguucgacgccuccaucucccaggucaacgagaagaucaaccagucccucgccuucauccgcaaguccgacgagcuccuccacaacgucaacgccggcaaguccaccaccaacaucaugaucaccaccaucaucaucgucaucaucgucauccuccucucccucaucgccgucggccuccuccucuacugcaaggcccgcuccacccccgucacccucuccaaggaccagcucuccggcaucaacaacaucgccuucuccaacugaggacuagucccuguucccagagcccacuuuuuuuucuuuuuuugaaauaaaauagccugucuuucagaucuaaaaaaaaaaaaaaaaaaaaaaaaaaaaaaaaaaaaaaaaaaaaaaaaaaaaaaaaaaaaaaaaugcaucccccccccccccccccccccccccccccccaaaggcucuuuucagagccaccagaauu

SEQ ID NO: 4600 - RNA, 1884 nt, Artificial Sequence
  mRNA product Design a-1 comprising derived and/or modified sequence from HRSV(A2)__F_DSCav1_mut4 (opt3)
gggagagucccgcagucggcguccagcggcucugcuuguucgugugugugucguugcaggccuuauucaagcuuaccauggagcugcucauccuuaaggccaacgcuauuaccacaauacugacugcagugacguucugcuuugccagcggccagaauaucaccgaagaguucuaccaauccacauguucugcggucucaaaaggguauuugagugcuuuaagaacuggaugguacaccagcguuauuacaaucgaacuguccaacauuaaggagaauaaaugcaacgguaccgacgccaaggugaaacuaaucaagcaggaacucgauaaguauaaaaaugcaguaacugagcugcagcuucugaugcagucuacacccgccaccggcucggggucagcuauauguagcggaguggcagucugcaagguguugcaccucgagggcgaaguuaacaaaaucaagagugcccugcuguccacgaauaaagcuguggucucucucagcaacgguguguccguauuaacuuuuaagguucuggaccuuaagaauuacauugauaaacaauugcugccuauccuaaacaagcagucauguaguauuagcaauaucgagaccgugauagaguuccagcagaaaaacaauaggcuccuggaaauuacacgggaguuuucugucaacgccggggugacuaccccaguguccacauauaugcuuaccaauucagaacuguugagccucaucaacgacaugccgauuacgaacgaucaaaagaaacugaugaguaauaacguccagaucguucgccagcagucuuacuccaucaugugcauuauaaaggaggaaguguuagcguauguagugcaacugccccucuacggagucaucgacacuccuuguuggaaacuucauacaagcccacugugcaccacuaauacaaaggagggcucgaacauuuguuugacccgaacggaucguggcugguacugcgacaaugcagggucuguguccuucuuuccccaggccgaaaccuguaagguucagucaaacagaguguucugcgauacaaugaauaguagaacucugccuagcgaggucaaccucugcaauguggacaucuuuaacccaaaauaugauuguaagauaaugaccuccaaaacagacguaucuagcucaguuauuaccagucugggagcuaucguguccugcuacgguaagacuaaauguacagccagcaauaagaacaggggcaucauuaagaccuucucuaaugggugcgauuaugucucaaacaaaggaguggacacugucagugugggcaauacgcuuuacuguguuaacaagcaagaggguaaaagccuguaugugaagggggaacccaucauuaacuuuuacgacccuuugguauucccauccgaugaguuugacgcaucuauaucgcaggucaaugagaaaaucaaccagagccucgcuuucauucggaaguccgaugaacuguuacacaaugugaacgccggaaagucaacaaccaauaucaugaucacuaccauuauaaucguuauuaucgugauucugcuaagucucaucgcggucggccugcuuuuguauugcaaagcccgcucuacaccggugacccugagcaaggaccagcucuccggcauaaacaauaucgcauucucaaacugaggacuagucccuguucccagagcccacuuuuuuuucuuuuuuugaaauaaaauagccugucuuucagaucuaaaaaaaaaaaaaaaaaaaaaaaaaaaaaaaaaaaaaaaaaaaaaaaaaaaaaaaaaaaaaaaaugcaucccccccccccccccccccccccccccccccaaaggcucuuuucagagccaccagaauu

SEQ ID NO: 4601 - RNA, 1884 nt, Artificial Sequence
  mRNA product Design a-1 comprising derived and/or modified sequence from HRSV(A2)__F_DSCav1_mut4 (opt4)
gggagagucccgcagucggcguccagcggcucugcuuguucgugugugugucguugcaggccuuauucaagcuuaccauggagcugcugauccugaaggccaacgccaucaccaccauccugaccgccgugaccuucugcuucgccagcggccagaacaucaccgaggaguucuaccagagcaccugcagcgccgugagcaagggcuaccugagcgcccugagaaccggcugguacaccagcgugaucaccaucgagcugagcaacaucaaggagaacaagugcaacggcaccgacgccaaggugaagcugaucaagcaggagcuggacaaguacaagaacgccgugaccgagcugcagcugcugaugcagagcacccccgccaccggcagcggcagcgccaucugcagcggcguggccgugugcaaggugcugcaccuggagggcgaggugaacaagaucaagagcgcccugcugagcaccaacaaggccguggugagccugagcaacggcgugagcgugcugaccuucaaggugcuggaccugaagaacuacaucgacaagcagcugcugcccauccugaacaagcagagcugcagcaucagcaacaucgagaccgugaucgaguuccagcagaagaacaacagacugcuggagaucaccagagaguucagcgugaacgccggcgugaccacccccgugagcaccuacaugcugaccaacagcgagcugcugagccugaucaacgacaugcccaucaccaacgaccagaagaagcugaugagcaacaacgugcagaucgugagacagcagagcuacagcaucaugugcaucaucaaggaggaggugcuggccuacguggugcagcugccccuguacggcgugaucgacacccccugcuggaagcugcacaccagcccccugugcaccaccaacaccaaggagggcagcaacaucugccugaccagaaccgacagaggcugguacugcgacaacgccggcagcgugagcuucuucccccaggccgagaccugcaaggugcagagcaacagaguguucugcgacaccaugaacagcagaacccugcccagcgaggugaaccugugcaacguggacaucuucaaccccaaguacgacugcaagaucaugaccagcaagaccgacgugagcagcagcgugaucaccagccugggcgccaucgugagcugcuacggcaagaccaagugcaccgccagcaacaagaacagaggcaucaucaagaccuucagcaacggcugcgacuacgugagcaacaagggcguggacaccgugagcgugggcaacacccuguacugcgugaacaagcaggagggcaagagccuguacgugaagggcgagcccaucaucaacuucuacgacccccugguguuccccagcgacgaguucgacgccagcaucagccaggugaacgagaagaucaaccagagccuggccuucaucagaaagagcgacgagcugcugcacaacgugaacgccggcaagagcaccaccaacaucaugaucaccaccaucaucaucgugaucaucgugauccugcugagccugaucgccgugggccugcugcuguacugcaaggccagaagcacccccgugacccugagcaaggaccagcugagcggcaucaacaacaucgccuucagcaacugaggacuagucccuguucccagagcccacuuuuuuuucuuuuuuugaaauaaaauagccugucuuucagaucuaaaaaaaaaaaaaaaaaaaaaaaaaaaaaaaaaaaaaaaaaaaaaaaaaaaaaaaaaaaaaaaaugcaucccccccccccccccccccccccccccccccaaaggcucuuuucagagccaccagaauu

SEQ ID NO: 4602 - RNA, 1884 nt, Artificial Sequence
  mRNA product Design a-1 comprising derived and/or modified sequence from HRSV(A2)__F_DSCav1_mut4 (opt5)
gggagagucccgcagucggcguccagcggcucugcuuguucgugugugugucguugcaggccuuauucaagcuuaccauggagcugcucauccugaaggccaacgcuauuaccacaauccuuacggccgugaccuucugcuuugcgagcggccagaauauuacagaagaguucuaccaauccaccuguucugcugucagcaaaggguaucuguccgcccucagaacaggaugguacaccucuguuaucacaauugaacugagcaacaucaaggagaauaaaugcaacggcaccgacgccaaggugaaacuuaucaagcaggaacuggauaaguauaaaaaugcugugacggagcuccagcugcugaugcaguccacccccgccacagggucuggaagcgcuauuuguuccggcgucgccgugugcaagguucuccaccuggagggggaagugaacaaaaucaagagcgcgcuucugucuaccaauaaagccgucgugucccucagcaacggaguuucugugcugacauuuaagguccuugaccugaagaauuacauugauaaacaacuccugccuauccugaacaagcaguccuguagcauuucuaauaucgagaccgugauugaguuccagcagaaaaacaaucggcuccuggaaaucacgcgcgaguuuuccgugaacgcuggcgucacaaccccgguuagcacauauaugcuuaccaauuccgaacugcucucucugaucaacgacaugcccauuaccaacgaucaaaagaaacuuaugagcaauaacgugcagaucgugagacagcaguccuacagcauuaugugcaucauuaaggaggaaguccuggccuaugugguucaacucccucuguacggcgugaucgacacacccuguuggaaacugcauacgucuccucucugcaccacaaauaccaaggagggguccaacaucugucugacacggaccgaucgcggaugguacugcgacaaugcuggcagcgucucuuucuuuccccaggccgaaacguguaaggugcagagcaacagaguuuucugcgauacaaugaacuccagaacccugccuucugaggugaaucucugcaaugucgacauuuuuaacccgaaauaugauuguaagaucaugaccagcaaaacagacguguccagcucugucauuaccucccugggggcgaucgugagcugcuacggaaagacaaaauguacggccucuaauaagaaccggggcauuaucaagaccuucuccaaugggugcgauuauguuagcaacaaaggaguggacacagucuccgugggcaauacccuuuacuguguuaacaagcaagagggcaaaucucuguaugugaagggggaacccaucauuaacuuuuacgacccucucgucuuccccagcgaugaguuugacgcuuccaucucucaggugaaugagaaaauuaaccagagccuggccuucauccgcaaguccgaugaacugcuccacaaugugaacgcuggaaagagcacaaccaauauuaugaucacgaccauuaucaucguuauuaucgucauucugcuuucucugaucgccgugggccuccugcuguauugcaaagccagauccacaccugugacccuuagcaaggaccagcucucugggauuaacaauaucgcuuucuccaacugaggacuagucccuguucccagagcccacuuuuuuuucuuuuuuugaaauaaaauagccugucuuucagaucuaaaaaaaaaaaaaaaaaaaaaaaaaaaaaaaaaaaaaaaaaaaaaaaaaaaaaaaaaaaaaaaaugcaucccccccccccccccccccccccccccccccaaaggcucuuuucagagccaccagaauu

SEQ ID NO: 4603 - RNA, 1884 nt, Artificial Sequence
  mRNA product Design a-1 comprising derived and/or modified sequence from HRSV(A2)__F_DSCav1_mut4 (opt6)
gggagagucccgcagucggcguccagcggcucugcuuguucgugugugugucguugcaggccuuauucaagcuuaccauggaacuucuaauacucaaagccaacgcaauaacaacaauauuaacagccguaacauuuugcuucgcaucaggucaaaacauaacagaagaguucuaccaauccacaugcucagcaguaucaaaaggauauuuaagugcucuaagaacaggaugguacacauccguaauaacaaucgaacuaucaaacauaaaagaaaauaaauguaauggaacagacgccaaaguaaaauuaaucaaacaagaacuagacaaauacaaaaacgcaguuacugaauuacaauuauuaaugcaaucaacaccggccacaggaucuggaucagcaauaugcucaggaguagcagucugcaaaguauuacaccuagaaggggaaguuaauaaaaucaaaucagcauuacuauccaccaacaaagcgguaguuucacucuccaacggcguaucugucuuaacauucaaaguauuagaccuaaaaaacuacauugacaaacaacuacuaccaauccuaaacaaacaaucauguuccauaagcaauauagaaacaguaauagaauuucaacaaaaaaacaacagacuauuagaaauaacaagagaauuuuccgucaaugcaggaguuacuaccccugucuccaccuauaugcuaaccaauuccgaacucuuaucauuaauaaacgacaugccuaucacaaaugaccaaaaaaaauuaaugagcaacaacguacaaauaguacgacaacaaucauacucaaucaugugcauaauaaaagaagaaguccuagcauacguuguacaacuaccacuauacggagucauagauaccccaugcuggaaacuccauacaagcccacuaugcacuacaaacacaaaagaaggcucuaauauaugucuaacaagaacagaccgaggaugguacugcgauaaugccggcucagucucauucuuuccgcaagccgaaacuuguaaaguacaaaguaacagaguauuuugugacaccaugaacucaagaacccucccaagcgaagucaaucuaugcaacguugauauauucaaucccaaauacgacugcaaaaucaugaccucaaaaacagacgucagcucauccguuauaacaucacuaggagccaucguaucuugcuauggaaaaacaaaaugcacagcaagcaauaaaaacagaggcauaauaaaaacauucucaaauggaugcgacuacguaucaaacaaaggagucgacacaguuuccguaggaaacacuuuauacugcguaaacaaacaagaaggaaaaucauuauacgucaaaggugaaccaauaauaaacuucuacgauccacuuguauucccaucagacgaauuugacgcaucaauuucacaaguaaacgaaaaaauaaaccaaucacucgcauucauaagaaaaucagaugaacuacuacauaacguaaacgcaggaaaauccacaacaaacaucaugauaacaaccaucauaaucguaauaaucguaauacuauuaucccuaauugcaguaggauuacucuuauauugcaaagcaagaucaacaccaguaacccucaguaaagaccaacuauccggaauaaauaacaucgcauucucaaacuaaggacuagucccuguucccagagcccacuuuuuuuucuuuuuuugaaauaaaauagccugucuuucagaucuaaaaaaaaaaaaaaaaaaaaaaaaaaaaaaaaaaaaaaaaaaaaaaaaaaaaaaaaaaaaaaaaugcaucccccccccccccccccccccccccccccccaaaggcucuuuucagagccaccagaauu

SEQ ID NO: 4604 - RNA, 1884 nt, Artificial Sequence
  mRNA product Design a-1 comprising derived and/or modified sequence from HRSV(A2)__F_DSCav1_mut4 (opt11)
gggagagucccgcagucggcguccagcggcucugcuuguucgugugugugucguugcaggccuuauucaagcuuaccauggaacugcucauccucaaagccaacgccaucaccaccauucuuaccgccgucacauucugcuucgccucaggccaaaacaucaccgaagaauuuuaccaauccacuuguucagccgucucaaaaggauaccuaucagcccuccguaccggcugguacaccucggucauaacaauagaacucuccaacauaaaagaaaacaaaugcaacggcaccgacgccaaggucaaacugauaaaacaagaacuugauaaauacaaaaacgccgucacugaacuccaacuccucaugcaauccacucccgcuacuggcucuggcuccgccaucugcucuggcgucgccgucuguaaaguacuccaccucgaaggggaagucaacaaaaucaaaucagcccuccuuagcaccaacaaggccgucgucucccucucaaacggagucagcguccucaccuucaagguccucgaccucaagaacuacaucgacaaacaacuccugcccauccuaaauaaacaauccugcucuaucuccaauaucgaaaccguuauagaguuccaacagaaaaacaaccgacuccucgaaaucacccgcgaguucuccgucaacgcaggcgucaccaccccugugucaaccuacaugcucaccaacagcgaacuacucucacucaucaaugacaugcccaucaccaacgaccaaaagaaacucauguccaacaacguccaaaucguacgucaacaauccuacagcaucaugugcaucauaaaagaagaaguccucgccuacgucguccaacuuccccucuacggcgucauagacacccccugcuggaaacugcauaccucaccccuaugcaccaccaacacuaaagaaggcuccaacaucugccucacccgcacggaccgcggcugguacugcgacaacgccggcuccgucuccuucuucccccaagccgaaacuuguaaaguccaauccaacagagucuucugcgacaccaugaacucuagaacgcugccauccgagguaaaccuaugcaacgucgacaucuucaaucccaaauacgacugcaagaucaugaccucaaaaaccgacguauccuccucaguaaucaccagucucggagcuaucgucuccugcuacggcaaaaccaaaugcacggccucuaacaaaaaccgcggcaucaucaaaaccuucucaaacggaugcgacuacgucagcaacaaaggcguagauaccgucucugucggcaacacacuguacugcguaaacaagcaagaaggaaaaucccucuacguaaaaggcgaacccaucaucaacuucuacgacccccucguuuuccccucagaugaauuugacgccucgauaucacaagucaacgaaaagauaaaucagucccucgccuucauccgaaaauccgacgaacuccuccacaacguuaacgcaggaaaguccaccacaaacaucaugauaacuacaaucauaauagucauuaucgucauacuccucucccuaaucgccguaggccugcuacucuacugcaaagcccgcucaacccccgucacucucucaaaagaccaacucuccggcaucaauaacaucgccuucucaaacuaaggacuagucccuguucccagagcccacuuuuuuuucuuuuuuugaaauaaaauagccugucuuucagaucuaaaaaaaaaaaaaaaaaaaaaaaaaaaaaaaaaaaaaaaaaaaaaaaaaaaaaaaaaaaaaaaaugcaucccccccccccccccccccccccccccccccaaaggcucuuuucagagccaccagaauu

SEQ ID NO: 4605 - RNA, 1903 nt, Artificial Sequence
  mRNA product Design a-2 comprising derived and/or modified sequence from HRSV(A2)__F_DSCav1_mut4 (opt1)
gggagaguccgcucagccagguugcagaagcggcuuagcguguguccuaaucuucucucugcguguagguaggccugugccgcaaacaagcuuaccauggagcugcucauccugaaggccaacgccaucaccaccauccugacggcggugaccuucugcuucgccagcggccagaacaucaccgaggaguucuaccaguccacgugcagcgccgucuccaagggguaccucagcgcccugcggaccggcugguacaccuccgugaucaccaucgagcugagcaacaucaaggagaacaagugcaacgggaccgacgccaaggugaagcucaucaagcaggagcuggacaaguacaagaacgcggucacggagcugcagcuccugaugcaguccaccccggcaaccggcuccggcuccgccaucugcagcggcgucgccgugugcaaggugcugcaccucgagggggaggucaacaagaucaagagcgcccugcuguccaccaacaaggccguggugagccucuccaacggcgucagcgugcugaccuucaaggugcuggaccucaagaacuacaucgacaagcagcugcugcccauccugaacaagcagagcugcuccaucagcaacaucgagacggugaucgaguuccagcagaagaacaaccggcuccuggagaucacccgcgaguucagcgugaacgccggggucaccacccccguguccacguacaugcugaccaacagcgagcuccugucccugaucaacgacaugccgaucaccaacgaccagaagaagcucaugagcaacaacgugcagaucguccggcagcaguccuacagcaucaugugcaucaucaaggaggaggugcuggcguacgugguccagcugccccucuacggcgugaucgacacccccugcuggaagcugcacacgagcccccugugcaccaccaacaccaaggagggguccaacaucugccucacgcgcaccgaccggggcugguacugcgacaacgccggcagcgucuccuucuucccgcaggccgagaccugcaaggugcagagcaaccgcguguucugcgacaccaugaacucccggacgcugcccagcgagguaaaccucugcaacgucgacaucuucaaccccaaguacgacugcaagaucaugaccuccaagaccgacgugagcuccagcgugaucaccucccugggggccaucgucagcugcuacggcaagacgaagugcaccgccagcaacaagaaccgggggaucaucaagaccuucuccaacggcugcgacuacgugagcaacaagggcguggacaccguguccgucgggaacacccuguacugcgugaacaagcaggagggcaagagccucuacgugaagggggagcccaucaucaacuucuacgacccgcuggucuuccccuccgacgaguucgacgcgagcaucucccaggugaacgagaagaucaaccagagccuggccuucauccgcaaguccgacgagcugcuccacaacgugaacgccggcaagagcacgaccaacaucaugaucaccaccaucaucaucgucaucaucgugauccugcugucccucaucgccguggggcugcugcucuacugcaaggcccggagcacgcccgucacccuguccaaggaccagcugagcggcaucaacaacaucgcguucuccaacugaggacuagucccuguucccagagcccacuuuuuuuucuuuuuuugaaauaaaauagccugucuuucagaucuaaaaaaaaaaaaaaaaaaaaaaaaaaaaaaaaaaaaaaaaaaaaaaaaaaaaaaaaaaaaaaaaugcaucccccccccccccccccccccccccccccccaaaggcucuuuucagagccaccagaauu

SEQ ID NO: 4606 - RNA, 1903 nt, Artificial Sequence
  mRNA product Design a-2 comprising derived and/or modified sequence from HRSV(A2)__F_DSCav1_mut4 (opt1)
gggagaguccgcucagccagguugcagaagcggcuuagcguguguccuaaucuucucucugcguguagguaggccugugccgcaaacaagcuuaccauggagcugcucauccugaaggccaacgccaucaccaccauccugacggcggugaccuucugcuucgccagcggccagaacaucaccgaggaguucuaccaguccacgugcagcgccgucuccaagggguaccucagcgcccugcgcaccggcugguacaccuccgugaucaccaucgagcugagcaacaucaaggagaacaagugcaacgggaccgacgccaaggugaagcucaucaagcaggagcuggacaaguacaagaacgcggucacggagcugcagcuccugaugcaguccacccccgccaccggcagcggguccgccaucugcagcggcguggccgugugcaagguccugcaccucgagggcgaggugaacaagaucaaguccgcgcugcugagcaccaacaaggccguggucucccucagcaacgggguguccgugcugacguucaagguccuggaccucaagaacuacaucgacaagcagcugcugccgauccucaacaagcagagcugcuccaucagcaacaucgagaccgugaucgaguuccagcagaagaacaaccggcugcuggagaucacccgcgaguucuccgugaacgccggcgucaccacgcccgugagcaccuacaugcucaccaacagcgagcugcugucccucaucaacgacaugcccaucaccaacgaccagaagaagcugaugagcaacaacgugcagaucguccggcagcaguccuacagcaucaugugcaucaucaaggaggaggugcuggccuacgugguccagcucccccuguacggggugaucgacacgccgugcuggaagcugcacaccagcccccucugcaccaccaacacgaaggagggcuccaacaucugccugacccgcaccgaccgggggugguacugcgacaacgccggcuccgugagcuucuucccccaggcggagaccugcaagguccaguccaaccgcguguucugcgacacgaugaacagccggacccuccccuccgaggucaaccugugcaacguggacaucuucaacccgaaguacgacugcaagaucaugaccagcaagaccgacguguccagcuccgucaucacgagccugggcgccaucguguccugcuacgggaagaccaagugcaccgccagcaacaagaaccggggcaucaucaagaccuucuccaacgggugcgacuacgugagcaacaagggcgucgacacggugagcgugggcaacacccucuacugcgucaacaagcaggaggggaagucccuguacgugaagggcgagcccaucaucaacuucuacgacccccugguguuccccagcgacgaguucgacgccuccaucagccaggucaacgagaagaucaaccagucccucgccuucauccgcaagagcgacgagcugcugcacaacgugaacgcggggaaguccaccaccaacaucaugaucaccacgaucaucaucgugaucaucgucauccuccugagccugaucgccgugggccuccugcuguacugcaaggcccgguccaccccggugacccugagcaaggaccagcucuccgggaucaacaacaucgccuucagcaacugaggacuagucccuguucccagagcccacuuuuuuuucuuuuuuugaaauaaaauagccugucuuucagaucuaaaaaaaaaaaaaaaaaaaaaaaaaaaaaaaaaaaaaaaaaaaaaaaaaaaaaaaaaaaaaaaaugcaucccccccccccccccccccccccccccccccaaaggcucuuuucagagccaccagaauu

SEQ ID NO: 4607 - RNA, 1903 nt, Artificial Sequence
  mRNA product Design a-2 comprising derived and/or modified sequence from HRSV(A2)__F_DSCav1_mut4 (opt2)
gggagaguccgcucagccagguugcagaagcggcuuagcguguguccuaaucuucucucugcguguagguaggccugugccgcaaacaagcuuaccauggagcuccucauccucaaggccaacgccaucaccaccauccucaccgccgucaccuucugcuucgccuccggccagaacaucaccgaggaguucuaccaguccaccugcuccgccgucuccaagggcuaccucuccgcccuccgcaccggcugguacaccuccgucaucaccaucgagcucuccaacaucaaggagaacaagugcaacggcaccgacgccaaggucaagcucaucaagcaggagcucgacaaguacaagaacgccgucaccgagcuccagcuccucaugcaguccacccccgccaccggcuccggcuccgccaucugcuccggcgucgccgucugcaagguccuccaccucgagggcgaggucaacaagaucaaguccgcccuccucuccaccaacaaggccgucgucucccucuccaacggcgucuccguccucaccuucaagguccucgaccucaagaacuacaucgacaagcagcuccuccccauccucaacaagcaguccugcuccaucuccaacaucgagaccgucaucgaguuccagcagaagaacaaccgccuccucgagaucacccgcgaguucuccgucaacgccggcgucaccacccccgucuccaccuacaugcucaccaacuccgagcuccucucccucaucaacgacaugcccaucaccaacgaccagaagaagcucauguccaacaacguccagaucguccgccagcaguccuacuccaucaugugcaucaucaaggaggagguccucgccuacgucguccagcucccccucuacggcgucaucgacacccccugcuggaagcuccacaccuccccccucugcaccaccaacaccaaggagggcuccaacaucugccucacccgcaccgaccgcggcugguacugcgacaacgccggcuccgucuccuucuucccccaggccgagaccugcaagguccaguccaaccgcgucuucugcgacaccaugaacucccgcacccuccccuccgaggucaaccucugcaacgucgacaucuucaaccccaaguacgacugcaagaucaugaccuccaagaccgacgucuccuccuccgucaucaccucccucggcgccaucgucuccugcuacggcaagaccaagugcaccgccuccaacaagaaccgcggcaucaucaagaccuucuccaacggcugcgacuacgucuccaacaagggcgucgacaccgucuccgucggcaacacccucuacugcgucaacaagcaggagggcaagucccucuacgucaagggcgagcccaucaucaacuucuacgacccccucgucuuccccuccgacgaguucgacgccuccaucucccaggucaacgagaagaucaaccagucccucgccuucauccgcaaguccgacgagcuccuccacaacgucaacgccggcaaguccaccaccaacaucaugaucaccaccaucaucaucgucaucaucgucauccuccucucccucaucgccgucggccuccuccucuacugcaaggcccgcuccacccccgucacccucuccaaggaccagcucuccggcaucaacaacaucgccuucuccaacugaggacuagucccuguucccagagcccacuuuuuuuucuuuuuuugaaauaaaauagccugucuuucagaucuaaaaaaaaaaaaaaaaaaaaaaaaaaaaaaaaaaaaaaaaaaaaaaaaaaaaaaaaaaaaaaaaugcaucccccccccccccccccccccccccccccccaaaggcucuuuucagagccaccagaauu

SEQ ID NO: 4608 - RNA, 1903 nt, Artificial Sequence
  mRNA product Design a-2 comprising derived and/or modified sequence from HRSV(A2)__F_DSCav1_mut4 (opt3)
gggagaguccgcucagccagguugcagaagcggcuuagcguguguccuaaucuucucucugcguguagguaggccugugccgcaaacaagcuuaccauggagcugcucauccuuaaggccaacgcuauuaccacaauacugacugcagugacguucugcuuugccagcggccagaauaucaccgaagaguucuaccaauccacauguucugcggucucaaaaggguauuugagugcuuuaagaacuggaugguacaccagcguuauuacaaucgaacuguccaacauuaaggagaauaaaugcaacgguaccgacgccaaggugaaacuaaucaagcaggaacucgauaaguauaaaaaugcaguaacugagcugcagcuucugaugcagucuacacccgccaccggcucggggucagcuauauguagcggaguggcagucugcaagguguugcaccucgagggcgaaguuaacaaaaucaagagugcccugcuguccacgaauaaagcuguggucucucucagcaacgguguguccguauuaacuuuuaagguucuggaccuuaagaauuacauugauaaacaauugcugccuauccuaaacaagcagucauguaguauuagcaauaucgagaccgugauagaguuccagcagaaaaacaauaggcuccuggaaauuacacgggaguuuucugucaacgccggggugacuaccccaguguccacauauaugcuuaccaauucagaacuguugagccucaucaacgacaugccgauuacgaacgaucaaaagaaacugaugaguaauaacguccagaucguucgccagcagucuuacuccaucaugugcauuauaaaggaggaaguguuagcguauguagugcaacugccccucuacggagucaucgacacuccuuguuggaaacuucauacaagcccacugugcaccacuaauacaaaggagggcucgaacauuuguuugacccgaacggaucguggcugguacugcgacaaugcagggucuguguccuucuuuccccaggccgaaaccuguaagguucagucaaacagaguguucugcgauacaaugaauaguagaacucugccuagcgaggucaaccucugcaauguggacaucuuuaacccaaaauaugauuguaagauaaugaccuccaaaacagacguaucuagcucaguuauuaccagucugggagcuaucguguccugcuacgguaagacuaaauguacagccagcaauaagaacaggggcaucauuaagaccuucucuaaugggugcgauuaugucucaaacaaaggaguggacacugucagugugggcaauacgcuuuacuguguuaacaagcaagaggguaaaagccuguaugugaagggggaacccaucauuaacuuuuacgacccuuugguauucccauccgaugaguuugacgcaucuauaucgcaggucaaugagaaaaucaaccagagccucgcuuucauucggaaguccgaugaacuguuacacaaugugaacgccggaaagucaacaaccaauaucaugaucacuaccauuauaaucguuauuaucgugauucugcuaagucucaucgcggucggccugcuuuuguauugcaaagcccgcucuacaccggugacccugagcaaggaccagcucuccggcauaaacaauaucgcauucucaaacugaggacuagucccuguucccagagcccacuuuuuuuucuuuuuuugaaauaaaauagccugucuuucagaucuaaaaaaaaaaaaaaaaaaaaaaaaaaaaaaaaaaaaaaaaaaaaaaaaaaaaaaaaaaaaaaaaugcaucccccccccccccccccccccccccccccccaaaggcucuuuucagagccaccagaauu

SEQ ID NO: 4609 - RNA, 1903 nt, Artificial Sequence
  mRNA product Design a-2 comprising derived and/or modified sequence from HRSV(A2)__F_DSCav1_mut4 (opt4)
gggagaguccgcucagccagguugcagaagcggcuuagcguguguccuaaucuucucucugcguguagguaggccugugccgcaaacaagcuuaccauggagcugcugauccugaaggccaacgccaucaccaccauccugaccgccgugaccuucugcuucgccagcggccagaacaucaccgaggaguucuaccagagcaccugcagcgccgugagcaagggcuaccugagcgcccugagaaccggcugguacaccagcgugaucaccaucgagcugagcaacaucaaggagaacaagugcaacggcaccgacgccaaggugaagcugaucaagcaggagcuggacaaguacaagaacgccgugaccgagcugcagcugcugaugcagagcacccccgccaccggcagcggcagcgccaucugcagcggcguggccgugugcaaggugcugcaccuggagggcgaggugaacaagaucaagagcgcccugcugagcaccaacaaggccguggugagccugagcaacggcgugagcgugcugaccuucaaggugcuggaccugaagaacuacaucgacaagcagcugcugcccauccugaacaagcagagcugcagcaucagcaacaucgagaccgugaucgaguuccagcagaagaacaacagacugcuggagaucaccagagaguucagcgugaacgccggcgugaccacccccgugagcaccuacaugcugaccaacagcgagcugcugagccugaucaacgacaugcccaucaccaacgaccagaagaagcugaugagcaacaacgugcagaucgugagacagcagagcuacagcaucaugugcaucaucaaggaggaggugcuggccuacguggugcagcugccccuguacggcgugaucgacacccccugcuggaagcugcacaccagcccccugugcaccaccaacaccaaggagggcagcaacaucugccugaccagaaccgacagaggcugguacugcgacaacgccggcagcgugagcuucuucccccaggccgagaccugcaaggugcagagcaacagaguguucugcgacaccaugaacagcagaacccugcccagcgaggugaaccugugcaacguggacaucuucaaccccaaguacgacugcaagaucaugaccagcaagaccgacgugagcagcagcgugaucaccagccugggcgccaucgugagcugcuacggcaagaccaagugcaccgccagcaacaagaacagaggcaucaucaagaccuucagcaacggcugcgacuacgugagcaacaagggcguggacaccgugagcgugggcaacacccuguacugcgugaacaagcaggagggcaagagccuguacgugaagggcgagcccaucaucaacuucuacgacccccugguguuccccagcgacgaguucgacgccagcaucagccaggugaacgagaagaucaaccagagccuggccuucaucagaaagagcgacgagcugcugcacaacgugaacgccggcaagagcaccaccaacaucaugaucaccaccaucaucaucgugaucaucgugauccugcugagccugaucgccgugggccugcugcuguacugcaaggccagaagcacccccgugacccugagcaaggaccagcugagcggcaucaacaacaucgccuucagcaacugaggacuagucccuguucccagagcccacuuuuuuuucuuuuuuugaaauaaaauagccugucuuucagaucuaaaaaaaaaaaaaaaaaaaaaaaaaaaaaaaaaaaaaaaaaaaaaaaaaaaaaaaaaaaaaaaaugcaucccccccccccccccccccccccccccccccaaaggcucuuuucagagccaccagaauu

SEQ ID NO: 4610 - RNA, 1903 nt, Artificial Sequence
  mRNA product Design a-2 comprising derived and/or modified sequence from HRSV(A2)__F_DSCav1_mut4 (opt5)
gggagaguccgcucagccagguugcagaagcggcuuagcguguguccuaaucuucucucugcguguagguaggccugugccgcaaacaagcuuaccauggagcugcucauccugaaggccaacgcuauuaccacaauccuuacggccgugaccuucugcuuugcgagcggccagaauauuacagaagaguucuaccaauccaccuguucugcugucagcaaaggguaucuguccgcccucagaacaggaugguacaccucuguuaucacaauugaacugagcaacaucaaggagaauaaaugcaacggcaccgacgccaaggugaaacuuaucaagcaggaacuggauaaguauaaaaaugcugugacggagcuccagcugcugaugcaguccacccccgccacagggucuggaagcgcuauuuguuccggcgucgccgugugcaagguucuccaccuggagggggaagugaacaaaaucaagagcgcgcuucugucuaccaauaaagccgucgugucccucagcaacggaguuucugugcugacauuuaagguccuugaccugaagaauuacauugauaaacaacuccugccuauccugaacaagcaguccuguagcauuucuaauaucgagaccgugauugaguuccagcagaaaaacaaucggcuccuggaaaucacgcgcgaguuuuccgugaacgcuggcgucacaaccccgguuagcacauauaugcuuaccaauuccgaacugcucucucugaucaacgacaugcccauuaccaacgaucaaaagaaacuuaugagcaauaacgugcagaucgugagacagcaguccuacagcauuaugugcaucauuaaggaggaaguccuggccuaugugguucaacucccucuguacggcgugaucgacacacccuguuggaaacugcauacgucuccucucugcaccacaaauaccaaggagggguccaacaucugucugacacggaccgaucgcggaugguacugcgacaaugcuggcagcgucucuuucuuuccccaggccgaaacguguaaggugcagagcaacagaguuuucugcgauacaaugaacuccagaacccugccuucugaggugaaucucugcaaugucgacauuuuuaacccgaaauaugauuguaagaucaugaccagcaaaacagacguguccagcucugucauuaccucccugggggcgaucgugagcugcuacggaaagacaaaauguacggccucuaauaagaaccggggcauuaucaagaccuucuccaaugggugcgauuauguuagcaacaaaggaguggacacagucuccgugggcaauacccuuuacuguguuaacaagcaagagggcaaaucucuguaugugaagggggaacccaucauuaacuuuuacgacccucucgucuuccccagcgaugaguuugacgcuuccaucucucaggugaaugagaaaauuaaccagagccuggccuucauccgcaaguccgaugaacugcuccacaaugugaacgcuggaaagagcacaaccaauauuaugaucacgaccauuaucaucguuauuaucgucauucugcuuucucugaucgccgugggccuccugcuguauugcaaagccagauccacaccugugacccuuagcaaggaccagcucucugggauuaacaauaucgcuuucuccaacugaggacuagucccuguucccagagcccacuuuuuuuucuuuuuuugaaauaaaauagccugucuuucagaucuaaaaaaaaaaaaaaaaaaaaaaaaaaaaaaaaaaaaaaaaaaaaaaaaaaaaaaaaaaaaaaaaugcaucccccccccccccccccccccccccccccccaaaggcucuuuucagagccaccagaauu

SEQ ID NO: 4611 - RNA, 1903 nt, Artificial Sequence
  mRNA product Design a-2 comprising derived and/or modified sequence from HRSV(A2)__F_DSCav1_mut4 (opt6)
gggagaguccgcucagccagguugcagaagcggcuuagcguguguccuaaucuucucucugcguguagguaggccugugccgcaaacaagcuuaccauggaacuucuaauacucaaagccaacgcaauaacaacaauauuaacagccguaacauuuugcuucgcaucaggucaaaacauaacagaagaguucuaccaauccacaugcucagcaguaucaaaaggauauuuaagugcucuaagaacaggaugguacacauccguaauaacaaucgaacuaucaaacauaaaagaaaauaaauguaauggaacagacgccaaaguaaaauuaaucaaacaagaacuagacaaauacaaaaacgcaguuacugaauuacaauuauuaaugcaaucaacaccggccacaggaucuggaucagcaauaugcucaggaguagcagucugcaaaguauuacaccuagaaggggaaguuaauaaaaucaaaucagcauuacuauccaccaacaaagcgguaguuucacucuccaacggcguaucugucuuaacauucaaaguauuagaccuaaaaaacuacauugacaaacaacuacuaccaauccuaaacaaacaaucauguuccauaagcaauauagaaacaguaauagaauuucaacaaaaaaacaacagacuauuagaaauaacaagagaauuuuccgucaaugcaggaguuacuaccccugucuccaccuauaugcuaaccaauuccgaacucuuaucauuaauaaacgacaugccuaucacaaaugaccaaaaaaaauuaaugagcaacaacguacaaauaguacgacaacaaucauacucaaucaugugcauaauaaaagaagaaguccuagcauacguuguacaacuaccacuauacggagucauagauaccccaugcuggaaacuccauacaagcccacuaugcacuacaaacacaaaagaaggcucuaauauaugucuaacaagaacagaccgaggaugguacugcgauaaugccggcucagucucauucuuuccgcaagccgaaacuuguaaaguacaaaguaacagaguauuuugugacaccaugaacucaagaacccucccaagcgaagucaaucuaugcaacguugauauauucaaucccaaauacgacugcaaaaucaugaccucaaaaacagacgucagcucauccguuauaacaucacuaggagccaucguaucuugcuauggaaaaacaaaaugcacagcaagcaauaaaaacagaggcauaauaaaaacauucucaaauggaugcgacuacguaucaaacaaaggagucgacacaguuuccguaggaaacacuuuauacugcguaaacaaacaagaaggaaaaucauuauacgucaaaggugaaccaauaauaaacuucuacgauccacuuguauucccaucagacgaauuugacgcaucaauuucacaaguaaacgaaaaaauaaaccaaucacucgcauucauaagaaaaucagaugaacuacuacauaacguaaacgcaggaaaauccacaacaaacaucaugauaacaaccaucauaaucguaauaaucguaauacuauuaucccuaauugcaguaggauuacucuuauauugcaaagcaagaucaacaccaguaacccucaguaaagaccaacuauccggaauaaauaacaucgcauucucaaacuaaggacuagucccuguucccagagcccacuuuuuuuucuuuuuuugaaauaaaauagccugucuuucagaucuaaaaaaaaaaaaaaaaaaaaaaaaaaaaaaaaaaaaaaaaaaaaaaaaaaaaaaaaaaaaaaaaugcaucccccccccccccccccccccccccccccccaaaggcucuuuucagagccaccagaauu

SEQ ID NO: 4612 - RNA, 1903 nt, Artificial Sequence
  mRNA product Design a-2 comprising derived and/or modified sequence from HRSV(A2)__F_DSCav1_mut4 (opt11)
gggagaguccgcucagccagguugcagaagcggcuuagcguguguccuaaucuucucucugcguguagguaggccugugccgcaaacaagcuuaccauggaacugcucauccucaaagccaacgccaucaccaccauucuuaccgccgucacauucugcuucgccucaggccaaaacaucaccgaagaauuuuaccaauccacuuguucagccgucucaaaaggauaccuaucagcccuccguaccggcugguacaccucggucauaacaauagaacucuccaacauaaaagaaaacaaaugcaacggcaccgacgccaaggucaaacugauaaaacaagaacuugauaaauacaaaaacgccgucacugaacuccaacuccucaugcaauccacucccgcuacuggcucuggcuccgccaucugcucuggcgucgccgucuguaaaguacuccaccucgaaggggaagucaacaaaaucaaaucagcccuccuuagcaccaacaaggccgucgucucccucucaaacggagucagcguccucaccuucaagguccucgaccucaagaacuacaucgacaaacaacuccugcccauccuaaauaaacaauccugcucuaucuccaauaucgaaaccguuauagaguuccaacagaaaaacaaccgacuccucgaaaucacccgcgaguucuccgucaacgcaggcgucaccaccccugugucaaccuacaugcucaccaacagcgaacuacucucacucaucaaugacaugcccaucaccaacgaccaaaagaaacucauguccaacaacguccaaaucguacgucaacaauccuacagcaucaugugcaucauaaaagaagaaguccucgccuacgucguccaacuuccccucuacggcgucauagacacccccugcuggaaacugcauaccucaccccuaugcaccaccaacacuaaagaaggcuccaacaucugccucacccgcacggaccgcggcugguacugcgacaacgccggcuccgucuccuucuucccccaagccgaaacuuguaaaguccaauccaacagagucuucugcgacaccaugaacucuagaacgcugccauccgagguaaaccuaugcaacgucgacaucuucaaucccaaauacgacugcaagaucaugaccucaaaaaccgacguauccuccucaguaaucaccagucucggagcuaucgucuccugcuacggcaaaaccaaaugcacggccucuaacaaaaaccgcggcaucaucaaaaccuucucaaacggaugcgacuacgucagcaacaaaggcguagauaccgucucugucggcaacacacuguacugcguaaacaagcaagaaggaaaaucccucuacguaaaaggcgaacccaucaucaacuucuacgacccccucguuuuccccucagaugaauuugacgccucgauaucacaagucaacgaaaagauaaaucagucccucgccuucauccgaaaauccgacgaacuccuccacaacguuaacgcaggaaaguccaccacaaacaucaugauaacuacaaucauaauagucauuaucgucauacuccucucccuaaucgccguaggccugcuacucuacugcaaagcccgcucaacccccgucacucucucaaaagaccaacucuccggcaucaauaacaucgccuucucaaacuaaggacuagucccuguucccagagcccacuuuuuuuucuuuuuuugaaauaaaauagccugucuuucagaucuaaaaaaaaaaaaaaaaaaaaaaaaaaaaaaaaaaaaaaaaaaaaaaaaaaaaaaaaaaaaaaaaugcaucccccccccccccccccccccccccccccccaaaggcucuuuucagagccaccagaauu

SEQ ID NO: 4613 - RNA, 1981 nt, Artificial Sequence
  mRNA product Design a-3 comprising derived and/or modified sequence from HRSV(A2)__F_DSCav1_mut4 (opt1)
gggagagggcgcuuggcuugcaaggacccugagcugcggcauugaagcacacccaacccaacucgacugaagucagccucacugaaccggaucugagaaucuucucucucugggcuugccagggcucuccgaaccuagcuagcauccucuucaauuccaacuagaaagcuuaccauggagcugcucauccugaaggccaacgccaucaccaccauccugacggcggugaccuucugcuucgccagcggccagaacaucaccgaggaguucuaccaguccacgugcagcgccgucuccaagggguaccucagcgcccugcggaccggcugguacaccuccgugaucaccaucgagcugagcaacaucaaggagaacaagugcaacgggaccgacgccaaggugaagcucaucaagcaggagcuggacaaguacaagaacgcggucacggagcugcagcuccugaugcaguccaccccggcaaccggcuccggcuccgccaucugcagcggcgucgccgugugcaaggugcugcaccucgagggggaggucaacaagaucaagagcgcccugcuguccaccaacaaggccguggugagccucuccaacggcgucagcgugcugaccuucaaggugcuggaccucaagaacuacaucgacaagcagcugcugcccauccugaacaagcagagcugcuccaucagcaacaucgagacggugaucgaguuccagcagaagaacaaccggcuccuggagaucacccgcgaguucagcgugaacgccggggucaccacccccguguccacguacaugcugaccaacagcgagcuccugucccugaucaacgacaugccgaucaccaacgaccagaagaagcucaugagcaacaacgugcagaucguccggcagcaguccuacagcaucaugugcaucaucaaggaggaggugcuggcguacgugguccagcugccccucuacggcgugaucgacacccccugcuggaagcugcacacgagcccccugugcaccaccaacaccaaggagggguccaacaucugccucacgcgcaccgaccggggcugguacugcgacaacgccggcagcgucuccuucuucccgcaggccgagaccugcaaggugcagagcaaccgcguguucugcgacaccaugaacucccggacgcugcccagcgagguaaaccucugcaacgucgacaucuucaaccccaaguacgacugcaagaucaugaccuccaagaccgacgugagcuccagcgugaucaccucccugggggccaucgucagcugcuacggcaagacgaagugcaccgccagcaacaagaaccgggggaucaucaagaccuucuccaacggcugcgacuacgugagcaacaagggcguggacaccguguccgucgggaacacccuguacugcgugaacaagcaggagggcaagagccucuacgugaagggggagcccaucaucaacuucuacgacccgcuggucuuccccuccgacgaguucgacgcgagcaucucccaggugaacgagaagaucaaccagagccuggccuucauccgcaaguccgacgagcugcuccacaacgugaacgccggcaagagcacgaccaacaucaugaucaccaccaucaucaucgucaucaucgugauccugcugucccucaucgccguggggcugcugcucuacugcaaggcccggagcacgcccgucacccuguccaaggaccagcugagcggcaucaacaacaucgcguucuccaacugaggacuagucccuguucccagagcccacuuuuuuuucuuuuuuugaaauaaaauagccugucuuucagaucuaaaaaaaaaaaaaaaaaaaaaaaaaaaaaaaaaaaaaaaaaaaaaaaaaaaaaaaaaaaaaaaaugcaucccccccccccccccccccccccccccccccaaaggcucuuuucagagccaccagaauu

SEQ ID NO: 4614 - RNA, 1981 nt, Artificial Sequence
  mRNA product Design a-3 comprising derived and/or modified sequence from HRSV(A2)__F_DSCav1_mut4 (opt1)
gggagagggcgcuuggcuugcaaggacccugagcugcggcauugaagcacacccaacccaacucgacugaagucagccucacugaaccggaucugagaaucuucucucucugggcuugccagggcucuccgaaccuagcuagcauccucuucaauuccaacuagaaagcuuaccauggagcugcucauccugaaggccaacgccaucaccaccauccugacggcggugaccuucugcuucgccagcggccagaacaucaccgaggaguucuaccaguccacgugcagcgccgucuccaagggguaccucagcgcccugcgcaccggcugguacaccuccgugaucaccaucgagcugagcaacaucaaggagaacaagugcaacgggaccgacgccaaggugaagcucaucaagcaggagcuggacaaguacaagaacgcggucacggagcugcagcuccugaugcaguccacccccgccaccggcagcggguccgccaucugcagcggcguggccgugugcaagguccugcaccucgagggcgaggugaacaagaucaaguccgcgcugcugagcaccaacaaggccguggucucccucagcaacgggguguccgugcugacguucaagguccuggaccucaagaacuacaucgacaagcagcugcugccgauccucaacaagcagagcugcuccaucagcaacaucgagaccgugaucgaguuccagcagaagaacaaccggcugcuggagaucacccgcgaguucuccgugaacgccggcgucaccacgcccgugagcaccuacaugcucaccaacagcgagcugcugucccucaucaacgacaugcccaucaccaacgaccagaagaagcugaugagcaacaacgugcagaucguccggcagcaguccuacagcaucaugugcaucaucaaggaggaggugcuggccuacgugguccagcucccccuguacggggugaucgacacgccgugcuggaagcugcacaccagcccccucugcaccaccaacacgaaggagggcuccaacaucugccugacccgcaccgaccgggggugguacugcgacaacgccggcuccgugagcuucuucccccaggcggagaccugcaagguccaguccaaccgcguguucugcgacacgaugaacagccggacccuccccuccgaggucaaccugugcaacguggacaucuucaacccgaaguacgacugcaagaucaugaccagcaagaccgacguguccagcuccgucaucacgagccugggcgccaucguguccugcuacgggaagaccaagugcaccgccagcaacaagaaccggggcaucaucaagaccuucuccaacgggugcgacuacgugagcaacaagggcgucgacacggugagcgugggcaacacccucuacugcgucaacaagcaggaggggaagucccuguacgugaagggcgagcccaucaucaacuucuacgacccccugguguuccccagcgacgaguucgacgccuccaucagccaggucaacgagaagaucaaccagucccucgccuucauccgcaagagcgacgagcugcugcacaacgugaacgcggggaaguccaccaccaacaucaugaucaccacgaucaucaucgugaucaucgucauccuccugagccugaucgccgugggccuccugcuguacugcaaggcccgguccaccccggugacccugagcaaggaccagcucuccgggaucaacaacaucgccuucagcaacugaggacuagucccuguucccagagcccacuuuuuuuucuuuuuuugaaauaaaauagccugucuuucagaucuaaaaaaaaaaaaaaaaaaaaaaaaaaaaaaaaaaaaaaaaaaaaaaaaaaaaaaaaaaaaaaaaugcaucccccccccccccccccccccccccccccccaaaggcucuuuucagagccaccagaauu

SEQ ID NO: 4615 - RNA, 1981 nt, Artificial Sequence
  mRNA product Design a-3 comprising derived and/or modified sequence from HRSV(A2)__F_DSCav1_mut4 (opt2)
gggagagggcgcuuggcuugcaaggacccugagcugcggcauugaagcacacccaacccaacucgacugaagucagccucacugaaccggaucugagaaucuucucucucugggcuugccagggcucuccgaaccuagcuagcauccucuucaauuccaacuagaaagcuuaccauggagcuccucauccucaaggccaacgccaucaccaccauccucaccgccgucaccuucugcuucgccuccggccagaacaucaccgaggaguucuaccaguccaccugcuccgccgucuccaagggcuaccucuccgcccuccgcaccggcugguacaccuccgucaucaccaucgagcucuccaacaucaaggagaacaagugcaacggcaccgacgccaaggucaagcucaucaagcaggagcucgacaaguacaagaacgccgucaccgagcuccagcuccucaugcaguccacccccgccaccggcuccggcuccgccaucugcuccggcgucgccgucugcaagguccuccaccucgagggcgaggucaacaagaucaaguccgcccuccucuccaccaacaaggccgucgucucccucuccaacggcgucuccguccucaccuucaagguccucgaccucaagaacuacaucgacaagcagcuccuccccauccucaacaagcaguccugcuccaucuccaacaucgagaccgucaucgaguuccagcagaagaacaaccgccuccucgagaucacccgcgaguucuccgucaacgccggcgucaccacccccgucuccaccuacaugcucaccaacuccgagcuccucucccucaucaacgacaugcccaucaccaacgaccagaagaagcucauguccaacaacguccagaucguccgccagcaguccuacuccaucaugugcaucaucaaggaggagguccucgccuacgucguccagcucccccucuacggcgucaucgacacccccugcuggaagcuccacaccuccccccucugcaccaccaacaccaaggagggcuccaacaucugccucacccgcaccgaccgcggcugguacugcgacaacgccggcuccgucuccuucuucccccaggccgagaccugcaagguccaguccaaccgcgucuucugcgacaccaugaacucccgcacccuccccuccgaggucaaccucugcaacgucgacaucuucaaccccaaguacgacugcaagaucaugaccuccaagaccgacgucuccuccuccgucaucaccucccucggcgccaucgucuccugcuacggcaagaccaagugcaccgccuccaacaagaaccgcggcaucaucaagaccuucuccaacggcugcgacuacgucuccaacaagggcgucgacaccgucuccgucggcaacacccucuacugcgucaacaagcaggagggcaagucccucuacgucaagggcgagcccaucaucaacuucuacgacccccucgucuuccccuccgacgaguucgacgccuccaucucccaggucaacgagaagaucaaccagucccucgccuucauccgcaaguccgacgagcuccuccacaacgucaacgccggcaaguccaccaccaacaucaugaucaccaccaucaucaucgucaucaucgucauccuccucucccucaucgccgucggccuccuccucuacugcaaggcccgcuccacccccgucacccucuccaaggaccagcucuccggcaucaacaacaucgccuucuccaacugaggacuagucccuguucccagagcccacuuuuuuuucuuuuuuugaaauaaaauagccugucuuucagaucuaaaaaaaaaaaaaaaaaaaaaaaaaaaaaaaaaaaaaaaaaaaaaaaaaaaaaaaaaaaaaaaaugcaucccccccccccccccccccccccccccccccaaaggcucuuuucagagccaccagaauu

SEQ ID NO: 4616 - RNA, 1981 nt, Artificial Sequence
  mRNA product Design a-3 comprising derived and/or modified sequence from HRSV(A2)__F_DSCav1_mut4 (opt3)
gggagagggcgcuuggcuugcaaggacccugagcugcggcauugaagcacacccaacccaacucgacugaagucagccucacugaaccggaucugagaaucuucucucucugggcuugccagggcucuccgaaccuagcuagcauccucuucaauuccaacuagaaagcuuaccauggagcugcucauccuuaaggccaacgcuauuaccacaauacugacugcagugacguucugcuuugccagcggccagaauaucaccgaagaguucuaccaauccacauguucugcggucucaaaaggguauuugagugcuuuaagaacuggaugguacaccagcguuauuacaaucgaacuguccaacauuaaggagaauaaaugcaacgguaccgacgccaaggugaaacuaaucaagcaggaacucgauaaguauaaaaaugcaguaacugagcugcagcuucugaugcagucuacacccgccaccggcucggggucagcuauauguagcggaguggcagucugcaagguguugcaccucgagggcgaaguuaacaaaaucaagagugcccugcuguccacgaauaaagcuguggucucucucagcaacgguguguccguauuaacuuuuaagguucuggaccuuaagaauuacauugauaaacaauugcugccuauccuaaacaagcagucauguaguauuagcaauaucgagaccgugauagaguuccagcagaaaaacaauaggcuccuggaaauuacacgggaguuuucugucaacgccggggugacuaccccaguguccacauauaugcuuaccaauucagaacuguugagccucaucaacgacaugccgauuacgaacgaucaaaagaaacugaugaguaauaacguccagaucguucgccagcagucuuacuccaucaugugcauuauaaaggaggaaguguuagcguauguagugcaacugccccucuacggagucaucgacacuccuuguuggaaacuucauacaagcccacugugcaccacuaauacaaaggagggcucgaacauuuguuugacccgaacggaucguggcugguacugcgacaaugcagggucuguguccuucuuuccccaggccgaaaccuguaagguucagucaaacagaguguucugcgauacaaugaauaguagaacucugccuagcgaggucaaccucugcaauguggacaucuuuaacccaaaauaugauuguaagauaaugaccuccaaaacagacguaucuagcucaguuauuaccagucugggagcuaucguguccugcuacgguaagacuaaauguacagccagcaauaagaacaggggcaucauuaagaccuucucuaaugggugcgauuaugucucaaacaaaggaguggacacugucagugugggcaauacgcuuuacuguguuaacaagcaagaggguaaaagccuguaugugaagggggaacccaucauuaacuuuuacgacccuuugguauucccauccgaugaguuugacgcaucuauaucgcaggucaaugagaaaaucaaccagagccucgcuuucauucggaaguccgaugaacuguuacacaaugugaacgccggaaagucaacaaccaauaucaugaucacuaccauuauaaucguuauuaucgugauucugcuaagucucaucgcggucggccugcuuuuguauugcaaagcccgcucuacaccggugacccugagcaaggaccagcucuccggcauaaacaauaucgcauucucaaacugaggacuagucccuguucccagagcccacuuuuuuuucuuuuuuugaaauaaaauagccugucuuucagaucuaaaaaaaaaaaaaaaaaaaaaaaaaaaaaaaaaaaaaaaaaaaaaaaaaaaaaaaaaaaaaaaaugcaucccccccccccccccccccccccccccccccaaaggcucuuuucagagccaccagaauu

SEQ ID NO: 4617 - RNA, 1981 nt, Artificial Sequence
  mRNA product Design a-3 comprising derived and/or modified sequence from HRSV(A2)__F_DSCav1_mut4 (opt4)
gggagagggcgcuuggcuugcaaggacccugagcugcggcauugaagcacacccaacccaacucgacugaagucagccucacugaaccggaucugagaaucuucucucucugggcuugccagggcucuccgaaccuagcuagcauccucuucaauuccaacuagaaagcuuaccauggagcugcugauccugaaggccaacgccaucaccaccauccugaccgccgugaccuucugcuucgccagcggccagaacaucaccgaggaguucuaccagagcaccugcagcgccgugagcaagggcuaccugagcgcccugagaaccggcugguacaccagcgugaucaccaucgagcugagcaacaucaaggagaacaagugcaacggcaccgacgccaaggugaagcugaucaagcaggagcuggacaaguacaagaacgccgugaccgagcugcagcugcugaugcagagcacccccgccaccggcagcggcagcgccaucugcagcggcguggccgugugcaaggugcugcaccuggagggcgaggugaacaagaucaagagcgcccugcugagcaccaacaaggccguggugagccugagcaacggcgugagcgugcugaccuucaaggugcuggaccugaagaacuacaucgacaagcagcugcugcccauccugaacaagcagagcugcagcaucagcaacaucgagaccgugaucgaguuccagcagaagaacaacagacugcuggagaucaccagagaguucagcgugaacgccggcgugaccacccccgugagcaccuacaugcugaccaacagcgagcugcugagccugaucaacgacaugcccaucaccaacgaccagaagaagcugaugagcaacaacgugcagaucgugagacagcagagcuacagcaucaugugcaucaucaaggaggaggugcuggccuacguggugcagcugccccuguacggcgugaucgacacccccugcuggaagcugcacaccagcccccugugcaccaccaacaccaaggagggcagcaacaucugccugaccagaaccgacagaggcugguacugcgacaacgccggcagcgugagcuucuucccccaggccgagaccugcaaggugcagagcaacagaguguucugcgacaccaugaacagcagaacccugcccagcgaggugaaccugugcaacguggacaucuucaaccccaaguacgacugcaagaucaugaccagcaagaccgacgugagcagcagcgugaucaccagccugggcgccaucgugagcugcuacggcaagaccaagugcaccgccagcaacaagaacagaggcaucaucaagaccuucagcaacggcugcgacuacgugagcaacaagggcguggacaccgugagcgugggcaacacccuguacugcgugaacaagcaggagggcaagagccuguacgugaagggcgagcccaucaucaacuucuacgacccccugguguuccccagcgacgaguucgacgccagcaucagccaggugaacgagaagaucaaccagagccuggccuucaucagaaagagcgacgagcugcugcacaacgugaacgccggcaagagcaccaccaacaucaugaucaccaccaucaucaucgugaucaucgugauccugcugagccugaucgccgugggccugcugcuguacugcaaggccagaagcacccccgugacccugagcaaggaccagcugagcggcaucaacaacaucgccuucagcaacugaggacuagucccuguucccagagcccacuuuuuuuucuuuuuuugaaauaaaauagccugucuuucagaucuaaaaaaaaaaaaaaaaaaaaaaaaaaaaaaaaaaaaaaaaaaaaaaaaaaaaaaaaaaaaaaaaugcaucccccccccccccccccccccccccccccccaaaggcucuuuucagagccaccagaauu

SEQ ID NO: 4618 - RNA, 1981 nt, Artificial Sequence
  mRNA product Design a-3 comprising derived and/or modified sequence from HRSV(A2)__F_DSCav1_mut4 (opt5)
gggagagggcgcuuggcuugcaaggacccugagcugcggcauugaagcacacccaacccaacucgacugaagucagccucacugaaccggaucugagaaucuucucucucugggcuugccagggcucuccgaaccuagcuagcauccucuucaauuccaacuagaaagcuuaccauggagcugcucauccugaaggccaacgcuauuaccacaauccuuacggccgugaccuucugcuuugcgagcggccagaauauuacagaagaguucuaccaauccaccuguucugcugucagcaaaggguaucuguccgcccucagaacaggaugguacaccucuguuaucacaauugaacugagcaacaucaaggagaauaaaugcaacggcaccgacgccaaggugaaacuuaucaagcaggaacuggauaaguauaaaaaugcugugacggagcuccagcugcugaugcaguccacccccgccacagggucuggaagcgcuauuuguuccggcgucgccgugugcaagguucuccaccuggagggggaagugaacaaaaucaagagcgcgcuucugucuaccaauaaagccgucgugucccucagcaacggaguuucugugcugacauuuaagguccuugaccugaagaauuacauugauaaacaacuccugccuauccugaacaagcaguccuguagcauuucuaauaucgagaccgugauugaguuccagcagaaaaacaaucggcuccuggaaaucacgcgcgaguuuuccgugaacgcuggcgucacaaccccgguuagcacauauaugcuuaccaauuccgaacugcucucucugaucaacgacaugcccauuaccaacgaucaaaagaaacuuaugagcaauaacgugcagaucgugagacagcaguccuacagcauuaugugcaucauuaaggaggaaguccuggccuaugugguucaacucccucuguacggcgugaucgacacacccuguuggaaacugcauacgucuccucucugcaccacaaauaccaaggagggguccaacaucugucugacacggaccgaucgcggaugguacugcgacaaugcuggcagcgucucuuucuuuccccaggccgaaacguguaaggugcagagcaacagaguuuucugcgauacaaugaacuccagaacccugccuucugaggugaaucucugcaaugucgacauuuuuaacccgaaauaugauuguaagaucaugaccagcaaaacagacguguccagcucugucauuaccucccugggggcgaucgugagcugcuacggaaagacaaaauguacggccucuaauaagaaccggggcauuaucaagaccuucuccaaugggugcgauuauguuagcaacaaaggaguggacacagucuccgugggcaauacccuuuacuguguuaacaagcaagagggcaaaucucuguaugugaagggggaacccaucauuaacuuuuacgacccucucgucuuccccagcgaugaguuugacgcuuccaucucucaggugaaugagaaaauuaaccagagccuggccuucauccgcaaguccgaugaacugcuccacaaugugaacgcuggaaagagcacaaccaauauuaugaucacgaccauuaucaucguuauuaucgucauucugcuuucucugaucgccgugggccuccugcuguauugcaaagccagauccacaccugugacccuuagcaaggaccagcucucugggauuaacaauaucgcuuucuccaacugaggacuagucccuguucccagagcccacuuuuuuuucuuuuuuugaaauaaaauagccugucuuucagaucuaaaaaaaaaaaaaaaaaaaaaaaaaaaaaaaaaaaaaaaaaaaaaaaaaaaaaaaaaaaaaaaaugcaucccccccccccccccccccccccccccccccaaaggcucuuuucagagccaccagaauu

SEQ ID NO: 4619 - RNA, 1981 nt, Artificial Sequence
  mRNA product Design a-3 comprising derived and/or modified sequence from HRSV(A2)__F_DSCav1_mut4 (opt6)
gggagagggcgcuuggcuugcaaggacccugagcugcggcauugaagcacacccaacccaacucgacugaagucagccucacugaaccggaucugagaaucuucucucucugggcuugccagggcucuccgaaccuagcuagcauccucuucaauuccaacuagaaagcuuaccauggaacuucuaauacucaaagccaacgcaauaacaacaauauuaacagccguaacauuuugcuucgcaucaggucaaaacauaacagaagaguucuaccaauccacaugcucagcaguaucaaaaggauauuuaagugcucuaagaacaggaugguacacauccguaauaacaaucgaacuaucaaacauaaaagaaaauaaauguaauggaacagacgccaaaguaaaauuaaucaaacaagaacuagacaaauacaaaaacgcaguuacugaauuacaauuauuaaugcaaucaacaccggccacaggaucuggaucagcaauaugcucaggaguagcagucugcaaaguauuacaccuagaaggggaaguuaauaaaaucaaaucagcauuacuauccaccaacaaagcgguaguuucacucuccaacggcguaucugucuuaacauucaaaguauuagaccuaaaaaacuacauugacaaacaacuacuaccaauccuaaacaaacaaucauguuccauaagcaauauagaaacaguaauagaauuucaacaaaaaaacaacagacuauuagaaauaacaagagaauuuuccgucaaugcaggaguuacuaccccugucuccaccuauaugcuaaccaauuccgaacucuuaucauuaauaaacgacaugccuaucacaaaugaccaaaaaaaauuaaugagcaacaacguacaaauaguacgacaacaaucauacucaaucaugugcauaauaaaagaagaaguccuagcauacguuguacaacuaccacuauacggagucauagauaccccaugcuggaaacuccauacaagcccacuaugcacuacaaacacaaaagaaggcucuaauauaugucuaacaagaacagaccgaggaugguacugcgauaaugccggcucagucucauucuuuccgcaagccgaaacuuguaaaguacaaaguaacagaguauuuugugacaccaugaacucaagaacccucccaagcgaagucaaucuaugcaacguugauauauucaaucccaaauacgacugcaaaaucaugaccucaaaaacagacgucagcucauccguuauaacaucacuaggagccaucguaucuugcuauggaaaaacaaaaugcacagcaagcaauaaaaacagaggcauaauaaaaacauucucaaauggaugcgacuacguaucaaacaaaggagucgacacaguuuccguaggaaacacuuuauacugcguaaacaaacaagaaggaaaaucauuauacgucaaaggugaaccaauaauaaacuucuacgauccacuuguauucccaucagacgaauuugacgcaucaauuucacaaguaaacgaaaaaauaaaccaaucacucgcauucauaagaaaaucagaugaacuacuacauaacguaaacgcaggaaaauccacaacaaacaucaugauaacaaccaucauaaucguaauaaucguaauacuauuaucccuaauugcaguaggauuacucuuauauugcaaagcaagaucaacaccaguaacccucaguaaagaccaacuauccggaauaaauaacaucgcauucucaaacuaaggacuagucccuguucccagagcccacuuuuuuuucuuuuuuugaaauaaaauagccugucuuucagaucuaaaaaaaaaaaaaaaaaaaaaaaaaaaaaaaaaaaaaaaaaaaaaaaaaaaaaaaaaaaaaaaaugcaucccccccccccccccccccccccccccccccaaaggcucuuuucagagccaccagaauu

SEQ ID NO: 4620 - RNA, 1981 nt, Artificial Sequence
  mRNA product Design a-3 comprising derived and/or modified sequence from HRSV(A2)__F_DSCav1_mut4 (opt11)
gggagagggcgcuuggcuugcaaggacccugagcugcggcauugaagcacacccaacccaacucgacugaagucagccucacugaaccggaucugagaaucuucucucucugggcuugccagggcucuccgaaccuagcuagcauccucuucaauuccaacuagaaagcuuaccauggaacugcucauccucaaagccaacgccaucaccaccauucuuaccgccgucacauucugcuucgccucaggccaaaacaucaccgaagaauuuuaccaauccacuuguucagccgucucaaaaggauaccuaucagcccuccguaccggcugguacaccucggucauaacaauagaacucuccaacauaaaagaaaacaaaugcaacggcaccgacgccaaggucaaacugauaaaacaagaacuugauaaauacaaaaacgccgucacugaacuccaacuccucaugcaauccacucccgcuacuggcucuggcuccgccaucugcucuggcgucgccgucuguaaaguacuccaccucgaaggggaagucaacaaaaucaaaucagcccuccuuagcaccaacaaggccgucgucucccucucaaacggagucagcguccucaccuucaagguccucgaccucaagaacuacaucgacaaacaacuccugcccauccuaaauaaacaauccugcucuaucuccaauaucgaaaccguuauagaguuccaacagaaaaacaaccgacuccucgaaaucacccgcgaguucuccgucaacgcaggcgucaccaccccugugucaaccuacaugcucaccaacagcgaacuacucucacucaucaaugacaugcccaucaccaacgaccaaaagaaacucauguccaacaacguccaaaucguacgucaacaauccuacagcaucaugugcaucauaaaagaagaaguccucgccuacgucguccaacuuccccucuacggcgucauagacacccccugcuggaaacugcauaccucaccccuaugcaccaccaacacuaaagaaggcuccaacaucugccucacccgcacggaccgcggcugguacugcgacaacgccggcuccgucuccuucuucccccaagccgaaacuuguaaaguccaauccaacagagucuucugcgacaccaugaacucuagaacgcugccauccgagguaaaccuaugcaacgucgacaucuucaaucccaaauacgacugcaagaucaugaccucaaaaaccgacguauccuccucaguaaucaccagucucggagcuaucgucuccugcuacggcaaaaccaaaugcacggccucuaacaaaaaccgcggcaucaucaaaaccuucucaaacggaugcgacuacgucagcaacaaaggcguagauaccgucucugucggcaacacacuguacugcguaaacaagcaagaaggaaaaucccucuacguaaaaggcgaacccaucaucaacuucuacgacccccucguuuuccccucagaugaauuugacgccucgauaucacaagucaacgaaaagauaaaucagucccucgccuucauccgaaaauccgacgaacuccuccacaacguuaacgcaggaaaguccaccacaaacaucaugauaacuacaaucauaauagucauuaucgucauacuccucucccuaaucgccguaggccugcuacucuacugcaaagcccgcucaacccccgucacucucucaaaagaccaacucuccggcaucaauaacaucgccuucucaaacuaaggacuagucccuguucccagagcccacuuuuuuuucuuuuuuugaaauaaaauagccugucuuucagaucuaaaaaaaaaaaaaaaaaaaaaaaaaaaaaaaaaaaaaaaaaaaaaaaaaaaaaaaaaaaaaaaaugcaucccccccccccccccccccccccccccccccaaaggcucuuuucagagccaccagaauu

SEQ ID NO: 4621 - RNA, 1930 nt, Artificial Sequence
  mRNA product Design a-4 comprising derived and/or modified sequence from HRSV(A2)__F_DSCav1_mut4 (opt1)
gggagacuccugucgggcggaaguaggaggaguagaguuuaaaaacaguacucuuuuuccgguucgggacguaguugaagcaacgacaagccggauaaccgcucuugagacaggaagcuuaccauggagcugcucauccugaaggccaacgccaucaccaccauccugacggcggugaccuucugcuucgccagcggccagaacaucaccgaggaguucuaccaguccacgugcagcgccgucuccaagggguaccucagcgcccugcggaccggcugguacaccuccgugaucaccaucgagcugagcaacaucaaggagaacaagugcaacgggaccgacgccaaggugaagcucaucaagcaggagcuggacaaguacaagaacgcggucacggagcugcagcuccugaugcaguccaccccggcaaccggcuccggcuccgccaucugcagcggcgucgccgugugcaaggugcugcaccucgagggggaggucaacaagaucaagagcgcccugcuguccaccaacaaggccguggugagccucuccaacggcgucagcgugcugaccuucaaggugcuggaccucaagaacuacaucgacaagcagcugcugcccauccugaacaagcagagcugcuccaucagcaacaucgagacggugaucgaguuccagcagaagaacaaccggcuccuggagaucacccgcgaguucagcgugaacgccggggucaccacccccguguccacguacaugcugaccaacagcgagcuccugucccugaucaacgacaugccgaucaccaacgaccagaagaagcucaugagcaacaacgugcagaucguccggcagcaguccuacagcaucaugugcaucaucaaggaggaggugcuggcguacgugguccagcugccccucuacggcgugaucgacacccccugcuggaagcugcacacgagcccccugugcaccaccaacaccaaggagggguccaacaucugccucacgcgcaccgaccggggcugguacugcgacaacgccggcagcgucuccuucuucccgcaggccgagaccugcaaggugcagagcaaccgcguguucugcgacaccaugaacucccggacgcugcccagcgagguaaaccucugcaacgucgacaucuucaaccccaaguacgacugcaagaucaugaccuccaagaccgacgugagcuccagcgugaucaccucccugggggccaucgucagcugcuacggcaagacgaagugcaccgccagcaacaagaaccgggggaucaucaagaccuucuccaacggcugcgacuacgugagcaacaagggcguggacaccguguccgucgggaacacccuguacugcgugaacaagcaggagggcaagagccucuacgugaagggggagcccaucaucaacuucuacgacccgcuggucuuccccuccgacgaguucgacgcgagcaucucccaggugaacgagaagaucaaccagagccuggccuucauccgcaaguccgacgagcugcuccacaacgugaacgccggcaagagcacgaccaacaucaugaucaccaccaucaucaucgucaucaucgugauccugcugucccucaucgccguggggcugcugcucuacugcaaggcccggagcacgcccgucacccuguccaaggaccagcugagcggcaucaacaacaucgcguucuccaacugaggacuagucccuguucccagagcccacuuuuuuuucuuuuuuugaaauaaaauagccugucuuucagaucuaaaaaaaaaaaaaaaaaaaaaaaaaaaaaaaaaaaaaaaaaaaaaaaaaaaaaaaaaaaaaaaaugcaucccccccccccccccccccccccccccccccaaaggcucuuuucagagccaccagaauu

SEQ ID NO: 4622 - RNA, 1930 nt, Artificial Sequence
  mRNA product Design a-4 comprising derived and/or modified sequence from HRSV(A2)__F_DSCav1_mut4 (opt1)
gggagacuccugucgggcggaaguaggaggaguagaguuuaaaaacaguacucuuuuuccgguucgggacguaguugaagcaacgacaagccggauaaccgcucuugagacaggaagcuuaccauggagcugcucauccugaaggccaacgccaucaccaccauccugacggcggugaccuucugcuucgccagcggccagaacaucaccgaggaguucuaccaguccacgugcagcgccgucuccaagggguaccucagcgcccugcgcaccggcugguacaccuccgugaucaccaucgagcugagcaacaucaaggagaacaagugcaacgggaccgacgccaaggugaagcucaucaagcaggagcuggacaaguacaagaacgcggucacggagcugcagcuccugaugcaguccacccccgccaccggcagcggguccgccaucugcagcggcguggccgugugcaagguccugcaccucgagggcgaggugaacaagaucaaguccgcgcugcugagcaccaacaaggccguggucucccucagcaacgggguguccgugcugacguucaagguccuggaccucaagaacuacaucgacaagcagcugcugccgauccucaacaagcagagcugcuccaucagcaacaucgagaccgugaucgaguuccagcagaagaacaaccggcugcuggagaucacccgcgaguucuccgugaacgccggcgucaccacgcccgugagcaccuacaugcucaccaacagcgagcugcugucccucaucaacgacaugcccaucaccaacgaccagaagaagcugaugagcaacaacgugcagaucguccggcagcaguccuacagcaucaugugcaucaucaaggaggaggugcuggccuacgugguccagcucccccuguacggggugaucgacacgccgugcuggaagcugcacaccagcccccucugcaccaccaacacgaaggagggcuccaacaucugccugacccgcaccgaccgggggugguacugcgacaacgccggcuccgugagcuucuucccccaggcggagaccugcaagguccaguccaaccgcguguucugcgacacgaugaacagccggacccuccccuccgaggucaaccugugcaacguggacaucuucaacccgaaguacgacugcaagaucaugaccagcaagaccgacguguccagcuccgucaucacgagccugggcgccaucguguccugcuacgggaagaccaagugcaccgccagcaacaagaaccggggcaucaucaagaccuucuccaacgggugcgacuacgugagcaacaagggcgucgacacggugagcgugggcaacacccucuacugcgucaacaagcaggaggggaagucccuguacgugaagggcgagcccaucaucaacuucuacgacccccugguguuccccagcgacgaguucgacgccuccaucagccaggucaacgagaagaucaaccagucccucgccuucauccgcaagagcgacgagcugcugcacaacgugaacgcggggaaguccaccaccaacaucaugaucaccacgaucaucaucgugaucaucgucauccuccugagccugaucgccgugggccuccugcuguacugcaaggcccgguccaccccggugacccugagcaaggaccagcucuccgggaucaacaacaucgccuucagcaacugaggacuagucccuguucccagagcccacuuuuuuuucuuuuuuugaaauaaaauagccugucuuucagaucuaaaaaaaaaaaaaaaaaaaaaaaaaaaaaaaaaaaaaaaaaaaaaaaaaaaaaaaaaaaaaaaaugcaucccccccccccccccccccccccccccccccaaaggcucuuuucagagccaccagaauu

SEQ ID NO: 4623 - RNA, 1930 nt, Artificial Sequence
  mRNA product Design a-4 comprising derived and/or modified sequence from HRSV(A2)__F_DSCav1_mut4 (opt2)
gggagacuccugucgggcggaaguaggaggaguagaguuuaaaaacaguacucuuuuuccgguucgggacguaguugaagcaacgacaagccggauaaccgcucuugagacaggaagcuuaccauggagcuccucauccucaaggccaacgccaucaccaccauccucaccgccgucaccuucugcuucgccuccggccagaacaucaccgaggaguucuaccaguccaccugcuccgccgucuccaagggcuaccucuccgcccuccgcaccggcugguacaccuccgucaucaccaucgagcucuccaacaucaaggagaacaagugcaacggcaccgacgccaaggucaagcucaucaagcaggagcucgacaaguacaagaacgccgucaccgagcuccagcuccucaugcaguccacccccgccaccggcuccggcuccgccaucugcuccggcgucgccgucugcaagguccuccaccucgagggcgaggucaacaagaucaaguccgcccuccucuccaccaacaaggccgucgucucccucuccaacggcgucuccguccucaccuucaagguccucgaccucaagaacuacaucgacaagcagcuccuccccauccucaacaagcaguccugcuccaucuccaacaucgagaccgucaucgaguuccagcagaagaacaaccgccuccucgagaucacccgcgaguucuccgucaacgccggcgucaccacccccgucuccaccuacaugcucaccaacuccgagcuccucucccucaucaacgacaugcccaucaccaacgaccagaagaagcucauguccaacaacguccagaucguccgccagcaguccuacuccaucaugugcaucaucaaggaggagguccucgccuacgucguccagcucccccucuacggcgucaucgacacccccugcuggaagcuccacaccuccccccucugcaccaccaacaccaaggagggcuccaacaucugccucacccgcaccgaccgcggcugguacugcgacaacgccggcuccgucuccuucuucccccaggccgagaccugcaagguccaguccaaccgcgucuucugcgacaccaugaacucccgcacccuccccuccgaggucaaccucugcaacgucgacaucuucaaccccaaguacgacugcaagaucaugaccuccaagaccgacgucuccuccuccgucaucaccucccucggcgccaucgucuccugcuacggcaagaccaagugcaccgccuccaacaagaaccgcggcaucaucaagaccuucuccaacggcugcgacuacgucuccaacaagggcgucgacaccgucuccgucggcaacacccucuacugcgucaacaagcaggagggcaagucccucuacgucaagggcgagcccaucaucaacuucuacgacccccucgucuuccccuccgacgaguucgacgccuccaucucccaggucaacgagaagaucaaccagucccucgccuucauccgcaaguccgacgagcuccuccacaacgucaacgccggcaaguccaccaccaacaucaugaucaccaccaucaucaucgucaucaucgucauccuccucucccucaucgccgucggccuccuccucuacugcaaggcccgcuccacccccgucacccucuccaaggaccagcucuccggcaucaacaacaucgccuucuccaacugaggacuagucccuguucccagagcccacuuuuuuuucuuuuuuugaaauaaaauagccugucuuucagaucuaaaaaaaaaaaaaaaaaaaaaaaaaaaaaaaaaaaaaaaaaaaaaaaaaaaaaaaaaaaaaaaaugcaucccccccccccccccccccccccccccccccaaaggcucuuuucagagccaccagaauu

SEQ ID NO: 4624 - RNA, 1930 nt, Artificial Sequence
  mRNA product Design a-4 comprising derived and/or modified sequence from HRSV(A2)__F_DSCav1_mut4 (opt3)
gggagacuccugucgggcggaaguaggaggaguagaguuuaaaaacaguacucuuuuuccgguucgggacguaguugaagcaacgacaagccggauaaccgcucuugagacaggaagcuuaccauggagcugcucauccuuaaggccaacgcuauuaccacaauacugacugcagugacguucugcuuugccagcggccagaauaucaccgaagaguucuaccaauccacauguucugcggucucaaaaggguauuugagugcuuuaagaacuggaugguacaccagcguuauuacaaucgaacuguccaacauuaaggagaauaaaugcaacgguaccgacgccaaggugaaacuaaucaagcaggaacucgauaaguauaaaaaugcaguaacugagcugcagcuucugaugcagucuacacccgccaccggcucggggucagcuauauguagcggaguggcagucugcaagguguugcaccucgagggcgaaguuaacaaaaucaagagugcccugcuguccacgaauaaagcuguggucucucucagcaacgguguguccguauuaacuuuuaagguucuggaccuuaagaauuacauugauaaacaauugcugccuauccuaaacaagcagucauguaguauuagcaauaucgagaccgugauagaguuccagcagaaaaacaauaggcuccuggaaauuacacgggaguuuucugucaacgccggggugacuaccccaguguccacauauaugcuuaccaauucagaacuguugagccucaucaacgacaugccgauuacgaacgaucaaaagaaacugaugaguaauaacguccagaucguucgccagcagucuuacuccaucaugugcauuauaaaggaggaaguguuagcguauguagugcaacugccccucuacggagucaucgacacuccuuguuggaaacuucauacaagcccacugugcaccacuaauacaaaggagggcucgaacauuuguuugacccgaacggaucguggcugguacugcgacaaugcagggucuguguccuucuuuccccaggccgaaaccuguaagguucagucaaacagaguguucugcgauacaaugaauaguagaacucugccuagcgaggucaaccucugcaauguggacaucuuuaacccaaaauaugauuguaagauaaugaccuccaaaacagacguaucuagcucaguuauuaccagucugggagcuaucguguccugcuacgguaagacuaaauguacagccagcaauaagaacaggggcaucauuaagaccuucucuaaugggugcgauuaugucucaaacaaaggaguggacacugucagugugggcaauacgcuuuacuguguuaacaagcaagaggguaaaagccuguaugugaagggggaacccaucauuaacuuuuacgacccuuugguauucccauccgaugaguuugacgcaucuauaucgcaggucaaugagaaaaucaaccagagccucgcuuucauucggaaguccgaugaacuguuacacaaugugaacgccggaaagucaacaaccaauaucaugaucacuaccauuauaaucguuauuaucgugauucugcuaagucucaucgcggucggccugcuuuuguauugcaaagcccgcucuacaccggugacccugagcaaggaccagcucuccggcauaaacaauaucgcauucucaaacugaggacuagucccuguucccagagcccacuuuuuuuucuuuuuuugaaauaaaauagccugucuuucagaucuaaaaaaaaaaaaaaaaaaaaaaaaaaaaaaaaaaaaaaaaaaaaaaaaaaaaaaaaaaaaaaaaugcaucccccccccccccccccccccccccccccccaaaggcucuuuucagagccaccagaauu

SEQ ID NO: 4625 - RNA, 1930 nt, Artificial Sequence
  mRNA product Design a-4 comprising derived and/or modified sequence from HRSV(A2)__F_DSCav1_mut4 (opt4)
gggagacuccugucgggcggaaguaggaggaguagaguuuaaaaacaguacucuuuuuccgguucgggacguaguugaagcaacgacaagccggauaaccgcucuugagacaggaagcuuaccauggagcugcugauccugaaggccaacgccaucaccaccauccugaccgccgugaccuucugcuucgccagcggccagaacaucaccgaggaguucuaccagagcaccugcagcgccgugagcaagggcuaccugagcgcccugagaaccggcugguacaccagcgugaucaccaucgagcugagcaacaucaaggagaacaagugcaacggcaccgacgccaaggugaagcugaucaagcaggagcuggacaaguacaagaacgccgugaccgagcugcagcugcugaugcagagcacccccgccaccggcagcggcagcgccaucugcagcggcguggccgugugcaaggugcugcaccuggagggcgaggugaacaagaucaagagcgcccugcugagcaccaacaaggccguggugagccugagcaacggcgugagcgugcugaccuucaaggugcuggaccugaagaacuacaucgacaagcagcugcugcccauccugaacaagcagagcugcagcaucagcaacaucgagaccgugaucgaguuccagcagaagaacaacagacugcuggagaucaccagagaguucagcgugaacgccggcgugaccacccccgugagcaccuacaugcugaccaacagcgagcugcugagccugaucaacgacaugcccaucaccaacgaccagaagaagcugaugagcaacaacgugcagaucgugagacagcagagcuacagcaucaugugcaucaucaaggaggaggugcuggccuacguggugcagcugccccuguacggcgugaucgacacccccugcuggaagcugcacaccagcccccugugcaccaccaacaccaaggagggcagcaacaucugccugaccagaaccgacagaggcugguacugcgacaacgccggcagcgugagcuucuucccccaggccgagaccugcaaggugcagagcaacagaguguucugcgacaccaugaacagcagaacccugcccagcgaggugaaccugugcaacguggacaucuucaaccccaaguacgacugcaagaucaugaccagcaagaccgacgugagcagcagcgugaucaccagccugggcgccaucgugagcugcuacggcaagaccaagugcaccgccagcaacaagaacagaggcaucaucaagaccuucagcaacggcugcgacuacgugagcaacaagggcguggacaccgugagcgugggcaacacccuguacugcgugaacaagcaggagggcaagagccuguacgugaagggcgagcccaucaucaacuucuacgacccccugguguuccccagcgacgaguucgacgccagcaucagccaggugaacgagaagaucaaccagagccuggccuucaucagaaagagcgacgagcugcugcacaacgugaacgccggcaagagcaccaccaacaucaugaucaccaccaucaucaucgugaucaucgugauccugcugagccugaucgccgugggccugcugcuguacugcaaggccagaagcacccccgugacccugagcaaggaccagcugagcggcaucaacaacaucgccuucagcaacugaggacuagucccuguucccagagcccacuuuuuuuucuuuuuuugaaauaaaauagccugucuuucagaucuaaaaaaaaaaaaaaaaaaaaaaaaaaaaaaaaaaaaaaaaaaaaaaaaaaaaaaaaaaaaaaaaugcaucccccccccccccccccccccccccccccccaaaggcucuuuucagagccaccagaauu

SEQ ID NO: 4626 - RNA, 1930 nt, Artificial Sequence
  mRNA product Design a-4 comprising derived and/or modified sequence from HRSV(A2)__F_DSCav1_mut4 (opt5)
gggagacuccugucgggcggaaguaggaggaguagaguuuaaaaacaguacucuuuuuccgguucgggacguaguugaagcaacgacaagccggauaaccgcucuugagacaggaagcuuaccauggagcugcucauccugaaggccaacgcuauuaccacaauccuuacggccgugaccuucugcuuugcgagcggccagaauauuacagaagaguucuaccaauccaccuguucugcugucagcaaaggguaucuguccgcccucagaacaggaugguacaccucuguuaucacaauugaacugagcaacaucaaggagaauaaaugcaacggcaccgacgccaaggugaaacuuaucaagcaggaacuggauaaguauaaaaaugcugugacggagcuccagcugcugaugcaguccacccccgccacagggucuggaagcgcuauuuguuccggcgucgccgugugcaagguucuccaccuggagggggaagugaacaaaaucaagagcgcgcuucugucuaccaauaaagccgucgugucccucagcaacggaguuucugugcugacauuuaagguccuugaccugaagaauuacauugauaaacaacuccugccuauccugaacaagcaguccuguagcauuucuaauaucgagaccgugauugaguuccagcagaaaaacaaucggcuccuggaaaucacgcgcgaguuuuccgugaacgcuggcgucacaaccccgguuagcacauauaugcuuaccaauuccgaacugcucucucugaucaacgacaugcccauuaccaacgaucaaaagaaacuuaugagcaauaacgugcagaucgugagacagcaguccuacagcauuaugugcaucauuaaggaggaaguccuggccuaugugguucaacucccucuguacggcgugaucgacacacccuguuggaaacugcauacgucuccucucugcaccacaaauaccaaggagggguccaacaucugucugacacggaccgaucgcggaugguacugcgacaaugcuggcagcgucucuuucuuuccccaggccgaaacguguaaggugcagagcaacagaguuuucugcgauacaaugaacuccagaacccugccuucugaggugaaucucugcaaugucgacauuuuuaacccgaaauaugauuguaagaucaugaccagcaaaacagacguguccagcucugucauuaccucccugggggcgaucgugagcugcuacggaaagacaaaauguacggccucuaauaagaaccggggcauuaucaagaccuucuccaaugggugcgauuauguuagcaacaaaggaguggacacagucuccgugggcaauacccuuuacuguguuaacaagcaagagggcaaaucucuguaugugaagggggaacccaucauuaacuuuuacgacccucucgucuuccccagcgaugaguuugacgcuuccaucucucaggugaaugagaaaauuaaccagagccuggccuucauccgcaaguccgaugaacugcuccacaaugugaacgcuggaaagagcacaaccaauauuaugaucacgaccauuaucaucguuauuaucgucauucugcuuucucugaucgccgugggccuccugcuguauugcaaagccagauccacaccugugacccuuagcaaggaccagcucucugggauuaacaauaucgcuuucuccaacugaggacuagucccuguucccagagcccacuuuuuuuucuuuuuuugaaauaaaauagccugucuuucagaucuaaaaaaaaaaaaaaaaaaaaaaaaaaaaaaaaaaaaaaaaaaaaaaaaaaaaaaaaaaaaaaaaugcaucccccccccccccccccccccccccccccccaaaggcucuuuucagagccaccagaauu

SEQ ID NO: 4627 - RNA, 1930 nt, Artificial Sequence
  mRNA product Design a-4 comprising derived and/or modified sequence from HRSV(A2)__F_DSCav1_mut4 (opt6)
gggagacuccugucgggcggaaguaggaggaguagaguuuaaaaacaguacucuuuuuccgguucgggacguaguugaagcaacgacaagccggauaaccgcucuugagacaggaagcuuaccauggaacuucuaauacucaaagccaacgcaauaacaacaauauuaacagccguaacauuuugcuucgcaucaggucaaaacauaacagaagaguucuaccaauccacaugcucagcaguaucaaaaggauauuuaagugcucuaagaacaggaugguacacauccguaauaacaaucgaacuaucaaacauaaaagaaaauaaauguaauggaacagacgccaaaguaaaauuaaucaaacaagaacuagacaaauacaaaaacgcaguuacugaauuacaauuauuaaugcaaucaacaccggccacaggaucuggaucagcaauaugcucaggaguagcagucugcaaaguauuacaccuagaaggggaaguuaauaaaaucaaaucagcauuacuauccaccaacaaagcgguaguuucacucuccaacggcguaucugucuuaacauucaaaguauuagaccuaaaaaacuacauugacaaacaacuacuaccaauccuaaacaaacaaucauguuccauaagcaauauagaaacaguaauagaauuucaacaaaaaaacaacagacuauuagaaauaacaagagaauuuuccgucaaugcaggaguuacuaccccugucuccaccuauaugcuaaccaauuccgaacucuuaucauuaauaaacgacaugccuaucacaaaugaccaaaaaaaauuaaugagcaacaacguacaaauaguacgacaacaaucauacucaaucaugugcauaauaaaagaagaaguccuagcauacguuguacaacuaccacuauacggagucauagauaccccaugcuggaaacuccauacaagcccacuaugcacuacaaacacaaaagaaggcucuaauauaugucuaacaagaacagaccgaggaugguacugcgauaaugccggcucagucucauucuuuccgcaagccgaaacuuguaaaguacaaaguaacagaguauuuugugacaccaugaacucaagaacccucccaagcgaagucaaucuaugcaacguugauauauucaaucccaaauacgacugcaaaaucaugaccucaaaaacagacgucagcucauccguuauaacaucacuaggagccaucguaucuugcuauggaaaaacaaaaugcacagcaagcaauaaaaacagaggcauaauaaaaacauucucaaauggaugcgacuacguaucaaacaaaggagucgacacaguuuccguaggaaacacuuuauacugcguaaacaaacaagaaggaaaaucauuauacgucaaaggugaaccaauaauaaacuucuacgauccacuuguauucccaucagacgaauuugacgcaucaauuucacaaguaaacgaaaaaauaaaccaaucacucgcauucauaagaaaaucagaugaacuacuacauaacguaaacgcaggaaaauccacaacaaacaucaugauaacaaccaucauaaucguaauaaucguaauacuauuaucccuaauugcaguaggauuacucuuauauugcaaagcaagaucaacaccaguaacccucaguaaagaccaacuauccggaauaaauaacaucgcauucucaaacuaaggacuagucccuguucccagagcccacuuuuuuuucuuuuuuugaaauaaaauagccugucuuucagaucuaaaaaaaaaaaaaaaaaaaaaaaaaaaaaaaaaaaaaaaaaaaaaaaaaaaaaaaaaaaaaaaaugcaucccccccccccccccccccccccccccccccaaaggcucuuuucagagccaccagaauu

SEQ ID NO: 4628 - RNA, 1930 nt, Artificial Sequence
  mRNA product Design a-4 comprising derived and/or modified sequence from HRSV(A2)__F_DSCav1_mut4 (opt11)
gggagacuccugucgggcggaaguaggaggaguagaguuuaaaaacaguacucuuuuuccgguucgggacguaguugaagcaacgacaagccggauaaccgcucuugagacaggaagcuuaccauggaacugcucauccucaaagccaacgccaucaccaccauucuuaccgccgucacauucugcuucgccucaggccaaaacaucaccgaagaauuuuaccaauccacuuguucagccgucucaaaaggauaccuaucagcccuccguaccggcugguacaccucggucauaacaauagaacucuccaacauaaaagaaaacaaaugcaacggcaccgacgccaaggucaaacugauaaaacaagaacuugauaaauacaaaaacgccgucacugaacuccaacuccucaugcaauccacucccgcuacuggcucuggcuccgccaucugcucuggcgucgccgucuguaaaguacuccaccucgaaggggaagucaacaaaaucaaaucagcccuccuuagcaccaacaaggccgucgucucccucucaaacggagucagcguccucaccuucaagguccucgaccucaagaacuacaucgacaaacaacuccugcccauccuaaauaaacaauccugcucuaucuccaauaucgaaaccguuauagaguuccaacagaaaaacaaccgacuccucgaaaucacccgcgaguucuccgucaacgcaggcgucaccaccccugugucaaccuacaugcucaccaacagcgaacuacucucacucaucaaugacaugcccaucaccaacgaccaaaagaaacucauguccaacaacguccaaaucguacgucaacaauccuacagcaucaugugcaucauaaaagaagaaguccucgccuacgucguccaacuuccccucuacggcgucauagacacccccugcuggaaacugcauaccucaccccuaugcaccaccaacacuaaagaaggcuccaacaucugccucacccgcacggaccgcggcugguacugcgacaacgccggcuccgucuccuucuucccccaagccgaaacuuguaaaguccaauccaacagagucuucugcgacaccaugaacucuagaacgcugccauccgagguaaaccuaugcaacgucgacaucuucaaucccaaauacgacugcaagaucaugaccucaaaaaccgacguauccuccucaguaaucaccagucucggagcuaucgucuccugcuacggcaaaaccaaaugcacggccucuaacaaaaaccgcggcaucaucaaaaccuucucaaacggaugcgacuacgucagcaacaaaggcguagauaccgucucugucggcaacacacuguacugcguaaacaagcaagaaggaaaaucccucuacguaaaaggcgaacccaucaucaacuucuacgacccccucguuuuccccucagaugaauuugacgccucgauaucacaagucaacgaaaagauaaaucagucccucgccuucauccgaaaauccgacgaacuccuccacaacguuaacgcaggaaaguccaccacaaacaucaugauaacuacaaucauaauagucauuaucgucauacuccucucccuaaucgccguaggccugcuacucuacugcaaagcccgcucaacccccgucacucucucaaaagaccaacucuccggcaucaauaacaucgccuucucaaacuaaggacuagucccuguucccagagcccacuuuuuuuucuuuuuuugaaauaaaauagccugucuuucagaucuaaaaaaaaaaaaaaaaaaaaaaaaaaaaaaaaaaaaaaaaaaaaaaaaaaaaaaaaaaaaaaaaugcaucccccccccccccccccccccccccccccccaaaggcucuuuucagagccaccagaauu

SEQ ID NO: 4629 - RNA, 1876 nt, Artificial Sequence
  mRNA product Design a-5 comprising derived and/or modified sequence from HRSV(A2)__F_DSCav1_mut4 (opt1)
gggagacuuucccauucuguagcagaauuugguguugccuguggucuuggucccgcggagaagcuuaccauggagcugcucauccugaaggccaacgccaucaccaccauccugacggcggugaccuucugcuucgccagcggccagaacaucaccgaggaguucuaccaguccacgugcagcgccgucuccaagggguaccucagcgcccugcggaccggcugguacaccuccgugaucaccaucgagcugagcaacaucaaggagaacaagugcaacgggaccgacgccaaggugaagcucaucaagcaggagcuggacaaguacaagaacgcggucacggagcugcagcuccugaugcaguccaccccggcaaccggcuccggcuccgccaucugcagcggcgucgccgugugcaaggugcugcaccucgagggggaggucaacaagaucaagagcgcccugcuguccaccaacaaggccguggugagccucuccaacggcgucagcgugcugaccuucaaggugcuggaccucaagaacuacaucgacaagcagcugcugcccauccugaacaagcagagcugcuccaucagcaacaucgagacggugaucgaguuccagcagaagaacaaccggcuccuggagaucacccgcgaguucagcgugaacgccggggucaccacccccguguccacguacaugcugaccaacagcgagcuccugucccugaucaacgacaugccgaucaccaacgaccagaagaagcucaugagcaacaacgugcagaucguccggcagcaguccuacagcaucaugugcaucaucaaggaggaggugcuggcguacgugguccagcugccccucuacggcgugaucgacacccccugcuggaagcugcacacgagcccccugugcaccaccaacaccaaggagggguccaacaucugccucacgcgcaccgaccggggcugguacugcgacaacgccggcagcgucuccuucuucccgcaggccgagaccugcaaggugcagagcaaccgcguguucugcgacaccaugaacucccggacgcugcccagcgagguaaaccucugcaacgucgacaucuucaaccccaaguacgacugcaagaucaugaccuccaagaccgacgugagcuccagcgugaucaccucccugggggccaucgucagcugcuacggcaagacgaagugcaccgccagcaacaagaaccgggggaucaucaagaccuucuccaacggcugcgacuacgugagcaacaagggcguggacaccguguccgucgggaacacccuguacugcgugaacaagcaggagggcaagagccucuacgugaagggggagcccaucaucaacuucuacgacccgcuggucuuccccuccgacgaguucgacgcgagcaucucccaggugaacgagaagaucaaccagagccuggccuucauccgcaaguccgacgagcugcuccacaacgugaacgccggcaagagcacgaccaacaucaugaucaccaccaucaucaucgucaucaucgugauccugcugucccucaucgccguggggcugcugcucuacugcaaggcccggagcacgcccgucacccuguccaaggaccagcugagcggcaucaacaacaucgcguucuccaacugaggacuagucccuguucccagagcccacuuuuuuuucuuuuuuugaaauaaaauagccugucuuucagaucuaaaaaaaaaaaaaaaaaaaaaaaaaaaaaaaaaaaaaaaaaaaaaaaaaaaaaaaaaaaaaaaaugcaucccccccccccccccccccccccccccccccaaaggcucuuuucagagccaccagaauu

SEQ ID NO: 4630 - RNA, 1876 nt, Artificial Sequence
  mRNA product Design a-5 comprising derived and/or modified sequence from HRSV(A2)__F_DSCav1_mut4 (opt1)
gggagacuuucccauucuguagcagaauuugguguugccuguggucuuggucccgcggagaagcuuaccauggagcugcucauccugaaggccaacgccaucaccaccauccugacggcggugaccuucugcuucgccagcggccagaacaucaccgaggaguucuaccaguccacgugcagcgccgucuccaagggguaccucagcgcccugcgcaccggcugguacaccuccgugaucaccaucgagcugagcaacaucaaggagaacaagugcaacgggaccgacgccaaggugaagcucaucaagcaggagcuggacaaguacaagaacgcggucacggagcugcagcuccugaugcaguccacccccgccaccggcagcggguccgccaucugcagcggcguggccgugugcaagguccugcaccucgagggcgaggugaacaagaucaaguccgcgcugcugagcaccaacaaggccguggucucccucagcaacgggguguccgugcugacguucaagguccuggaccucaagaacuacaucgacaagcagcugcugccgauccucaacaagcagagcugcuccaucagcaacaucgagaccgugaucgaguuccagcagaagaacaaccggcugcuggagaucacccgcgaguucuccgugaacgccggcgucaccacgcccgugagcaccuacaugcucaccaacagcgagcugcugucccucaucaacgacaugcccaucaccaacgaccagaagaagcugaugagcaacaacgugcagaucguccggcagcaguccuacagcaucaugugcaucaucaaggaggaggugcuggccuacgugguccagcucccccuguacggggugaucgacacgccgugcuggaagcugcacaccagcccccucugcaccaccaacacgaaggagggcuccaacaucugccugacccgcaccgaccgggggugguacugcgacaacgccggcuccgugagcuucuucccccaggcggagaccugcaagguccaguccaaccgcguguucugcgacacgaugaacagccggacccuccccuccgaggucaaccugugcaacguggacaucuucaacccgaaguacgacugcaagaucaugaccagcaagaccgacguguccagcuccgucaucacgagccugggcgccaucguguccugcuacgggaagaccaagugcaccgccagcaacaagaaccggggcaucaucaagaccuucuccaacgggugcgacuacgugagcaacaagggcgucgacacggugagcgugggcaacacccucuacugcgucaacaagcaggaggggaagucccuguacgugaagggcgagcccaucaucaacuucuacgacccccugguguuccccagcgacgaguucgacgccuccaucagccaggucaacgagaagaucaaccagucccucgccuucauccgcaagagcgacgagcugcugcacaacgugaacgcggggaaguccaccaccaacaucaugaucaccacgaucaucaucgugaucaucgucauccuccugagccugaucgccgugggccuccugcuguacugcaaggcccgguccaccccggugacccugagcaaggaccagcucuccgggaucaacaacaucgccuucagcaacugaggacuagucccuguucccagagcccacuuuuuuuucuuuuuuugaaauaaaauagccugucuuucagaucuaaaaaaaaaaaaaaaaaaaaaaaaaaaaaaaaaaaaaaaaaaaaaaaaaaaaaaaaaaaaaaaaugcaucccccccccccccccccccccccccccccccaaaggcucuuuucagagccaccagaauu

SEQ ID NO: 4631 - RNA, 1876 nt, Artificial Sequence
  mRNA product Design a-5 comprising derived and/or modified sequence from HRSV(A2)__F_DSCav1_mut4 (opt2)
gggagacuuucccauucuguagcagaauuugguguugccuguggucuuggucccgcggagaagcuuaccauggagcuccucauccucaaggccaacgccaucaccaccauccucaccgccgucaccuucugcuucgccuccggccagaacaucaccgaggaguucuaccaguccaccugcuccgccgucuccaagggcuaccucuccgcccuccgcaccggcugguacaccuccgucaucaccaucgagcucuccaacaucaaggagaacaagugcaacggcaccgacgccaaggucaagcucaucaagcaggagcucgacaaguacaagaacgccgucaccgagcuccagcuccucaugcaguccacccccgccaccggcuccggcuccgccaucugcuccggcgucgccgucugcaagguccuccaccucgagggcgaggucaacaagaucaaguccgcccuccucuccaccaacaaggccgucgucucccucuccaacggcgucuccguccucaccuucaagguccucgaccucaagaacuacaucgacaagcagcuccuccccauccucaacaagcaguccugcuccaucuccaacaucgagaccgucaucgaguuccagcagaagaacaaccgccuccucgagaucacccgcgaguucuccgucaacgccggcgucaccacccccgucuccaccuacaugcucaccaacuccgagcuccucucccucaucaacgacaugcccaucaccaacgaccagaagaagcucauguccaacaacguccagaucguccgccagcaguccuacuccaucaugugcaucaucaaggaggagguccucgccuacgucguccagcucccccucuacggcgucaucgacacccccugcuggaagcuccacaccuccccccucugcaccaccaacaccaaggagggcuccaacaucugccucacccgcaccgaccgcggcugguacugcgacaacgccggcuccgucuccuucuucccccaggccgagaccugcaagguccaguccaaccgcgucuucugcgacaccaugaacucccgcacccuccccuccgaggucaaccucugcaacgucgacaucuucaaccccaaguacgacugcaagaucaugaccuccaagaccgacgucuccuccuccgucaucaccucccucggcgccaucgucuccugcuacggcaagaccaagugcaccgccuccaacaagaaccgcggcaucaucaagaccuucuccaacggcugcgacuacgucuccaacaagggcgucgacaccgucuccgucggcaacacccucuacugcgucaacaagcaggagggcaagucccucuacgucaagggcgagcccaucaucaacuucuacgacccccucgucuuccccuccgacgaguucgacgccuccaucucccaggucaacgagaagaucaaccagucccucgccuucauccgcaaguccgacgagcuccuccacaacgucaacgccggcaaguccaccaccaacaucaugaucaccaccaucaucaucgucaucaucgucauccuccucucccucaucgccgucggccuccuccucuacugcaaggcccgcuccacccccgucacccucuccaaggaccagcucuccggcaucaacaacaucgccuucuccaacugaggacuagucccuguucccagagcccacuuuuuuuucuuuuuuugaaauaaaauagccugucuuucagaucuaaaaaaaaaaaaaaaaaaaaaaaaaaaaaaaaaaaaaaaaaaaaaaaaaaaaaaaaaaaaaaaaugcaucccccccccccccccccccccccccccccccaaaggcucuuuucagagccaccagaauu

SEQ ID NO: 4632 - RNA, 1876 nt, Artificial Sequence
  mRNA product Design a-5 comprising derived and/or modified sequence from HRSV(A2)__F_DSCav1_mut4 (opt3)
gggagacuuucccauucuguagcagaauuugguguugccuguggucuuggucccgcggagaagcuuaccauggagcugcucauccuuaaggccaacgcuauuaccacaauacugacugcagugacguucugcuuugccagcggccagaauaucaccgaagaguucuaccaauccacauguucugcggucucaaaaggguauuugagugcuuuaagaacuggaugguacaccagcguuauuacaaucgaacuguccaacauuaaggagaauaaaugcaacgguaccgacgccaaggugaaacuaaucaagcaggaacucgauaaguauaaaaaugcaguaacugagcugcagcuucugaugcagucuacacccgccaccggcucggggucagcuauauguagcggaguggcagucugcaagguguugcaccucgagggcgaaguuaacaaaaucaagagugcccugcuguccacgaauaaagcuguggucucucucagcaacgguguguccguauuaacuuuuaagguucuggaccuuaagaauuacauugauaaacaauugcugccuauccuaaacaagcagucauguaguauuagcaauaucgagaccgugauagaguuccagcagaaaaacaauaggcuccuggaaauuacacgggaguuuucugucaacgccggggugacuaccccaguguccacauauaugcuuaccaauucagaacuguugagccucaucaacgacaugccgauuacgaacgaucaaaagaaacugaugaguaauaacguccagaucguucgccagcagucuuacuccaucaugugcauuauaaaggaggaaguguuagcguauguagugcaacugccccucuacggagucaucgacacuccuuguuggaaacuucauacaagcccacugugcaccacuaauacaaaggagggcucgaacauuuguuugacccgaacggaucguggcugguacugcgacaaugcagggucuguguccuucuuuccccaggccgaaaccuguaagguucagucaaacagaguguucugcgauacaaugaauaguagaacucugccuagcgaggucaaccucugcaauguggacaucuuuaacccaaaauaugauuguaagauaaugaccuccaaaacagacguaucuagcucaguuauuaccagucugggagcuaucguguccugcuacgguaagacuaaauguacagccagcaauaagaacaggggcaucauuaagaccuucucuaaugggugcgauuaugucucaaacaaaggaguggacacugucagugugggcaauacgcuuuacuguguuaacaagcaagaggguaaaagccuguaugugaagggggaacccaucauuaacuuuuacgacccuuugguauucccauccgaugaguuugacgcaucuauaucgcaggucaaugagaaaaucaaccagagccucgcuuucauucggaaguccgaugaacuguuacacaaugugaacgccggaaagucaacaaccaauaucaugaucacuaccauuauaaucguuauuaucgugauucugcuaagucucaucgcggucggccugcuuuuguauugcaaagcccgcucuacaccggugacccugagcaaggaccagcucuccggcauaaacaauaucgcauucucaaacugaggacuagucccuguucccagagcccacuuuuuuuucuuuuuuugaaauaaaauagccugucuuucagaucuaaaaaaaaaaaaaaaaaaaaaaaaaaaaaaaaaaaaaaaaaaaaaaaaaaaaaaaaaaaaaaaaugcaucccccccccccccccccccccccccccccccaaaggcucuuuucagagccaccagaauu

SEQ ID NO: 4633 - RNA, 1876 nt, Artificial Sequence
  mRNA product Design a-5 comprising derived and/or modified sequence from HRSV(A2)__F_DSCav1_mut4 (opt4)
gggagacuuucccauucuguagcagaauuugguguugccuguggucuuggucccgcggagaagcuuaccauggagcugcugauccugaaggccaacgccaucaccaccauccugaccgccgugaccuucugcuucgccagcggccagaacaucaccgaggaguucuaccagagcaccugcagcgccgugagcaagggcuaccugagcgcccugagaaccggcugguacaccagcgugaucaccaucgagcugagcaacaucaaggagaacaagugcaacggcaccgacgccaaggugaagcugaucaagcaggagcuggacaaguacaagaacgccgugaccgagcugcagcugcugaugcagagcacccccgccaccggcagcggcagcgccaucugcagcggcguggccgugugcaaggugcugcaccuggagggcgaggugaacaagaucaagagcgcccugcugagcaccaacaaggccguggugagccugagcaacggcgugagcgugcugaccuucaaggugcuggaccugaagaacuacaucgacaagcagcugcugcccauccugaacaagcagagcugcagcaucagcaacaucgagaccgugaucgaguuccagcagaagaacaacagacugcuggagaucaccagagaguucagcgugaacgccggcgugaccacccccgugagcaccuacaugcugaccaacagcgagcugcugagccugaucaacgacaugcccaucaccaacgaccagaagaagcugaugagcaacaacgugcagaucgugagacagcagagcuacagcaucaugugcaucaucaaggaggaggugcuggccuacguggugcagcugccccuguacggcgugaucgacacccccugcuggaagcugcacaccagcccccugugcaccaccaacaccaaggagggcagcaacaucugccugaccagaaccgacagaggcugguacugcgacaacgccggcagcgugagcuucuucccccaggccgagaccugcaaggugcagagcaacagaguguucugcgacaccaugaacagcagaacccugcccagcgaggugaaccugugcaacguggacaucuucaaccccaaguacgacugcaagaucaugaccagcaagaccgacgugagcagcagcgugaucaccagccugggcgccaucgugagcugcuacggcaagaccaagugcaccgccagcaacaagaacagaggcaucaucaagaccuucagcaacggcugcgacuacgugagcaacaagggcguggacaccgugagcgugggcaacacccuguacugcgugaacaagcaggagggcaagagccuguacgugaagggcgagcccaucaucaacuucuacgacccccugguguuccccagcgacgaguucgacgccagcaucagccaggugaacgagaagaucaaccagagccuggccuucaucagaaagagcgacgagcugcugcacaacgugaacgccggcaagagcaccaccaacaucaugaucaccaccaucaucaucgugaucaucgugauccugcugagccugaucgccgugggccugcugcuguacugcaaggccagaagcacccccgugacccugagcaaggaccagcugagcggcaucaacaacaucgccuucagcaacugaggacuagucccuguucccagagcccacuuuuuuuucuuuuuuugaaauaaaauagccugucuuucagaucuaaaaaaaaaaaaaaaaaaaaaaaaaaaaaaaaaaaaaaaaaaaaaaaaaaaaaaaaaaaaaaaaugcaucccccccccccccccccccccccccccccccaaaggcucuuuucagagccaccagaauu

SEQ ID NO: 4634 - RNA, 1876 nt, Artificial Sequence
  mRNA product Design a-5 comprising derived and/or modified sequence from HRSV(A2)__F_DSCav1_mut4 (opt5)
gggagacuuucccauucuguagcagaauuugguguugccuguggucuuggucccgcggagaagcuuaccauggagcugcucauccugaaggccaacgcuauuaccacaauccuuacggccgugaccuucugcuuugcgagcggccagaauauuacagaagaguucuaccaauccaccuguucugcugucagcaaaggguaucuguccgcccucagaacaggaugguacaccucuguuaucacaauugaacugagcaacaucaaggagaauaaaugcaacggcaccgacgccaaggugaaacuuaucaagcaggaacuggauaaguauaaaaaugcugugacggagcuccagcugcugaugcaguccacccccgccacagggucuggaagcgcuauuuguuccggcgucgccgugugcaagguucuccaccuggagggggaagugaacaaaaucaagagcgcgcuucugucuaccaauaaagccgucgugucccucagcaacggaguuucugugcugacauuuaagguccuugaccugaagaauuacauugauaaacaacuccugccuauccugaacaagcaguccuguagcauuucuaauaucgagaccgugauugaguuccagcagaaaaacaaucggcuccuggaaaucacgcgcgaguuuuccgugaacgcuggcgucacaaccccgguuagcacauauaugcuuaccaauuccgaacugcucucucugaucaacgacaugcccauuaccaacgaucaaaagaaacuuaugagcaauaacgugcagaucgugagacagcaguccuacagcauuaugugcaucauuaaggaggaaguccuggccuaugugguucaacucccucuguacggcgugaucgacacacccuguuggaaacugcauacgucuccucucugcaccacaaauaccaaggagggguccaacaucugucugacacggaccgaucgcggaugguacugcgacaaugcuggcagcgucucuuucuuuccccaggccgaaacguguaaggugcagagcaacagaguuuucugcgauacaaugaacuccagaacccugccuucugaggugaaucucugcaaugucgacauuuuuaacccgaaauaugauuguaagaucaugaccagcaaaacagacguguccagcucugucauuaccucccugggggcgaucgugagcugcuacggaaagacaaaauguacggccucuaauaagaaccggggcauuaucaagaccuucuccaaugggugcgauuauguuagcaacaaaggaguggacacagucuccgugggcaauacccuuuacuguguuaacaagcaagagggcaaaucucuguaugugaagggggaacccaucauuaacuuuuacgacccucucgucuuccccagcgaugaguuugacgcuuccaucucucaggugaaugagaaaauuaaccagagccuggccuucauccgcaaguccgaugaacugcuccacaaugugaacgcuggaaagagcacaaccaauauuaugaucacgaccauuaucaucguuauuaucgucauucugcuuucucugaucgccgugggccuccugcuguauugcaaagccagauccacaccugugacccuuagcaaggaccagcucucugggauuaacaauaucgcuuucuccaacugaggacuagucccuguucccagagcccacuuuuuuuucuuuuuuugaaauaaaauagccugucuuucagaucuaaaaaaaaaaaaaaaaaaaaaaaaaaaaaaaaaaaaaaaaaaaaaaaaaaaaaaaaaaaaaaaaugcaucccccccccccccccccccccccccccccccaaaggcucuuuucagagccaccagaauu

SEQ ID NO: 4635 - RNA, 1876 nt, Artificial Sequence
  mRNA product Design a-5 comprising derived and/or modified sequence from HRSV(A2)__F_DSCav1_mut4 (opt6)
gggagacuuucccauucuguagcagaauuugguguugccuguggucuuggucccgcggagaagcuuaccauggaacuucuaauacucaaagccaacgcaauaacaacaauauuaacagccguaacauuuugcuucgcaucaggucaaaacauaacagaagaguucuaccaauccacaugcucagcaguaucaaaaggauauuuaagugcucuaagaacaggaugguacacauccguaauaacaaucgaacuaucaaacauaaaagaaaauaaauguaauggaacagacgccaaaguaaaauuaaucaaacaagaacuagacaaauacaaaaacgcaguuacugaauuacaauuauuaaugcaaucaacaccggccacaggaucuggaucagcaauaugcucaggaguagcagucugcaaaguauuacaccuagaaggggaaguuaauaaaaucaaaucagcauuacuauccaccaacaaagcgguaguuucacucuccaacggcguaucugucuuaacauucaaaguauuagaccuaaaaaacuacauugacaaacaacuacuaccaauccuaaacaaacaaucauguuccauaagcaauauagaaacaguaauagaauuucaacaaaaaaacaacagacuauuagaaauaacaagagaauuuuccgucaaugcaggaguuacuaccccugucuccaccuauaugcuaaccaauuccgaacucuuaucauuaauaaacgacaugccuaucacaaaugaccaaaaaaaauuaaugagcaacaacguacaaauaguacgacaacaaucauacucaaucaugugcauaauaaaagaagaaguccuagcauacguuguacaacuaccacuauacggagucauagauaccccaugcuggaaacuccauacaagcccacuaugcacuacaaacacaaaagaaggcucuaauauaugucuaacaagaacagaccgaggaugguacugcgauaaugccggcucagucucauucuuuccgcaagccgaaacuuguaaaguacaaaguaacagaguauuuugugacaccaugaacucaagaacccucccaagcgaagucaaucuaugcaacguugauauauucaaucccaaauacgacugcaaaaucaugaccucaaaaacagacgucagcucauccguuauaacaucacuaggagccaucguaucuugcuauggaaaaacaaaaugcacagcaagcaauaaaaacagaggcauaauaaaaacauucucaaauggaugcgacuacguaucaaacaaaggagucgacacaguuuccguaggaaacacuuuauacugcguaaacaaacaagaaggaaaaucauuauacgucaaaggugaaccaauaauaaacuucuacgauccacuuguauucccaucagacgaauuugacgcaucaauuucacaaguaaacgaaaaaauaaaccaaucacucgcauucauaagaaaaucagaugaacuacuacauaacguaaacgcaggaaaauccacaacaaacaucaugauaacaaccaucauaaucguaauaaucguaauacuauuaucccuaauugcaguaggauuacucuuauauugcaaagcaagaucaacaccaguaacccucaguaaagaccaacuauccggaauaaauaacaucgcauucucaaacuaaggacuagucccuguucccagagcccacuuuuuuuucuuuuuuugaaauaaaauagccugucuuucagaucuaaaaaaaaaaaaaaaaaaaaaaaaaaaaaaaaaaaaaaaaaaaaaaaaaaaaaaaaaaaaaaaaugcaucccccccccccccccccccccccccccccccaaaggcucuuuucagagccaccagaauu

SEQ ID NO: 4636 - RNA, 1876 nt, Artificial Sequence
  mRNA product Design a-5 comprising derived and/or modified sequence from HRSV(A2)__F_DSCav1_mut4 (opt11)
gggagacuuucccauucuguagcagaauuugguguugccuguggucuuggucccgcggagaagcuuaccauggaacugcucauccucaaagccaacgccaucaccaccauucuuaccgccgucacauucugcuucgccucaggccaaaacaucaccgaagaauuuuaccaauccacuuguucagccgucucaaaaggauaccuaucagcccuccguaccggcugguacaccucggucauaacaauagaacucuccaacauaaaagaaaacaaaugcaacggcaccgacgccaaggucaaacugauaaaacaagaacuugauaaauacaaaaacgccgucacugaacuccaacuccucaugcaauccacucccgcuacuggcucuggcuccgccaucugcucuggcgucgccgucuguaaaguacuccaccucgaaggggaagucaacaaaaucaaaucagcccuccuuagcaccaacaaggccgucgucucccucucaaacggagucagcguccucaccuucaagguccucgaccucaagaacuacaucgacaaacaacuccugcccauccuaaauaaacaauccugcucuaucuccaauaucgaaaccguuauagaguuccaacagaaaaacaaccgacuccucgaaaucacccgcgaguucuccgucaacgcaggcgucaccaccccugugucaaccuacaugcucaccaacagcgaacuacucucacucaucaaugacaugcccaucaccaacgaccaaaagaaacucauguccaacaacguccaaaucguacgucaacaauccuacagcaucaugugcaucauaaaagaagaaguccucgccuacgucguccaacuuccccucuacggcgucauagacacccccugcuggaaacugcauaccucaccccuaugcaccaccaacacuaaagaaggcuccaacaucugccucacccgcacggaccgcggcugguacugcgacaacgccggcuccgucuccuucuucccccaagccgaaacuuguaaaguccaauccaacagagucuucugcgacaccaugaacucuagaacgcugccauccgagguaaaccuaugcaacgucgacaucuucaaucccaaauacgacugcaagaucaugaccucaaaaaccgacguauccuccucaguaaucaccagucucggagcuaucgucuccugcuacggcaaaaccaaaugcacggccucuaacaaaaaccgcggcaucaucaaaaccuucucaaacggaugcgacuacgucagcaacaaaggcguagauaccgucucugucggcaacacacuguacugcguaaacaagcaagaaggaaaaucccucuacguaaaaggcgaacccaucaucaacuucuacgacccccucguuuuccccucagaugaauuugacgccucgauaucacaagucaacgaaaagauaaaucagucccucgccuucauccgaaaauccgacgaacuccuccacaacguuaacgcaggaaaguccaccacaaacaucaugauaacuacaaucauaauagucauuaucgucauacuccucucccuaaucgccguaggccugcuacucuacugcaaagcccgcucaacccccgucacucucucaaaagaccaacucuccggcaucaauaacaucgccuucucaaacuaaggacuagucccuguucccagagcccacuuuuuuuucuuuuuuugaaauaaaauagccugucuuucagaucuaaaaaaaaaaaaaaaaaaaaaaaaaaaaaaaaaaaaaaaaaaaaaaaaaaaaaaaaaaaaaaaaugcaucccccccccccccccccccccccccccccccaaaggcucuuuucagagccaccagaauu

SEQ ID NO: 4637 - RNA, 2057 nt, Artificial Sequence
  mRNA product Design b-1 comprising derived and/or modified sequence from HRSV(A2)__F_DSCav1_mut4 (opt1)
gggagacggagacggccugcaggaccugcucucucagcccucagccgaggccuacgccgagccgagugcgcagccgacgaccgggaggagccgcagccuucaacucugagguacugugauccgcgcugcccgccgggccgccccaguccgcugcugcggcaccuccuucccucgcgcccucuucgcucgccagcgccuucccugugagccugcgucaccgcggccgccaagcuuaccauggagcugcucauccugaaggccaacgccaucaccaccauccugacggcggugaccuucugcuucgccagcggccagaacaucaccgaggaguucuaccaguccacgugcagcgccgucuccaagggguaccucagcgcccugcggaccggcugguacaccuccgugaucaccaucgagcugagcaacaucaaggagaacaagugcaacgggaccgacgccaaggugaagcucaucaagcaggagcuggacaaguacaagaacgcggucacggagcugcagcuccugaugcaguccaccccggcaaccggcuccggcuccgccaucugcagcggcgucgccgugugcaaggugcugcaccucgagggggaggucaacaagaucaagagcgcccugcuguccaccaacaaggccguggugagccucuccaacggcgucagcgugcugaccuucaaggugcuggaccucaagaacuacaucgacaagcagcugcugcccauccugaacaagcagagcugcuccaucagcaacaucgagacggugaucgaguuccagcagaagaacaaccggcuccuggagaucacccgcgaguucagcgugaacgccggggucaccacccccguguccacguacaugcugaccaacagcgagcuccugucccugaucaacgacaugccgaucaccaacgaccagaagaagcucaugagcaacaacgugcagaucguccggcagcaguccuacagcaucaugugcaucaucaaggaggaggugcuggcguacgugguccagcugccccucuacggcgugaucgacacccccugcuggaagcugcacacgagcccccugugcaccaccaacaccaaggagggguccaacaucugccucacgcgcaccgaccggggcugguacugcgacaacgccggcagcgucuccuucuucccgcaggccgagaccugcaaggugcagagcaaccgcguguucugcgacaccaugaacucccggacgcugcccagcgagguaaaccucugcaacgucgacaucuucaaccccaaguacgacugcaagaucaugaccuccaagaccgacgugagcuccagcgugaucaccucccugggggccaucgucagcugcuacggcaagacgaagugcaccgccagcaacaagaaccgggggaucaucaagaccuucuccaacggcugcgacuacgugagcaacaagggcguggacaccguguccgucgggaacacccuguacugcgugaacaagcaggagggcaagagccucuacgugaagggggagcccaucaucaacuucuacgacccgcuggucuuccccuccgacgaguucgacgcgagcaucucccaggugaacgagaagaucaaccagagccuggccuucauccgcaaguccgacgagcugcuccacaacgugaacgccggcaagagcacgaccaacaucaugaucaccaccaucaucaucgucaucaucgugauccugcugucccucaucgccguggggcugcugcucuacugcaaggcccggagcacgcccgucacccuguccaaggaccagcugagcggcaucaacaacaucgcguucuccaacugaggacuaguguccaccugucccuccugggcugcuggauugucucguuuuccugccaaauaaacaggaucagcgcuuuacagaucuaaaaaaaaaaaaaaaaaaaaaaaaaaaaaaaaaaaaaaaaaaaaaaaaaaaaaaaaaaaaaaaaugcaucccccccccccccccccccccccccccccccaaaggcucuuuucagagccaccagaauu

SEQ ID NO: 4638 - RNA, 2057 nt, Artificial Sequence
  mRNA product Design b-1 comprising derived and/or modified sequence from HRSV(A2)__F_DSCav1_mut4 (opt1)
gggagacggagacggccugcaggaccugcucucucagcccucagccgaggccuacgccgagccgagugcgcagccgacgaccgggaggagccgcagccuucaacucugagguacugugauccgcgcugcccgccgggccgccccaguccgcugcugcggcaccuccuucccucgcgcccucuucgcucgccagcgccuucccugugagccugcgucaccgcggccgccaagcuuaccauggagcugcucauccugaaggccaacgccaucaccaccauccugacggcggugaccuucugcuucgccagcggccagaacaucaccgaggaguucuaccaguccacgugcagcgccgucuccaagggguaccucagcgcccugcgcaccggcugguacaccuccgugaucaccaucgagcugagcaacaucaaggagaacaagugcaacgggaccgacgccaaggugaagcucaucaagcaggagcuggacaaguacaagaacgcggucacggagcugcagcuccugaugcaguccacccccgccaccggcagcggguccgccaucugcagcggcguggccgugugcaagguccugcaccucgagggcgaggugaacaagaucaaguccgcgcugcugagcaccaacaaggccguggucucccucagcaacgggguguccgugcugacguucaagguccuggaccucaagaacuacaucgacaagcagcugcugccgauccucaacaagcagagcugcuccaucagcaacaucgagaccgugaucgaguuccagcagaagaacaaccggcugcuggagaucacccgcgaguucuccgugaacgccggcgucaccacgcccgugagcaccuacaugcucaccaacagcgagcugcugucccucaucaacgacaugcccaucaccaacgaccagaagaagcugaugagcaacaacgugcagaucguccggcagcaguccuacagcaucaugugcaucaucaaggaggaggugcuggccuacgugguccagcucccccuguacggggugaucgacacgccgugcuggaagcugcacaccagcccccucugcaccaccaacacgaaggagggcuccaacaucugccugacccgcaccgaccgggggugguacugcgacaacgccggcuccgugagcuucuucccccaggcggagaccugcaagguccaguccaaccgcguguucugcgacacgaugaacagccggacccuccccuccgaggucaaccugugcaacguggacaucuucaacccgaaguacgacugcaagaucaugaccagcaagaccgacguguccagcuccgucaucacgagccugggcgccaucguguccugcuacgggaagaccaagugcaccgccagcaacaagaaccggggcaucaucaagaccuucuccaacgggugcgacuacgugagcaacaagggcgucgacacggugagcgugggcaacacccucuacugcgucaacaagcaggaggggaagucccuguacgugaagggcgagcccaucaucaacuucuacgacccccugguguuccccagcgacgaguucgacgccuccaucagccaggucaacgagaagaucaaccagucccucgccuucauccgcaagagcgacgagcugcugcacaacgugaacgcggggaaguccaccaccaacaucaugaucaccacgaucaucaucgugaucaucgucauccuccugagccugaucgccgugggccuccugcuguacugcaaggcccgguccaccccggugacccugagcaaggaccagcucuccgggaucaacaacaucgccuucagcaacugaggacuaguguccaccugucccuccugggcugcuggauugucucguuuuccugccaaauaaacaggaucagcgcuuuacagaucuaaaaaaaaaaaaaaaaaaaaaaaaaaaaaaaaaaaaaaaaaaaaaaaaaaaaaaaaaaaaaaaaugcaucccccccccccccccccccccccccccccccaaaggcucuuuucagagccaccagaauu

SEQ ID NO: 4639 - RNA, 2057 nt, Artificial Sequence
  mRNA product Design b-1 comprising derived and/or modified sequence from HRSV(A2)__F_DSCav1_mut4 (opt2)
gggagacggagacggccugcaggaccugcucucucagcccucagccgaggccuacgccgagccgagugcgcagccgacgaccgggaggagccgcagccuucaacucugagguacugugauccgcgcugcccgccgggccgccccaguccgcugcugcggcaccuccuucccucgcgcccucuucgcucgccagcgccuucccugugagccugcgucaccgcggccgccaagcuuaccauggagcuccucauccucaaggccaacgccaucaccaccauccucaccgccgucaccuucugcuucgccuccggccagaacaucaccgaggaguucuaccaguccaccugcuccgccgucuccaagggcuaccucuccgcccuccgcaccggcugguacaccuccgucaucaccaucgagcucuccaacaucaaggagaacaagugcaacggcaccgacgccaaggucaagcucaucaagcaggagcucgacaaguacaagaacgccgucaccgagcuccagcuccucaugcaguccacccccgccaccggcuccggcuccgccaucugcuccggcgucgccgucugcaagguccuccaccucgagggcgaggucaacaagaucaaguccgcccuccucuccaccaacaaggccgucgucucccucuccaacggcgucuccguccucaccuucaagguccucgaccucaagaacuacaucgacaagcagcuccuccccauccucaacaagcaguccugcuccaucuccaacaucgagaccgucaucgaguuccagcagaagaacaaccgccuccucgagaucacccgcgaguucuccgucaacgccggcgucaccacccccgucuccaccuacaugcucaccaacuccgagcuccucucccucaucaacgacaugcccaucaccaacgaccagaagaagcucauguccaacaacguccagaucguccgccagcaguccuacuccaucaugugcaucaucaaggaggagguccucgccuacgucguccagcucccccucuacggcgucaucgacacccccugcuggaagcuccacaccuccccccucugcaccaccaacaccaaggagggcuccaacaucugccucacccgcaccgaccgcggcugguacugcgacaacgccggcuccgucuccuucuucccccaggccgagaccugcaagguccaguccaaccgcgucuucugcgacaccaugaacucccgcacccuccccuccgaggucaaccucugcaacgucgacaucuucaaccccaaguacgacugcaagaucaugaccuccaagaccgacgucuccuccuccgucaucaccucccucggcgccaucgucuccugcuacggcaagaccaagugcaccgccuccaacaagaaccgcggcaucaucaagaccuucuccaacggcugcgacuacgucuccaacaagggcgucgacaccgucuccgucggcaacacccucuacugcgucaacaagcaggagggcaagucccucuacgucaagggcgagcccaucaucaacuucuacgacccccucgucuuccccuccgacgaguucgacgccuccaucucccaggucaacgagaagaucaaccagucccucgccuucauccgcaaguccgacgagcuccuccacaacgucaacgccggcaaguccaccaccaacaucaugaucaccaccaucaucaucgucaucaucgucauccuccucucccucaucgccgucggccuccuccucuacugcaaggcccgcuccacccccgucacccucuccaaggaccagcucuccggcaucaacaacaucgccuucuccaacugaggacuaguguccaccugucccuccugggcugcuggauugucucguuuuccugccaaauaaacaggaucagcgcuuuacagaucuaaaaaaaaaaaaaaaaaaaaaaaaaaaaaaaaaaaaaaaaaaaaaaaaaaaaaaaaaaaaaaaaugcaucccccccccccccccccccccccccccccccaaaggcucuuuucagagccaccagaauu

SEQ ID NO: 4640 - RNA, 2057 nt, Artificial Sequence
  mRNA product Design b-1 comprising derived and/or modified sequence from HRSV(A2)__F_DSCav1_mut4 (opt3)
gggagacggagacggccugcaggaccugcucucucagcccucagccgaggccuacgccgagccgagugcgcagccgacgaccgggaggagccgcagccuucaacucugagguacugugauccgcgcugcccgccgggccgccccaguccgcugcugcggcaccuccuucccucgcgcccucuucgcucgccagcgccuucccugugagccugcgucaccgcggccgccaagcuuaccauggagcugcucauccuuaaggccaacgcuauuaccacaauacugacugcagugacguucugcuuugccagcggccagaauaucaccgaagaguucuaccaauccacauguucugcggucucaaaaggguauuugagugcuuuaagaacuggaugguacaccagcguuauuacaaucgaacuguccaacauuaaggagaauaaaugcaacgguaccgacgccaaggugaaacuaaucaagcaggaacucgauaaguauaaaaaugcaguaacugagcugcagcuucugaugcagucuacacccgccaccggcucggggucagcuauauguagcggaguggcagucugcaagguguugcaccucgagggcgaaguuaacaaaaucaagagugcccugcuguccacgaauaaagcuguggucucucucagcaacgguguguccguauuaacuuuuaagguucuggaccuuaagaauuacauugauaaacaauugcugccuauccuaaacaagcagucauguaguauuagcaauaucgagaccgugauagaguuccagcagaaaaacaauaggcuccuggaaauuacacgggaguuuucugucaacgccggggugacuaccccaguguccacauauaugcuuaccaauucagaacuguugagccucaucaacgacaugccgauuacgaacgaucaaaagaaacugaugaguaauaacguccagaucguucgccagcagucuuacuccaucaugugcauuauaaaggaggaaguguuagcguauguagugcaacugccccucuacggagucaucgacacuccuuguuggaaacuucauacaagcccacugugcaccacuaauacaaaggagggcucgaacauuuguuugacccgaacggaucguggcugguacugcgacaaugcagggucuguguccuucuuuccccaggccgaaaccuguaagguucagucaaacagaguguucugcgauacaaugaauaguagaacucugccuagcgaggucaaccucugcaauguggacaucuuuaacccaaaauaugauuguaagauaaugaccuccaaaacagacguaucuagcucaguuauuaccagucugggagcuaucguguccugcuacgguaagacuaaauguacagccagcaauaagaacaggggcaucauuaagaccuucucuaaugggugcgauuaugucucaaacaaaggaguggacacugucagugugggcaauacgcuuuacuguguuaacaagcaagaggguaaaagccuguaugugaagggggaacccaucauuaacuuuuacgacccuuugguauucccauccgaugaguuugacgcaucuauaucgcaggucaaugagaaaaucaaccagagccucgcuuucauucggaaguccgaugaacuguuacacaaugugaacgccggaaagucaacaaccaauaucaugaucacuaccauuauaaucguuauuaucgugauucugcuaagucucaucgcggucggccugcuuuuguauugcaaagcccgcucuacaccggugacccugagcaaggaccagcucuccggcauaaacaauaucgcauucucaaacugaggacuaguguccaccugucccuccugggcugcuggauugucucguuuuccugccaaauaaacaggaucagcgcuuuacagaucuaaaaaaaaaaaaaaaaaaaaaaaaaaaaaaaaaaaaaaaaaaaaaaaaaaaaaaaaaaaaaaaaugcaucccccccccccccccccccccccccccccccaaaggcucuuuucagagccaccagaauu

SEQ ID NO: 4641 - RNA, 2057 nt, Artificial Sequence
  mRNA product Design b-1 comprising derived and/or modified sequence from HRSV(A2)__F_DSCav1_mut4 (opt4)
gggagacggagacggccugcaggaccugcucucucagcccucagccgaggccuacgccgagccgagugcgcagccgacgaccgggaggagccgcagccuucaacucugagguacugugauccgcgcugcccgccgggccgccccaguccgcugcugcggcaccuccuucccucgcgcccucuucgcucgccagcgccuucccugugagccugcgucaccgcggccgccaagcuuaccauggagcugcugauccugaaggccaacgccaucaccaccauccugaccgccgugaccuucugcuucgccagcggccagaacaucaccgaggaguucuaccagagcaccugcagcgccgugagcaagggcuaccugagcgcccugagaaccggcugguacaccagcgugaucaccaucgagcugagcaacaucaaggagaacaagugcaacggcaccgacgccaaggugaagcugaucaagcaggagcuggacaaguacaagaacgccgugaccgagcugcagcugcugaugcagagcacccccgccaccggcagcggcagcgccaucugcagcggcguggccgugugcaaggugcugcaccuggagggcgaggugaacaagaucaagagcgcccugcugagcaccaacaaggccguggugagccugagcaacggcgugagcgugcugaccuucaaggugcuggaccugaagaacuacaucgacaagcagcugcugcccauccugaacaagcagagcugcagcaucagcaacaucgagaccgugaucgaguuccagcagaagaacaacagacugcuggagaucaccagagaguucagcgugaacgccggcgugaccacccccgugagcaccuacaugcugaccaacagcgagcugcugagccugaucaacgacaugcccaucaccaacgaccagaagaagcugaugagcaacaacgugcagaucgugagacagcagagcuacagcaucaugugcaucaucaaggaggaggugcuggccuacguggugcagcugccccuguacggcgugaucgacacccccugcuggaagcugcacaccagcccccugugcaccaccaacaccaaggagggcagcaacaucugccugaccagaaccgacagaggcugguacugcgacaacgccggcagcgugagcuucuucccccaggccgagaccugcaaggugcagagcaacagaguguucugcgacaccaugaacagcagaacccugcccagcgaggugaaccugugcaacguggacaucuucaaccccaaguacgacugcaagaucaugaccagcaagaccgacgugagcagcagcgugaucaccagccugggcgccaucgugagcugcuacggcaagaccaagugcaccgccagcaacaagaacagaggcaucaucaagaccuucagcaacggcugcgacuacgugagcaacaagggcguggacaccgugagcgugggcaacacccuguacugcgugaacaagcaggagggcaagagccuguacgugaagggcgagcccaucaucaacuucuacgacccccugguguuccccagcgacgaguucgacgccagcaucagccaggugaacgagaagaucaaccagagccuggccuucaucagaaagagcgacgagcugcugcacaacgugaacgccggcaagagcaccaccaacaucaugaucaccaccaucaucaucgugaucaucgugauccugcugagccugaucgccgugggccugcugcuguacugcaaggccagaagcacccccgugacccugagcaaggaccagcugagcggcaucaacaacaucgccuucagcaacugaggacuaguguccaccugucccuccugggcugcuggauugucucguuuuccugccaaauaaacaggaucagcgcuuuacagaucuaaaaaaaaaaaaaaaaaaaaaaaaaaaaaaaaaaaaaaaaaaaaaaaaaaaaaaaaaaaaaaaaugcaucccccccccccccccccccccccccccccccaaaggcucuuuucagagccaccagaauu

SEQ ID NO: 4642 - RNA, 2057 nt, Artificial Sequence
  mRNA product Design b-1 comprising derived and/or modified sequence from HRSV(A2)__F_DSCav1_mut4 (opt5)
gggagacggagacggccugcaggaccugcucucucagcccucagccgaggccuacgccgagccgagugcgcagccgacgaccgggaggagccgcagccuucaacucugagguacugugauccgcgcugcccgccgggccgccccaguccgcugcugcggcaccuccuucccucgcgcccucuucgcucgccagcgccuucccugugagccugcgucaccgcggccgccaagcuuaccauggagcugcucauccugaaggccaacgcuauuaccacaauccuuacggccgugaccuucugcuuugcgagcggccagaauauuacagaagaguucuaccaauccaccuguucugcugucagcaaaggguaucuguccgcccucagaacaggaugguacaccucuguuaucacaauugaacugagcaacaucaaggagaauaaaugcaacggcaccgacgccaaggugaaacuuaucaagcaggaacuggauaaguauaaaaaugcugugacggagcuccagcugcugaugcaguccacccccgccacagggucuggaagcgcuauuuguuccggcgucgccgugugcaagguucuccaccuggagggggaagugaacaaaaucaagagcgcgcuucugucuaccaauaaagccgucgugucccucagcaacggaguuucugugcugacauuuaagguccuugaccugaagaauuacauugauaaacaacuccugccuauccugaacaagcaguccuguagcauuucuaauaucgagaccgugauugaguuccagcagaaaaacaaucggcuccuggaaaucacgcgcgaguuuuccgugaacgcuggcgucacaaccccgguuagcacauauaugcuuaccaauuccgaacugcucucucugaucaacgacaugcccauuaccaacgaucaaaagaaacuuaugagcaauaacgugcagaucgugagacagcaguccuacagcauuaugugcaucauuaaggaggaaguccuggccuaugugguucaacucccucuguacggcgugaucgacacacccuguuggaaacugcauacgucuccucucugcaccacaaauaccaaggagggguccaacaucugucugacacggaccgaucgcggaugguacugcgacaaugcuggcagcgucucuuucuuuccccaggccgaaacguguaaggugcagagcaacagaguuuucugcgauacaaugaacuccagaacccugccuucugaggugaaucucugcaaugucgacauuuuuaacccgaaauaugauuguaagaucaugaccagcaaaacagacguguccagcucugucauuaccucccugggggcgaucgugagcugcuacggaaagacaaaauguacggccucuaauaagaaccggggcauuaucaagaccuucuccaaugggugcgauuauguuagcaacaaaggaguggacacagucuccgugggcaauacccuuuacuguguuaacaagcaagagggcaaaucucuguaugugaagggggaacccaucauuaacuuuuacgacccucucgucuuccccagcgaugaguuugacgcuuccaucucucaggugaaugagaaaauuaaccagagccuggccuucauccgcaaguccgaugaacugcuccacaaugugaacgcuggaaagagcacaaccaauauuaugaucacgaccauuaucaucguuauuaucgucauucugcuuucucugaucgccgugggccuccugcuguauugcaaagccagauccacaccugugacccuuagcaaggaccagcucucugggauuaacaauaucgcuuucuccaacugaggacuaguguccaccugucccuccugggcugcuggauugucucguuuuccugccaaauaaacaggaucagcgcuuuacagaucuaaaaaaaaaaaaaaaaaaaaaaaaaaaaaaaaaaaaaaaaaaaaaaaaaaaaaaaaaaaaaaaaugcaucccccccccccccccccccccccccccccccaaaggcucuuuucagagccaccagaauu

SEQ ID NO: 4643 - RNA, 2057 nt, Artificial Sequence
  mRNA product Design b-1 comprising derived and/or modified sequence from HRSV(A2)__F_DSCav1_mut4 (opt6)
gggagacggagacggccugcaggaccugcucucucagcccucagccgaggccuacgccgagccgagugcgcagccgacgaccgggaggagccgcagccuucaacucugagguacugugauccgcgcugcccgccgggccgccccaguccgcugcugcggcaccuccuucccucgcgcccucuucgcucgccagcgccuucccugugagccugcgucaccgcggccgccaagcuuaccauggaacuucuaauacucaaagccaacgcaauaacaacaauauuaacagccguaacauuuugcuucgcaucaggucaaaacauaacagaagaguucuaccaauccacaugcucagcaguaucaaaaggauauuuaagugcucuaagaacaggaugguacacauccguaauaacaaucgaacuaucaaacauaaaagaaaauaaauguaauggaacagacgccaaaguaaaauuaaucaaacaagaacuagacaaauacaaaaacgcaguuacugaauuacaauuauuaaugcaaucaacaccggccacaggaucuggaucagcaauaugcucaggaguagcagucugcaaaguauuacaccuagaaggggaaguuaauaaaaucaaaucagcauuacuauccaccaacaaagcgguaguuucacucuccaacggcguaucugucuuaacauucaaaguauuagaccuaaaaaacuacauugacaaacaacuacuaccaauccuaaacaaacaaucauguuccauaagcaauauagaaacaguaauagaauuucaacaaaaaaacaacagacuauuagaaauaacaagagaauuuuccgucaaugcaggaguuacuaccccugucuccaccuauaugcuaaccaauuccgaacucuuaucauuaauaaacgacaugccuaucacaaaugaccaaaaaaaauuaaugagcaacaacguacaaauaguacgacaacaaucauacucaaucaugugcauaauaaaagaagaaguccuagcauacguuguacaacuaccacuauacggagucauagauaccccaugcuggaaacuccauacaagcccacuaugcacuacaaacacaaaagaaggcucuaauauaugucuaacaagaacagaccgaggaugguacugcgauaaugccggcucagucucauucuuuccgcaagccgaaacuuguaaaguacaaaguaacagaguauuuugugacaccaugaacucaagaacccucccaagcgaagucaaucuaugcaacguugauauauucaaucccaaauacgacugcaaaaucaugaccucaaaaacagacgucagcucauccguuauaacaucacuaggagccaucguaucuugcuauggaaaaacaaaaugcacagcaagcaauaaaaacagaggcauaauaaaaacauucucaaauggaugcgacuacguaucaaacaaaggagucgacacaguuuccguaggaaacacuuuauacugcguaaacaaacaagaaggaaaaucauuauacgucaaaggugaaccaauaauaaacuucuacgauccacuuguauucccaucagacgaauuugacgcaucaauuucacaaguaaacgaaaaaauaaaccaaucacucgcauucauaagaaaaucagaugaacuacuacauaacguaaacgcaggaaaauccacaacaaacaucaugauaacaaccaucauaaucguaauaaucguaauacuauuaucccuaauugcaguaggauuacucuuauauugcaaagcaagaucaacaccaguaacccucaguaaagaccaacuauccggaauaaauaacaucgcauucucaaacuaaggacuaguguccaccugucccuccugggcugcuggauugucucguuuuccugccaaauaaacaggaucagcgcuuuacagaucuaaaaaaaaaaaaaaaaaaaaaaaaaaaaaaaaaaaaaaaaaaaaaaaaaaaaaaaaaaaaaaaaugcaucccccccccccccccccccccccccccccccaaaggcucuuuucagagccaccagaauu

SEQ ID NO: 4644 - RNA, 2057 nt, Artificial Sequence
  mRNA product Design b-1 comprising derived and/or modified sequence from HRSV(A2)__F_DSCav1_mut4 (opt11)
gggagacggagacggccugcaggaccugcucucucagcccucagccgaggccuacgccgagccgagugcgcagccgacgaccgggaggagccgcagccuucaacucugagguacugugauccgcgcugcccgccgggccgccccaguccgcugcugcggcaccuccuucccucgcgcccucuucgcucgccagcgccuucccugugagccugcgucaccgcggccgccaagcuuaccauggaacugcucauccucaaagccaacgccaucaccaccauucuuaccgccgucacauucugcuucgccucaggccaaaacaucaccgaagaauuuuaccaauccacuuguucagccgucucaaaaggauaccuaucagcccuccguaccggcugguacaccucggucauaacaauagaacucuccaacauaaaagaaaacaaaugcaacggcaccgacgccaaggucaaacugauaaaacaagaacuugauaaauacaaaaacgccgucacugaacuccaacuccucaugcaauccacucccgcuacuggcucuggcuccgccaucugcucuggcgucgccgucuguaaaguacuccaccucgaaggggaagucaacaaaaucaaaucagcccuccuuagcaccaacaaggccgucgucucccucucaaacggagucagcguccucaccuucaagguccucgaccucaagaacuacaucgacaaacaacuccugcccauccuaaauaaacaauccugcucuaucuccaauaucgaaaccguuauagaguuccaacagaaaaacaaccgacuccucgaaaucacccgcgaguucuccgucaacgcaggcgucaccaccccugugucaaccuacaugcucaccaacagcgaacuacucucacucaucaaugacaugcccaucaccaacgaccaaaagaaacucauguccaacaacguccaaaucguacgucaacaauccuacagcaucaugugcaucauaaaagaagaaguccucgccuacgucguccaacuuccccucuacggcgucauagacacccccugcuggaaacugcauaccucaccccuaugcaccaccaacacuaaagaaggcuccaacaucugccucacccgcacggaccgcggcugguacugcgacaacgccggcuccgucuccuucuucccccaagccgaaacuuguaaaguccaauccaacagagucuucugcgacaccaugaacucuagaacgcugccauccgagguaaaccuaugcaacgucgacaucuucaaucccaaauacgacugcaagaucaugaccucaaaaaccgacguauccuccucaguaaucaccagucucggagcuaucgucuccugcuacggcaaaaccaaaugcacggccucuaacaaaaaccgcggcaucaucaaaaccuucucaaacggaugcgacuacgucagcaacaaaggcguagauaccgucucugucggcaacacacuguacugcguaaacaagcaagaaggaaaaucccucuacguaaaaggcgaacccaucaucaacuucuacgacccccucguuuuccccucagaugaauuugacgccucgauaucacaagucaacgaaaagauaaaucagucccucgccuucauccgaaaauccgacgaacuccuccacaacguuaacgcaggaaaguccaccacaaacaucaugauaacuacaaucauaauagucauuaucgucauacuccucucccuaaucgccguaggccugcuacucuacugcaaagcccgcucaacccccgucacucucucaaaagaccaacucuccggcaucaauaacaucgccuucucaaacuaaggacuaguguccaccugucccuccugggcugcuggauugucucguuuuccugccaaauaaacaggaucagcgcuuuacagaucuaaaaaaaaaaaaaaaaaaaaaaaaaaaaaaaaaaaaaaaaaaaaaaaaaaaaaaaaaaaaaaaaugcaucccccccccccccccccccccccccccccccaaaggcucuuuucagagccaccagaauu

SEQ ID NO: 4645 - RNA, 1877 nt, Artificial Sequence
  mRNA product Design b-2 comprising derived and/or modified sequence from HRSV(A2)__F_DSCav1_mut4 (opt1)
gggagagccucugcuggaguccggggaguggcguuggcugcuagagcgaagcuuaccauggagcugcucauccugaaggccaacgccaucaccaccauccugacggcggugaccuucugcuucgccagcggccagaacaucaccgaggaguucuaccaguccacgugcagcgccgucuccaagggguaccucagcgcccugcggaccggcugguacaccuccgugaucaccaucgagcugagcaacaucaaggagaacaagugcaacgggaccgacgccaaggugaagcucaucaagcaggagcuggacaaguacaagaacgcggucacggagcugcagcuccugaugcaguccaccccggcaaccggcuccggcuccgccaucugcagcggcgucgccgugugcaaggugcugcaccucgagggggaggucaacaagaucaagagcgcccugcuguccaccaacaaggccguggugagccucuccaacggcgucagcgugcugaccuucaaggugcuggaccucaagaacuacaucgacaagcagcugcugcccauccugaacaagcagagcugcuccaucagcaacaucgagacggugaucgaguuccagcagaagaacaaccggcuccuggagaucacccgcgaguucagcgugaacgccggggucaccacccccguguccacguacaugcugaccaacagcgagcuccugucccugaucaacgacaugccgaucaccaacgaccagaagaagcucaugagcaacaacgugcagaucguccggcagcaguccuacagcaucaugugcaucaucaaggaggaggugcuggcguacgugguccagcugccccucuacggcgugaucgacacccccugcuggaagcugcacacgagcccccugugcaccaccaacaccaaggagggguccaacaucugccucacgcgcaccgaccggggcugguacugcgacaacgccggcagcgucuccuucuucccgcaggccgagaccugcaaggugcagagcaaccgcguguucugcgacaccaugaacucccggacgcugcccagcgagguaaaccucugcaacgucgacaucuucaaccccaaguacgacugcaagaucaugaccuccaagaccgacgugagcuccagcgugaucaccucccugggggccaucgucagcugcuacggcaagacgaagugcaccgccagcaacaagaaccgggggaucaucaagaccuucuccaacggcugcgacuacgugagcaacaagggcguggacaccguguccgucgggaacacccuguacugcgugaacaagcaggagggcaagagccucuacgugaagggggagcccaucaucaacuucuacgacccgcuggucuuccccuccgacgaguucgacgcgagcaucucccaggugaacgagaagaucaaccagagccuggccuucauccgcaaguccgacgagcugcuccacaacgugaacgccggcaagagcacgaccaacaucaugaucaccaccaucaucaucgucaucaucgugauccugcugucccucaucgccguggggcugcugcucuacugcaaggcccggagcacgcccgucacccuguccaaggaccagcugagcggcaucaacaacaucgcguucuccaacugaggacuaguguccaccugucccuccugggcugcuggauugucucguuuuccugccaaauaaacaggaucagcgcuuuacagaucuaaaaaaaaaaaaaaaaaaaaaaaaaaaaaaaaaaaaaaaaaaaaaaaaaaaaaaaaaaaaaaaaugcaucccccccccccccccccccccccccccccccaaaggcucuuuucagagccaccagaauu

SEQ ID NO: 4646 - RNA, 1877 nt, Artificial Sequence
  mRNA product Design b-2 comprising derived and/or modified sequence from HRSV(A2)__F_DSCav1_mut4 (opt1)
gggagagccucugcuggaguccggggaguggcguuggcugcuagagcgaagcuuaccauggagcugcucauccugaaggccaacgccaucaccaccauccugacggcggugaccuucugcuucgccagcggccagaacaucaccgaggaguucuaccaguccacgugcagcgccgucuccaagggguaccucagcgcccugcgcaccggcugguacaccuccgugaucaccaucgagcugagcaacaucaaggagaacaagugcaacgggaccgacgccaaggugaagcucaucaagcaggagcuggacaaguacaagaacgcggucacggagcugcagcuccugaugcaguccacccccgccaccggcagcggguccgccaucugcagcggcguggccgugugcaagguccugcaccucgagggcgaggugaacaagaucaaguccgcgcugcugagcaccaacaaggccguggucucccucagcaacgggguguccgugcugacguucaagguccuggaccucaagaacuacaucgacaagcagcugcugccgauccucaacaagcagagcugcuccaucagcaacaucgagaccgugaucgaguuccagcagaagaacaaccggcugcuggagaucacccgcgaguucuccgugaacgccggcgucaccacgcccgugagcaccuacaugcucaccaacagcgagcugcugucccucaucaacgacaugcccaucaccaacgaccagaagaagcugaugagcaacaacgugcagaucguccggcagcaguccuacagcaucaugugcaucaucaaggaggaggugcuggccuacgugguccagcucccccuguacggggugaucgacacgccgugcuggaagcugcacaccagcccccucugcaccaccaacacgaaggagggcuccaacaucugccugacccgcaccgaccgggggugguacugcgacaacgccggcuccgugagcuucuucccccaggcggagaccugcaagguccaguccaaccgcguguucugcgacacgaugaacagccggacccuccccuccgaggucaaccugugcaacguggacaucuucaacccgaaguacgacugcaagaucaugaccagcaagaccgacguguccagcuccgucaucacgagccugggcgccaucguguccugcuacgggaagaccaagugcaccgccagcaacaagaaccggggcaucaucaagaccuucuccaacgggugcgacuacgugagcaacaagggcgucgacacggugagcgugggcaacacccucuacugcgucaacaagcaggaggggaagucccuguacgugaagggcgagcccaucaucaacuucuacgacccccugguguuccccagcgacgaguucgacgccuccaucagccaggucaacgagaagaucaaccagucccucgccuucauccgcaagagcgacgagcugcugcacaacgugaacgcggggaaguccaccaccaacaucaugaucaccacgaucaucaucgugaucaucgucauccuccugagccugaucgccgugggccuccugcuguacugcaaggcccgguccaccccggugacccugagcaaggaccagcucuccgggaucaacaacaucgccuucagcaacugaggacuaguguccaccugucccuccugggcugcuggauugucucguuuuccugccaaauaaacaggaucagcgcuuuacagaucuaaaaaaaaaaaaaaaaaaaaaaaaaaaaaaaaaaaaaaaaaaaaaaaaaaaaaaaaaaaaaaaaugcaucccccccccccccccccccccccccccccccaaaggcucuuuucagagccaccagaauu

SEQ ID NO: 4647 - RNA, 1877 nt, Artificial Sequence
  mRNA product Design b-2 comprising derived and/or modified sequence from HRSV(A2)__F_DSCav1_mut4 (opt2)
gggagagccucugcuggaguccggggaguggcguuggcugcuagagcgaagcuuaccauggagcuccucauccucaaggccaacgccaucaccaccauccucaccgccgucaccuucugcuucgccuccggccagaacaucaccgaggaguucuaccaguccaccugcuccgccgucuccaagggcuaccucuccgcccuccgcaccggcugguacaccuccgucaucaccaucgagcucuccaacaucaaggagaacaagugcaacggcaccgacgccaaggucaagcucaucaagcaggagcucgacaaguacaagaacgccgucaccgagcuccagcuccucaugcaguccacccccgccaccggcuccggcuccgccaucugcuccggcgucgccgucugcaagguccuccaccucgagggcgaggucaacaagaucaaguccgcccuccucuccaccaacaaggccgucgucucccucuccaacggcgucuccguccucaccuucaagguccucgaccucaagaacuacaucgacaagcagcuccuccccauccucaacaagcaguccugcuccaucuccaacaucgagaccgucaucgaguuccagcagaagaacaaccgccuccucgagaucacccgcgaguucuccgucaacgccggcgucaccacccccgucuccaccuacaugcucaccaacuccgagcuccucucccucaucaacgacaugcccaucaccaacgaccagaagaagcucauguccaacaacguccagaucguccgccagcaguccuacuccaucaugugcaucaucaaggaggagguccucgccuacgucguccagcucccccucuacggcgucaucgacacccccugcuggaagcuccacaccuccccccucugcaccaccaacaccaaggagggcuccaacaucugccucacccgcaccgaccgcggcugguacugcgacaacgccggcuccgucuccuucuucccccaggccgagaccugcaagguccaguccaaccgcgucuucugcgacaccaugaacucccgcacccuccccuccgaggucaaccucugcaacgucgacaucuucaaccccaaguacgacugcaagaucaugaccuccaagaccgacgucuccuccuccgucaucaccucccucggcgccaucgucuccugcuacggcaagaccaagugcaccgccuccaacaagaaccgcggcaucaucaagaccuucuccaacggcugcgacuacgucuccaacaagggcgucgacaccgucuccgucggcaacacccucuacugcgucaacaagcaggagggcaagucccucuacgucaagggcgagcccaucaucaacuucuacgacccccucgucuuccccuccgacgaguucgacgccuccaucucccaggucaacgagaagaucaaccagucccucgccuucauccgcaaguccgacgagcuccuccacaacgucaacgccggcaaguccaccaccaacaucaugaucaccaccaucaucaucgucaucaucgucauccuccucucccucaucgccgucggccuccuccucuacugcaaggcccgcuccacccccgucacccucuccaaggaccagcucuccggcaucaacaacaucgccuucuccaacugaggacuaguguccaccugucccuccugggcugcuggauugucucguuuuccugccaaauaaacaggaucagcgcuuuacagaucuaaaaaaaaaaaaaaaaaaaaaaaaaaaaaaaaaaaaaaaaaaaaaaaaaaaaaaaaaaaaaaaaugcaucccccccccccccccccccccccccccccccaaaggcucuuuucagagccaccagaauu

SEQ ID NO: 4648 - RNA, 1877 nt, Artificial Sequence
  mRNA product Design b-2 comprising derived and/or modified sequence from HRSV(A2)__F_DSCav1_mut4 (opt3)
gggagagccucugcuggaguccggggaguggcguuggcugcuagagcgaagcuuaccauggagcugcucauccuuaaggccaacgcuauuaccacaauacugacugcagugacguucugcuuugccagcggccagaauaucaccgaagaguucuaccaauccacauguucugcggucucaaaaggguauuugagugcuuuaagaacuggaugguacaccagcguuauuacaaucgaacuguccaacauuaaggagaauaaaugcaacgguaccgacgccaaggugaaacuaaucaagcaggaacucgauaaguauaaaaaugcaguaacugagcugcagcuucugaugcagucuacacccgccaccggcucggggucagcuauauguagcggaguggcagucugcaagguguugcaccucgagggcgaaguuaacaaaaucaagagugcccugcuguccacgaauaaagcuguggucucucucagcaacgguguguccguauuaacuuuuaagguucuggaccuuaagaauuacauugauaaacaauugcugccuauccuaaacaagcagucauguaguauuagcaauaucgagaccgugauagaguuccagcagaaaaacaauaggcuccuggaaauuacacgggaguuuucugucaacgccggggugacuaccccaguguccacauauaugcuuaccaauucagaacuguugagccucaucaacgacaugccgauuacgaacgaucaaaagaaacugaugaguaauaacguccagaucguucgccagcagucuuacuccaucaugugcauuauaaaggaggaaguguuagcguauguagugcaacugccccucuacggagucaucgacacuccuuguuggaaacuucauacaagcccacugugcaccacuaauacaaaggagggcucgaacauuuguuugacccgaacggaucguggcugguacugcgacaaugcagggucuguguccuucuuuccccaggccgaaaccuguaagguucagucaaacagaguguucugcgauacaaugaauaguagaacucugccuagcgaggucaaccucugcaauguggacaucuuuaacccaaaauaugauuguaagauaaugaccuccaaaacagacguaucuagcucaguuauuaccagucugggagcuaucguguccugcuacgguaagacuaaauguacagccagcaauaagaacaggggcaucauuaagaccuucucuaaugggugcgauuaugucucaaacaaaggaguggacacugucagugugggcaauacgcuuuacuguguuaacaagcaagaggguaaaagccuguaugugaagggggaacccaucauuaacuuuuacgacccuuugguauucccauccgaugaguuugacgcaucuauaucgcaggucaaugagaaaaucaaccagagccucgcuuucauucggaaguccgaugaacuguuacacaaugugaacgccggaaagucaacaaccaauaucaugaucacuaccauuauaaucguuauuaucgugauucugcuaagucucaucgcggucggccugcuuuuguauugcaaagcccgcucuacaccggugacccugagcaaggaccagcucuccggcauaaacaauaucgcauucucaaacugaggacuaguguccaccugucccuccugggcugcuggauugucucguuuuccugccaaauaaacaggaucagcgcuuuacagaucuaaaaaaaaaaaaaaaaaaaaaaaaaaaaaaaaaaaaaaaaaaaaaaaaaaaaaaaaaaaaaaaaugcaucccccccccccccccccccccccccccccccaaaggcucuuuucagagccaccagaauu

SEQ ID NO: 4649 - RNA, 1877 nt, Artificial Sequence
  mRNA product Design b-2 comprising derived and/or modified sequence from HRSV(A2)__F_DSCav1_mut4 (opt4)
gggagagccucugcuggaguccggggaguggcguuggcugcuagagcgaagcuuaccauggagcugcugauccugaaggccaacgccaucaccaccauccugaccgccgugaccuucugcuucgccagcggccagaacaucaccgaggaguucuaccagagcaccugcagcgccgugagcaagggcuaccugagcgcccugagaaccggcugguacaccagcgugaucaccaucgagcugagcaacaucaaggagaacaagugcaacggcaccgacgccaaggugaagcugaucaagcaggagcuggacaaguacaagaacgccgugaccgagcugcagcugcugaugcagagcacccccgccaccggcagcggcagcgccaucugcagcggcguggccgugugcaaggugcugcaccuggagggcgaggugaacaagaucaagagcgcccugcugagcaccaacaaggccguggugagccugagcaacggcgugagcgugcugaccuucaaggugcuggaccugaagaacuacaucgacaagcagcugcugcccauccugaacaagcagagcugcagcaucagcaacaucgagaccgugaucgaguuccagcagaagaacaacagacugcuggagaucaccagagaguucagcgugaacgccggcgugaccacccccgugagcaccuacaugcugaccaacagcgagcugcugagccugaucaacgacaugcccaucaccaacgaccagaagaagcugaugagcaacaacgugcagaucgugagacagcagagcuacagcaucaugugcaucaucaaggaggaggugcuggccuacguggugcagcugccccuguacggcgugaucgacacccccugcuggaagcugcacaccagcccccugugcaccaccaacaccaaggagggcagcaacaucugccugaccagaaccgacagaggcugguacugcgacaacgccggcagcgugagcuucuucccccaggccgagaccugcaaggugcagagcaacagaguguucugcgacaccaugaacagcagaacccugcccagcgaggugaaccugugcaacguggacaucuucaaccccaaguacgacugcaagaucaugaccagcaagaccgacgugagcagcagcgugaucaccagccugggcgccaucgugagcugcuacggcaagaccaagugcaccgccagcaacaagaacagaggcaucaucaagaccuucagcaacggcugcgacuacgugagcaacaagggcguggacaccgugagcgugggcaacacccuguacugcgugaacaagcaggagggcaagagccuguacgugaagggcgagcccaucaucaacuucuacgacccccugguguuccccagcgacgaguucgacgccagcaucagccaggugaacgagaagaucaaccagagccuggccuucaucagaaagagcgacgagcugcugcacaacgugaacgccggcaagagcaccaccaacaucaugaucaccaccaucaucaucgugaucaucgugauccugcugagccugaucgccgugggccugcugcuguacugcaaggccagaagcacccccgugacccugagcaaggaccagcugagcggcaucaacaacaucgccuucagcaacugaggacuaguguccaccugucccuccugggcugcuggauugucucguuuuccugccaaauaaacaggaucagcgcuuuacagaucuaaaaaaaaaaaaaaaaaaaaaaaaaaaaaaaaaaaaaaaaaaaaaaaaaaaaaaaaaaaaaaaaugcaucccccccccccccccccccccccccccccccaaaggcucuuuucagagccaccagaauu

SEQ ID NO: 4650 - RNA, 1877 nt, Artificial Sequence
  mRNA product Design b-2 comprising derived and/or modified sequence from HRSV(A2)__F_DSCav1_mut4 (opt5)
gggagagccucugcuggaguccggggaguggcguuggcugcuagagcgaagcuuaccauggagcugcucauccugaaggccaacgcuauuaccacaauccuuacggccgugaccuucugcuuugcgagcggccagaauauuacagaagaguucuaccaauccaccuguucugcugucagcaaaggguaucuguccgcccucagaacaggaugguacaccucuguuaucacaauugaacugagcaacaucaaggagaauaaaugcaacggcaccgacgccaaggugaaacuuaucaagcaggaacuggauaaguauaaaaaugcugugacggagcuccagcugcugaugcaguccacccccgccacagggucuggaagcgcuauuuguuccggcgucgccgugugcaagguucuccaccuggagggggaagugaacaaaaucaagagcgcgcuucugucuaccaauaaagccgucgugucccucagcaacggaguuucugugcugacauuuaagguccuugaccugaagaauuacauugauaaacaacuccugccuauccugaacaagcaguccuguagcauuucuaauaucgagaccgugauugaguuccagcagaaaaacaaucggcuccuggaaaucacgcgcgaguuuuccgugaacgcuggcgucacaaccccgguuagcacauauaugcuuaccaauuccgaacugcucucucugaucaacgacaugcccauuaccaacgaucaaaagaaacuuaugagcaauaacgugcagaucgugagacagcaguccuacagcauuaugugcaucauuaaggaggaaguccuggccuaugugguucaacucccucuguacggcgugaucgacacacccuguuggaaacugcauacgucuccucucugcaccacaaauaccaaggagggguccaacaucugucugacacggaccgaucgcggaugguacugcgacaaugcuggcagcgucucuuucuuuccccaggccgaaacguguaaggugcagagcaacagaguuuucugcgauacaaugaacuccagaacccugccuucugaggugaaucucugcaaugucgacauuuuuaacccgaaauaugauuguaagaucaugaccagcaaaacagacguguccagcucugucauuaccucccugggggcgaucgugagcugcuacggaaagacaaaauguacggccucuaauaagaaccggggcauuaucaagaccuucuccaaugggugcgauuauguuagcaacaaaggaguggacacagucuccgugggcaauacccuuuacuguguuaacaagcaagagggcaaaucucuguaugugaagggggaacccaucauuaacuuuuacgacccucucgucuuccccagcgaugaguuugacgcuuccaucucucaggugaaugagaaaauuaaccagagccuggccuucauccgcaaguccgaugaacugcuccacaaugugaacgcuggaaagagcacaaccaauauuaugaucacgaccauuaucaucguuauuaucgucauucugcuuucucugaucgccgugggccuccugcuguauugcaaagccagauccacaccugugacccuuagcaaggaccagcucucugggauuaacaauaucgcuuucuccaacugaggacuaguguccaccugucccuccugggcugcuggauugucucguuuuccugccaaauaaacaggaucagcgcuuuacagaucuaaaaaaaaaaaaaaaaaaaaaaaaaaaaaaaaaaaaaaaaaaaaaaaaaaaaaaaaaaaaaaaaugcaucccccccccccccccccccccccccccccccaaaggcucuuuucagagccaccagaauu

SEQ ID NO: 4651 - RNA, 1877 nt, Artificial Sequence
  mRNA product Design b-2 comprising derived and/or modified sequence from HRSV(A2)__F_DSCav1_mut4 (opt6)
gggagagccucugcuggaguccggggaguggcguuggcugcuagagcgaagcuuaccauggaacuucuaauacucaaagccaacgcaauaacaacaauauuaacagccguaacauuuugcuucgcaucaggucaaaacauaacagaagaguucuaccaauccacaugcucagcaguaucaaaaggauauuuaagugcucuaagaacaggaugguacacauccguaauaacaaucgaacuaucaaacauaaaagaaaauaaauguaauggaacagacgccaaaguaaaauuaaucaaacaagaacuagacaaauacaaaaacgcaguuacugaauuacaauuauuaaugcaaucaacaccggccacaggaucuggaucagcaauaugcucaggaguagcagucugcaaaguauuacaccuagaaggggaaguuaauaaaaucaaaucagcauuacuauccaccaacaaagcgguaguuucacucuccaacggcguaucugucuuaacauucaaaguauuagaccuaaaaaacuacauugacaaacaacuacuaccaauccuaaacaaacaaucauguuccauaagcaauauagaaacaguaauagaauuucaacaaaaaaacaacagacuauuagaaauaacaagagaauuuuccgucaaugcaggaguuacuaccccugucuccaccuauaugcuaaccaauuccgaacucuuaucauuaauaaacgacaugccuaucacaaaugaccaaaaaaaauuaaugagcaacaacguacaaauaguacgacaacaaucauacucaaucaugugcauaauaaaagaagaaguccuagcauacguuguacaacuaccacuauacggagucauagauaccccaugcuggaaacuccauacaagcccacuaugcacuacaaacacaaaagaaggcucuaauauaugucuaacaagaacagaccgaggaugguacugcgauaaugccggcucagucucauucuuuccgcaagccgaaacuuguaaaguacaaaguaacagaguauuuugugacaccaugaacucaagaacccucccaagcgaagucaaucuaugcaacguugauauauucaaucccaaauacgacugcaaaaucaugaccucaaaaacagacgucagcucauccguuauaacaucacuaggagccaucguaucuugcuauggaaaaacaaaaugcacagcaagcaauaaaaacagaggcauaauaaaaacauucucaaauggaugcgacuacguaucaaacaaaggagucgacacaguuuccguaggaaacacuuuauacugcguaaacaaacaagaaggaaaaucauuauacgucaaaggugaaccaauaauaaacuucuacgauccacuuguauucccaucagacgaauuugacgcaucaauuucacaaguaaacgaaaaaauaaaccaaucacucgcauucauaagaaaaucagaugaacuacuacauaacguaaacgcaggaaaauccacaacaaacaucaugauaacaaccaucauaaucguaauaaucguaauacuauuaucccuaauugcaguaggauuacucuuauauugcaaagcaagaucaacaccaguaacccucaguaaagaccaacuauccggaauaaauaacaucgcauucucaaacuaaggacuaguguccaccugucccuccugggcugcuggauugucucguuuuccugccaaauaaacaggaucagcgcuuuacagaucuaaaaaaaaaaaaaaaaaaaaaaaaaaaaaaaaaaaaaaaaaaaaaaaaaaaaaaaaaaaaaaaaugcaucccccccccccccccccccccccccccccccaaaggcucuuuucagagccaccagaauu

SEQ ID NO: 4652 - RNA, 1877 nt, Artificial Sequence
  mRNA product Design b-2 comprising derived and/or modified sequence from HRSV(A2)__F_DSCav1_mut4 (opt11)
gggagagccucugcuggaguccggggaguggcguuggcugcuagagcgaagcuuaccauggaacugcucauccucaaagccaacgccaucaccaccauucuuaccgccgucacauucugcuucgccucaggccaaaacaucaccgaagaauuuuaccaauccacuuguucagccgucucaaaaggauaccuaucagcccuccguaccggcugguacaccucggucauaacaauagaacucuccaacauaaaagaaaacaaaugcaacggcaccgacgccaaggucaaacugauaaaacaagaacuugauaaauacaaaaacgccgucacugaacuccaacuccucaugcaauccacucccgcuacuggcucuggcuccgccaucugcucuggcgucgccgucuguaaaguacuccaccucgaaggggaagucaacaaaaucaaaucagcccuccuuagcaccaacaaggccgucgucucccucucaaacggagucagcguccucaccuucaagguccucgaccucaagaacuacaucgacaaacaacuccugcccauccuaaauaaacaauccugcucuaucuccaauaucgaaaccguuauagaguuccaacagaaaaacaaccgacuccucgaaaucacccgcgaguucuccgucaacgcaggcgucaccaccccugugucaaccuacaugcucaccaacagcgaacuacucucacucaucaaugacaugcccaucaccaacgaccaaaagaaacucauguccaacaacguccaaaucguacgucaacaauccuacagcaucaugugcaucauaaaagaagaaguccucgccuacgucguccaacuuccccucuacggcgucauagacacccccugcuggaaacugcauaccucaccccuaugcaccaccaacacuaaagaaggcuccaacaucugccucacccgcacggaccgcggcugguacugcgacaacgccggcuccgucuccuucuucccccaagccgaaacuuguaaaguccaauccaacagagucuucugcgacaccaugaacucuagaacgcugccauccgagguaaaccuaugcaacgucgacaucuucaaucccaaauacgacugcaagaucaugaccucaaaaaccgacguauccuccucaguaaucaccagucucggagcuaucgucuccugcuacggcaaaaccaaaugcacggccucuaacaaaaaccgcggcaucaucaaaaccuucucaaacggaugcgacuacgucagcaacaaaggcguagauaccgucucugucggcaacacacuguacugcguaaacaagcaagaaggaaaaucccucuacguaaaaggcgaacccaucaucaacuucuacgacccccucguuuuccccucagaugaauuugacgccucgauaucacaagucaacgaaaagauaaaucagucccucgccuucauccgaaaauccgacgaacuccuccacaacguuaacgcaggaaaguccaccacaaacaucaugauaacuacaaucauaauagucauuaucgucauacuccucucccuaaucgccguaggccugcuacucuacugcaaagcccgcucaacccccgucacucucucaaaagaccaacucuccggcaucaauaacaucgccuucucaaacuaaggacuaguguccaccugucccuccugggcugcuggauugucucguuuuccugccaaauaaacaggaucagcgcuuuacagaucuaaaaaaaaaaaaaaaaaaaaaaaaaaaaaaaaaaaaaaaaaaaaaaaaaaaaaaaaaaaaaaaaugcaucccccccccccccccccccccccccccccccaaaggcucuuuucagagccaccagaauu

SEQ ID NO: 4653 - RNA, 1897 nt, Artificial Sequence
  mRNA product Design b-3 comprising derived and/or modified sequence from HRSV(A2)__F_DSCav1_mut4 (opt1)
gggagagucccgcagucggcguccagcggcucugcuuguucgugugugugucguugcaggccuuauucaagcuuaccauggagcugcucauccugaaggccaacgccaucaccaccauccugacggcggugaccuucugcuucgccagcggccagaacaucaccgaggaguucuaccaguccacgugcagcgccgucuccaagggguaccucagcgcccugcggaccggcugguacaccuccgugaucaccaucgagcugagcaacaucaaggagaacaagugcaacgggaccgacgccaaggugaagcucaucaagcaggagcuggacaaguacaagaacgcggucacggagcugcagcuccugaugcaguccaccccggcaaccggcuccggcuccgccaucugcagcggcgucgccgugugcaaggugcugcaccucgagggggaggucaacaagaucaagagcgcccugcuguccaccaacaaggccguggugagccucuccaacggcgucagcgugcugaccuucaaggugcuggaccucaagaacuacaucgacaagcagcugcugcccauccugaacaagcagagcugcuccaucagcaacaucgagacggugaucgaguuccagcagaagaacaaccggcuccuggagaucacccgcgaguucagcgugaacgccggggucaccacccccguguccacguacaugcugaccaacagcgagcuccugucccugaucaacgacaugccgaucaccaacgaccagaagaagcucaugagcaacaacgugcagaucguccggcagcaguccuacagcaucaugugcaucaucaaggaggaggugcuggcguacgugguccagcugccccucuacggcgugaucgacacccccugcuggaagcugcacacgagcccccugugcaccaccaacaccaaggagggguccaacaucugccucacgcgcaccgaccggggcugguacugcgacaacgccggcagcgucuccuucuucccgcaggccgagaccugcaaggugcagagcaaccgcguguucugcgacaccaugaacucccggacgcugcccagcgagguaaaccucugcaacgucgacaucuucaaccccaaguacgacugcaagaucaugaccuccaagaccgacgugagcuccagcgugaucaccucccugggggccaucgucagcugcuacggcaagacgaagugcaccgccagcaacaagaaccgggggaucaucaagaccuucuccaacggcugcgacuacgugagcaacaagggcguggacaccguguccgucgggaacacccuguacugcgugaacaagcaggagggcaagagccucuacgugaagggggagcccaucaucaacuucuacgacccgcuggucuuccccuccgacgaguucgacgcgagcaucucccaggugaacgagaagaucaaccagagccuggccuucauccgcaaguccgacgagcugcuccacaacgugaacgccggcaagagcacgaccaacaucaugaucaccaccaucaucaucgucaucaucgugauccugcugucccucaucgccguggggcugcugcucuacugcaaggcccggagcacgcccgucacccuguccaaggaccagcugagcggcaucaacaacaucgcguucuccaacugaggacuaguguccaccugucccuccugggcugcuggauugucucguuuuccugccaaauaaacaggaucagcgcuuuacagaucuaaaaaaaaaaaaaaaaaaaaaaaaaaaaaaaaaaaaaaaaaaaaaaaaaaaaaaaaaaaaaaaaugcaucccccccccccccccccccccccccccccccaaaggcucuuuucagagccaccagaauu

SEQ ID NO: 4654 - RNA, 1897 nt, Artificial Sequence
  mRNA product Design b-3 comprising derived and/or modified sequence from HRSV(A2)__F_DSCav1_mut4 (opt1)
gggagagucccgcagucggcguccagcggcucugcuuguucgugugugugucguugcaggccuuauucaagcuuaccauggagcugcucauccugaaggccaacgccaucaccaccauccugacggcggugaccuucugcuucgccagcggccagaacaucaccgaggaguucuaccaguccacgugcagcgccgucuccaagggguaccucagcgcccugcgcaccggcugguacaccuccgugaucaccaucgagcugagcaacaucaaggagaacaagugcaacgggaccgacgccaaggugaagcucaucaagcaggagcuggacaaguacaagaacgcggucacggagcugcagcuccugaugcaguccacccccgccaccggcagcggguccgccaucugcagcggcguggccgugugcaagguccugcaccucgagggcgaggugaacaagaucaaguccgcgcugcugagcaccaacaaggccguggucucccucagcaacgggguguccgugcugacguucaagguccuggaccucaagaacuacaucgacaagcagcugcugccgauccucaacaagcagagcugcuccaucagcaacaucgagaccgugaucgaguuccagcagaagaacaaccggcugcuggagaucacccgcgaguucuccgugaacgccggcgucaccacgcccgugagcaccuacaugcucaccaacagcgagcugcugucccucaucaacgacaugcccaucaccaacgaccagaagaagcugaugagcaacaacgugcagaucguccggcagcaguccuacagcaucaugugcaucaucaaggaggaggugcuggccuacgugguccagcucccccuguacggggugaucgacacgccgugcuggaagcugcacaccagcccccucugcaccaccaacacgaaggagggcuccaacaucugccugacccgcaccgaccgggggugguacugcgacaacgccggcuccgugagcuucuucccccaggcggagaccugcaagguccaguccaaccgcguguucugcgacacgaugaacagccggacccuccccuccgaggucaaccugugcaacguggacaucuucaacccgaaguacgacugcaagaucaugaccagcaagaccgacguguccagcuccgucaucacgagccugggcgccaucguguccugcuacgggaagaccaagugcaccgccagcaacaagaaccggggcaucaucaagaccuucuccaacgggugcgacuacgugagcaacaagggcgucgacacggugagcgugggcaacacccucuacugcgucaacaagcaggaggggaagucccuguacgugaagggcgagcccaucaucaacuucuacgacccccugguguuccccagcgacgaguucgacgccuccaucagccaggucaacgagaagaucaaccagucccucgccuucauccgcaagagcgacgagcugcugcacaacgugaacgcggggaaguccaccaccaacaucaugaucaccacgaucaucaucgugaucaucgucauccuccugagccugaucgccgugggccuccugcuguacugcaaggcccgguccaccccggugacccugagcaaggaccagcucuccgggaucaacaacaucgccuucagcaacugaggacuaguguccaccugucccuccugggcugcuggauugucucguuuuccugccaaauaaacaggaucagcgcuuuacagaucuaaaaaaaaaaaaaaaaaaaaaaaaaaaaaaaaaaaaaaaaaaaaaaaaaaaaaaaaaaaaaaaaugcaucccccccccccccccccccccccccccccccaaaggcucuuuucagagccaccagaauu

SEQ ID NO: 4655 - RNA, 1897 nt, Artificial Sequence
  mRNA product Design b-3 comprising derived and/or modified sequence from HRSV(A2)__F_DSCav1_mut4 (opt2)
gggagagucccgcagucggcguccagcggcucugcuuguucgugugugugucguugcaggccuuauucaagcuuaccauggagcuccucauccucaaggccaacgccaucaccaccauccucaccgccgucaccuucugcuucgccuccggccagaacaucaccgaggaguucuaccaguccaccugcuccgccgucuccaagggcuaccucuccgcccuccgcaccggcugguacaccuccgucaucaccaucgagcucuccaacaucaaggagaacaagugcaacggcaccgacgccaaggucaagcucaucaagcaggagcucgacaaguacaagaacgccgucaccgagcuccagcuccucaugcaguccacccccgccaccggcuccggcuccgccaucugcuccggcgucgccgucugcaagguccuccaccucgagggcgaggucaacaagaucaaguccgcccuccucuccaccaacaaggccgucgucucccucuccaacggcgucuccguccucaccuucaagguccucgaccucaagaacuacaucgacaagcagcuccuccccauccucaacaagcaguccugcuccaucuccaacaucgagaccgucaucgaguuccagcagaagaacaaccgccuccucgagaucacccgcgaguucuccgucaacgccggcgucaccacccccgucuccaccuacaugcucaccaacuccgagcuccucucccucaucaacgacaugcccaucaccaacgaccagaagaagcucauguccaacaacguccagaucguccgccagcaguccuacuccaucaugugcaucaucaaggaggagguccucgccuacgucguccagcucccccucuacggcgucaucgacacccccugcuggaagcuccacaccuccccccucugcaccaccaacaccaaggagggcuccaacaucugccucacccgcaccgaccgcggcugguacugcgacaacgccggcuccgucuccuucuucccccaggccgagaccugcaagguccaguccaaccgcgucuucugcgacaccaugaacucccgcacccuccccuccgaggucaaccucugcaacgucgacaucuucaaccccaaguacgacugcaagaucaugaccuccaagaccgacgucuccuccuccgucaucaccucccucggcgccaucgucuccugcuacggcaagaccaagugcaccgccuccaacaagaaccgcggcaucaucaagaccuucuccaacggcugcgacuacgucuccaacaagggcgucgacaccgucuccgucggcaacacccucuacugcgucaacaagcaggagggcaagucccucuacgucaagggcgagcccaucaucaacuucuacgacccccucgucuuccccuccgacgaguucgacgccuccaucucccaggucaacgagaagaucaaccagucccucgccuucauccgcaaguccgacgagcuccuccacaacgucaacgccggcaaguccaccaccaacaucaugaucaccaccaucaucaucgucaucaucgucauccuccucucccucaucgccgucggccuccuccucuacugcaaggcccgcuccacccccgucacccucuccaaggaccagcucuccggcaucaacaacaucgccuucuccaacugaggacuaguguccaccugucccuccugggcugcuggauugucucguuuuccugccaaauaaacaggaucagcgcuuuacagaucuaaaaaaaaaaaaaaaaaaaaaaaaaaaaaaaaaaaaaaaaaaaaaaaaaaaaaaaaaaaaaaaaugcaucccccccccccccccccccccccccccccccaaaggcucuuuucagagccaccagaauu

SEQ ID NO: 4656 - RNA, 1897 nt, Artificial Sequence
  mRNA product Design b-3 comprising derived and/or modified sequence from HRSV(A2)__F_DSCav1_mut4 (opt3)
gggagagucccgcagucggcguccagcggcucugcuuguucgugugugugucguugcaggccuuauucaagcuuaccauggagcugcucauccuuaaggccaacgcuauuaccacaauacugacugcagugacguucugcuuugccagcggccagaauaucaccgaagaguucuaccaauccacauguucugcggucucaaaaggguauuugagugcuuuaagaacuggaugguacaccagcguuauuacaaucgaacuguccaacauuaaggagaauaaaugcaacgguaccgacgccaaggugaaacuaaucaagcaggaacucgauaaguauaaaaaugcaguaacugagcugcagcuucugaugcagucuacacccgccaccggcucggggucagcuauauguagcggaguggcagucugcaagguguugcaccucgagggcgaaguuaacaaaaucaagagugcccugcuguccacgaauaaagcuguggucucucucagcaacgguguguccguauuaacuuuuaagguucuggaccuuaagaauuacauugauaaacaauugcugccuauccuaaacaagcagucauguaguauuagcaauaucgagaccgugauagaguuccagcagaaaaacaauaggcuccuggaaauuacacgggaguuuucugucaacgccggggugacuaccccaguguccacauauaugcuuaccaauucagaacuguugagccucaucaacgacaugccgauuacgaacgaucaaaagaaacugaugaguaauaacguccagaucguucgccagcagucuuacuccaucaugugcauuauaaaggaggaaguguuagcguauguagugcaacugccccucuacggagucaucgacacuccuuguuggaaacuucauacaagcccacugugcaccacuaauacaaaggagggcucgaacauuuguuugacccgaacggaucguggcugguacugcgacaaugcagggucuguguccuucuuuccccaggccgaaaccuguaagguucagucaaacagaguguucugcgauacaaugaauaguagaacucugccuagcgaggucaaccucugcaauguggacaucuuuaacccaaaauaugauuguaagauaaugaccuccaaaacagacguaucuagcucaguuauuaccagucugggagcuaucguguccugcuacgguaagacuaaauguacagccagcaauaagaacaggggcaucauuaagaccuucucuaaugggugcgauuaugucucaaacaaaggaguggacacugucagugugggcaauacgcuuuacuguguuaacaagcaagaggguaaaagccuguaugugaagggggaacccaucauuaacuuuuacgacccuuugguauucccauccgaugaguuugacgcaucuauaucgcaggucaaugagaaaaucaaccagagccucgcuuucauucggaaguccgaugaacuguuacacaaugugaacgccggaaagucaacaaccaauaucaugaucacuaccauuauaaucguuauuaucgugauucugcuaagucucaucgcggucggccugcuuuuguauugcaaagcccgcucuacaccggugacccugagcaaggaccagcucuccggcauaaacaauaucgcauucucaaacugaggacuaguguccaccugucccuccugggcugcuggauugucucguuuuccugccaaauaaacaggaucagcgcuuuacagaucuaaaaaaaaaaaaaaaaaaaaaaaaaaaaaaaaaaaaaaaaaaaaaaaaaaaaaaaaaaaaaaaaugcaucccccccccccccccccccccccccccccccaaaggcucuuuucagagccaccagaauu

SEQ ID NO: 4657 - RNA, 1897 nt, Artificial Sequence
  mRNA product Design b-3 comprising derived and/or modified sequence from HRSV(A2)__F_DSCav1_mut4 (opt4)
gggagagucccgcagucggcguccagcggcucugcuuguucgugugugugucguugcaggccuuauucaagcuuaccauggagcugcugauccugaaggccaacgccaucaccaccauccugaccgccgugaccuucugcuucgccagcggccagaacaucaccgaggaguucuaccagagcaccugcagcgccgugagcaagggcuaccugagcgcccugagaaccggcugguacaccagcgugaucaccaucgagcugagcaacaucaaggagaacaagugcaacggcaccgacgccaaggugaagcugaucaagcaggagcuggacaaguacaagaacgccgugaccgagcugcagcugcugaugcagagcacccccgccaccggcagcggcagcgccaucugcagcggcguggccgugugcaaggugcugcaccuggagggcgaggugaacaagaucaagagcgcccugcugagcaccaacaaggccguggugagccugagcaacggcgugagcgugcugaccuucaaggugcuggaccugaagaacuacaucgacaagcagcugcugcccauccugaacaagcagagcugcagcaucagcaacaucgagaccgugaucgaguuccagcagaagaacaacagacugcuggagaucaccagagaguucagcgugaacgccggcgugaccacccccgugagcaccuacaugcugaccaacagcgagcugcugagccugaucaacgacaugcccaucaccaacgaccagaagaagcugaugagcaacaacgugcagaucgugagacagcagagcuacagcaucaugugcaucaucaaggaggaggugcuggccuacguggugcagcugccccuguacggcgugaucgacacccccugcuggaagcugcacaccagcccccugugcaccaccaacaccaaggagggcagcaacaucugccugaccagaaccgacagaggcugguacugcgacaacgccggcagcgugagcuucuucccccaggccgagaccugcaaggugcagagcaacagaguguucugcgacaccaugaacagcagaacccugcccagcgaggugaaccugugcaacguggacaucuucaaccccaaguacgacugcaagaucaugaccagcaagaccgacgugagcagcagcgugaucaccagccugggcgccaucgugagcugcuacggcaagaccaagugcaccgccagcaacaagaacagaggcaucaucaagaccuucagcaacggcugcgacuacgugagcaacaagggcguggacaccgugagcgugggcaacacccuguacugcgugaacaagcaggagggcaagagccuguacgugaagggcgagcccaucaucaacuucuacgacccccugguguuccccagcgacgaguucgacgccagcaucagccaggugaacgagaagaucaaccagagccuggccuucaucagaaagagcgacgagcugcugcacaacgugaacgccggcaagagcaccaccaacaucaugaucaccaccaucaucaucgugaucaucgugauccugcugagccugaucgccgugggccugcugcuguacugcaaggccagaagcacccccgugacccugagcaaggaccagcugagcggcaucaacaacaucgccuucagcaacugaggacuaguguccaccugucccuccugggcugcuggauugucucguuuuccugccaaauaaacaggaucagcgcuuuacagaucuaaaaaaaaaaaaaaaaaaaaaaaaaaaaaaaaaaaaaaaaaaaaaaaaaaaaaaaaaaaaaaaaugcaucccccccccccccccccccccccccccccccaaaggcucuuuucagagccaccagaauu

SEQ ID NO: 4658 - RNA, 1897 nt, Artificial Sequence
  mRNA product Design b-3 comprising derived and/or modified sequence from HRSV(A2)__F_DSCav1_mut4 (opt5)
gggagagucccgcagucggcguccagcggcucugcuuguucgugugugugucguugcaggccuuauucaagcuuaccauggagcugcucauccugaaggccaacgcuauuaccacaauccuuacggccgugaccuucugcuuugcgagcggccagaauauuacagaagaguucuaccaauccaccuguucugcugucagcaaaggguaucuguccgcccucagaacaggaugguacaccucuguuaucacaauugaacugagcaacaucaaggagaauaaaugcaacggcaccgacgccaaggugaaacuuaucaagcaggaacuggauaaguauaaaaaugcugugacggagcuccagcugcugaugcaguccacccccgccacagggucuggaagcgcuauuuguuccggcgucgccgugugcaagguucuccaccuggagggggaagugaacaaaaucaagagcgcgcuucugucuaccaauaaagccgucgugucccucagcaacggaguuucugugcugacauuuaagguccuugaccugaagaauuacauugauaaacaacuccugccuauccugaacaagcaguccuguagcauuucuaauaucgagaccgugauugaguuccagcagaaaaacaaucggcuccuggaaaucacgcgcgaguuuuccgugaacgcuggcgucacaaccccgguuagcacauauaugcuuaccaauuccgaacugcucucucugaucaacgacaugcccauuaccaacgaucaaaagaaacuuaugagcaauaacgugcagaucgugagacagcaguccuacagcauuaugugcaucauuaaggaggaaguccuggccuaugugguucaacucccucuguacggcgugaucgacacacccuguuggaaacugcauacgucuccucucugcaccacaaauaccaaggagggguccaacaucugucugacacggaccgaucgcggaugguacugcgacaaugcuggcagcgucucuuucuuuccccaggccgaaacguguaaggugcagagcaacagaguuuucugcgauacaaugaacuccagaacccugccuucugaggugaaucucugcaaugucgacauuuuuaacccgaaauaugauuguaagaucaugaccagcaaaacagacguguccagcucugucauuaccucccugggggcgaucgugagcugcuacggaaagacaaaauguacggccucuaauaagaaccggggcauuaucaagaccuucuccaaugggugcgauuauguuagcaacaaaggaguggacacagucuccgugggcaauacccuuuacuguguuaacaagcaagagggcaaaucucuguaugugaagggggaacccaucauuaacuuuuacgacccucucgucuuccccagcgaugaguuugacgcuuccaucucucaggugaaugagaaaauuaaccagagccuggccuucauccgcaaguccgaugaacugcuccacaaugugaacgcuggaaagagcacaaccaauauuaugaucacgaccauuaucaucguuauuaucgucauucugcuuucucugaucgccgugggccuccugcuguauugcaaagccagauccacaccugugacccuuagcaaggaccagcucucugggauuaacaauaucgcuuucuccaacugaggacuaguguccaccugucccuccugggcugcuggauugucucguuuuccugccaaauaaacaggaucagcgcuuuacagaucuaaaaaaaaaaaaaaaaaaaaaaaaaaaaaaaaaaaaaaaaaaaaaaaaaaaaaaaaaaaaaaaaugcaucccccccccccccccccccccccccccccccaaaggcucuuuucagagccaccagaauu

SEQ ID NO: 4659 - RNA, 1897 nt, Artificial Sequence
  mRNA product Design b-3 comprising derived and/or modified sequence from HRSV(A2)__F_DSCav1_mut4 (opt6)
gggagagucccgcagucggcguccagcggcucugcuuguucgugugugugucguugcaggccuuauucaagcuuaccauggaacuucuaauacucaaagccaacgcaauaacaacaauauuaacagccguaacauuuugcuucgcaucaggucaaaacauaacagaagaguucuaccaauccacaugcucagcaguaucaaaaggauauuuaagugcucuaagaacaggaugguacacauccguaauaacaaucgaacuaucaaacauaaaagaaaauaaauguaauggaacagacgccaaaguaaaauuaaucaaacaagaacuagacaaauacaaaaacgcaguuacugaauuacaauuauuaaugcaaucaacaccggccacaggaucuggaucagcaauaugcucaggaguagcagucugcaaaguauuacaccuagaaggggaaguuaauaaaaucaaaucagcauuacuauccaccaacaaagcgguaguuucacucuccaacggcguaucugucuuaacauucaaaguauuagaccuaaaaaacuacauugacaaacaacuacuaccaauccuaaacaaacaaucauguuccauaagcaauauagaaacaguaauagaauuucaacaaaaaaacaacagacuauuagaaauaacaagagaauuuuccgucaaugcaggaguuacuaccccugucuccaccuauaugcuaaccaauuccgaacucuuaucauuaauaaacgacaugccuaucacaaaugaccaaaaaaaauuaaugagcaacaacguacaaauaguacgacaacaaucauacucaaucaugugcauaauaaaagaagaaguccuagcauacguuguacaacuaccacuauacggagucauagauaccccaugcuggaaacuccauacaagcccacuaugcacuacaaacacaaaagaaggcucuaauauaugucuaacaagaacagaccgaggaugguacugcgauaaugccggcucagucucauucuuuccgcaagccgaaacuuguaaaguacaaaguaacagaguauuuugugacaccaugaacucaagaacccucccaagcgaagucaaucuaugcaacguugauauauucaaucccaaauacgacugcaaaaucaugaccucaaaaacagacgucagcucauccguuauaacaucacuaggagccaucguaucuugcuauggaaaaacaaaaugcacagcaagcaauaaaaacagaggcauaauaaaaacauucucaaauggaugcgacuacguaucaaacaaaggagucgacacaguuuccguaggaaacacuuuauacugcguaaacaaacaagaaggaaaaucauuauacgucaaaggugaaccaauaauaaacuucuacgauccacuuguauucccaucagacgaauuugacgcaucaauuucacaaguaaacgaaaaaauaaaccaaucacucgcauucauaagaaaaucagaugaacuacuacauaacguaaacgcaggaaaauccacaacaaacaucaugauaacaaccaucauaaucguaauaaucguaauacuauuaucccuaauugcaguaggauuacucuuauauugcaaagcaagaucaacaccaguaacccucaguaaagaccaacuauccggaauaaauaacaucgcauucucaaacuaaggacuaguguccaccugucccuccugggcugcuggauugucucguuuuccugccaaauaaacaggaucagcgcuuuacagaucuaaaaaaaaaaaaaaaaaaaaaaaaaaaaaaaaaaaaaaaaaaaaaaaaaaaaaaaaaaaaaaaaugcaucccccccccccccccccccccccccccccccaaaggcucuuuucagagccaccagaauu

SEQ ID NO: 4660 - RNA, 1897 nt, Artificial Sequence
  mRNA product Design b-3 comprising derived and/or modified sequence from HRSV(A2)__F_DSCav1_mut4 (opt11)
gggagagucccgcagucggcguccagcggcucugcuuguucgugugugugucguugcaggccuuauucaagcuuaccauggaacugcucauccucaaagccaacgccaucaccaccauucuuaccgccgucacauucugcuucgccucaggccaaaacaucaccgaagaauuuuaccaauccacuuguucagccgucucaaaaggauaccuaucagcccuccguaccggcugguacaccucggucauaacaauagaacucuccaacauaaaagaaaacaaaugcaacggcaccgacgccaaggucaaacugauaaaacaagaacuugauaaauacaaaaacgccgucacugaacuccaacuccucaugcaauccacucccgcuacuggcucuggcuccgccaucugcucuggcgucgccgucuguaaaguacuccaccucgaaggggaagucaacaaaaucaaaucagcccuccuuagcaccaacaaggccgucgucucccucucaaacggagucagcguccucaccuucaagguccucgaccucaagaacuacaucgacaaacaacuccugcccauccuaaauaaacaauccugcucuaucuccaauaucgaaaccguuauagaguuccaacagaaaaacaaccgacuccucgaaaucacccgcgaguucuccgucaacgcaggcgucaccaccccugugucaaccuacaugcucaccaacagcgaacuacucucacucaucaaugacaugcccaucaccaacgaccaaaagaaacucauguccaacaacguccaaaucguacgucaacaauccuacagcaucaugugcaucauaaaagaagaaguccucgccuacgucguccaacuuccccucuacggcgucauagacacccccugcuggaaacugcauaccucaccccuaugcaccaccaacacuaaagaaggcuccaacaucugccucacccgcacggaccgcggcugguacugcgacaacgccggcuccgucuccuucuucccccaagccgaaacuuguaaaguccaauccaacagagucuucugcgacaccaugaacucuagaacgcugccauccgagguaaaccuaugcaacgucgacaucuucaaucccaaauacgacugcaagaucaugaccucaaaaaccgacguauccuccucaguaaucaccagucucggagcuaucgucuccugcuacggcaaaaccaaaugcacggccucuaacaaaaaccgcggcaucaucaaaaccuucucaaacggaugcgacuacgucagcaacaaaggcguagauaccgucucugucggcaacacacuguacugcguaaacaagcaagaaggaaaaucccucuacguaaaaggcgaacccaucaucaacuucuacgacccccucguuuuccccucagaugaauuugacgccucgauaucacaagucaacgaaaagauaaaucagucccucgccuucauccgaaaauccgacgaacuccuccacaacguuaacgcaggaaaguccaccacaaacaucaugauaacuacaaucauaauagucauuaucgucauacuccucucccuaaucgccguaggccugcuacucuacugcaaagcccgcucaacccccgucacucucucaaaagaccaacucuccggcaucaauaacaucgccuucucaaacuaaggacuaguguccaccugucccuccugggcugcuggauugucucguuuuccugccaaauaaacaggaucagcgcuuuacagaucuaaaaaaaaaaaaaaaaaaaaaaaaaaaaaaaaaaaaaaaaaaaaaaaaaaaaaaaaaaaaaaaaugcaucccccccccccccccccccccccccccccccaaaggcucuuuucagagccaccagaauu

SEQ ID NO: 4661 - RNA, 1948 nt, Artificial Sequence
  mRNA product Design b-4 comprising derived and/or modified sequence from HRSV(A2)__F_DSCav1_mut4 (opt1)
gggagagucccgcagucggcguccagcggcucugcuuguucgugugugugucguugcaggccuuauucaagcuuaccauggagcugcucauccugaaggccaacgccaucaccaccauccugacggcggugaccuucugcuucgccagcggccagaacaucaccgaggaguucuaccaguccacgugcagcgccgucuccaagggguaccucagcgcccugcggaccggcugguacaccuccgugaucaccaucgagcugagcaacaucaaggagaacaagugcaacgggaccgacgccaaggugaagcucaucaagcaggagcuggacaaguacaagaacgcggucacggagcugcagcuccugaugcaguccaccccggcaaccggcuccggcuccgccaucugcagcggcgucgccgugugcaaggugcugcaccucgagggggaggucaacaagaucaagagcgcccugcuguccaccaacaaggccguggugagccucuccaacggcgucagcgugcugaccuucaaggugcuggaccucaagaacuacaucgacaagcagcugcugcccauccugaacaagcagagcugcuccaucagcaacaucgagacggugaucgaguuccagcagaagaacaaccggcuccuggagaucacccgcgaguucagcgugaacgccggggucaccacccccguguccacguacaugcugaccaacagcgagcuccugucccugaucaacgacaugccgaucaccaacgaccagaagaagcucaugagcaacaacgugcagaucguccggcagcaguccuacagcaucaugugcaucaucaaggaggaggugcuggcguacgugguccagcugccccucuacggcgugaucgacacccccugcuggaagcugcacacgagcccccugugcaccaccaacaccaaggagggguccaacaucugccucacgcgcaccgaccggggcugguacugcgacaacgccggcagcgucuccuucuucccgcaggccgagaccugcaaggugcagagcaaccgcguguucugcgacaccaugaacucccggacgcugcccagcgagguaaaccucugcaacgucgacaucuucaaccccaaguacgacugcaagaucaugaccuccaagaccgacgugagcuccagcgugaucaccucccugggggccaucgucagcugcuacggcaagacgaagugcaccgccagcaacaagaaccgggggaucaucaagaccuucuccaacggcugcgacuacgugagcaacaagggcguggacaccguguccgucgggaacacccuguacugcgugaacaagcaggagggcaagagccucuacgugaagggggagcccaucaucaacuucuacgacccgcuggucuuccccuccgacgaguucgacgcgagcaucucccaggugaacgagaagaucaaccagagccuggccuucauccgcaaguccgacgagcugcuccacaacgugaacgccggcaagagcacgaccaacaucaugaucaccaccaucaucaucgucaucaucgugauccugcugucccucaucgccguggggcugcugcucuacugcaaggcccggagcacgcccgucacccuguccaaggaccagcugagcggcaucaacaacaucgcguucuccaacugaggacuaguaauaaggaaacuguaugaaugucugugggcaggaagugaagagauccuucuguaaagguuuuuggaauuaugucugcugaauaauaaacuuuuuugaaauaauaaaucugguagaaaaaugagaucuaaaaaaaaaaaaaaaaaaaaaaaaaaaaaaaaaaaaaaaaaaaaaaaaaaaaaaaaaaaaaaaaugcaucccccccccccccccccccccccccccccccaaaggcucuuuucagagccaccagaauu

SEQ ID NO: 4662 - RNA, 1948 nt, Artificial Sequence
  mRNA product Design b-4 comprising derived and/or modified sequence from HRSV(A2)__F_DSCav1_mut4 (opt1)
gggagagucccgcagucggcguccagcggcucugcuuguucgugugugugucguugcaggccuuauucaagcuuaccauggagcugcucauccugaaggccaacgccaucaccaccauccugacggcggugaccuucugcuucgccagcggccagaacaucaccgaggaguucuaccaguccacgugcagcgccgucuccaagggguaccucagcgcccugcgcaccggcugguacaccuccgugaucaccaucgagcugagcaacaucaaggagaacaagugcaacgggaccgacgccaaggugaagcucaucaagcaggagcuggacaaguacaagaacgcggucacggagcugcagcuccugaugcaguccacccccgccaccggcagcggguccgccaucugcagcggcguggccgugugcaagguccugcaccucgagggcgaggugaacaagaucaaguccgcgcugcugagcaccaacaaggccguggucucccucagcaacgggguguccgugcugacguucaagguccuggaccucaagaacuacaucgacaagcagcugcugccgauccucaacaagcagagcugcuccaucagcaacaucgagaccgugaucgaguuccagcagaagaacaaccggcugcuggagaucacccgcgaguucuccgugaacgccggcgucaccacgcccgugagcaccuacaugcucaccaacagcgagcugcugucccucaucaacgacaugcccaucaccaacgaccagaagaagcugaugagcaacaacgugcagaucguccggcagcaguccuacagcaucaugugcaucaucaaggaggaggugcuggccuacgugguccagcucccccuguacggggugaucgacacgccgugcuggaagcugcacaccagcccccucugcaccaccaacacgaaggagggcuccaacaucugccugacccgcaccgaccgggggugguacugcgacaacgccggcuccgugagcuucuucccccaggcggagaccugcaagguccaguccaaccgcguguucugcgacacgaugaacagccggacccuccccuccgaggucaaccugugcaacguggacaucuucaacccgaaguacgacugcaagaucaugaccagcaagaccgacguguccagcuccgucaucacgagccugggcgccaucguguccugcuacgggaagaccaagugcaccgccagcaacaagaaccggggcaucaucaagaccuucuccaacgggugcgacuacgugagcaacaagggcgucgacacggugagcgugggcaacacccucuacugcgucaacaagcaggaggggaagucccuguacgugaagggcgagcccaucaucaacuucuacgacccccugguguuccccagcgacgaguucgacgccuccaucagccaggucaacgagaagaucaaccagucccucgccuucauccgcaagagcgacgagcugcugcacaacgugaacgcggggaaguccaccaccaacaucaugaucaccacgaucaucaucgugaucaucgucauccuccugagccugaucgccgugggccuccugcuguacugcaaggcccgguccaccccggugacccugagcaaggaccagcucuccgggaucaacaacaucgccuucagcaacugaggacuaguaauaaggaaacuguaugaaugucugugggcaggaagugaagagauccuucuguaaagguuuuuggaauuaugucugcugaauaauaaacuuuuuugaaauaauaaaucugguagaaaaaugagaucuaaaaaaaaaaaaaaaaaaaaaaaaaaaaaaaaaaaaaaaaaaaaaaaaaaaaaaaaaaaaaaaaugcaucccccccccccccccccccccccccccccccaaaggcucuuuucagagccaccagaauu

SEQ ID NO: 4663 - RNA, 1948 nt, Artificial Sequence
  mRNA product Design b-4 comprising derived and/or modified sequence from HRSV(A2)__F_DSCav1_mut4 (opt2)
gggagagucccgcagucggcguccagcggcucugcuuguucgugugugugucguugcaggccuuauucaagcuuaccauggagcuccucauccucaaggccaacgccaucaccaccauccucaccgccgucaccuucugcuucgccuccggccagaacaucaccgaggaguucuaccaguccaccugcuccgccgucuccaagggcuaccucuccgcccuccgcaccggcugguacaccuccgucaucaccaucgagcucuccaacaucaaggagaacaagugcaacggcaccgacgccaaggucaagcucaucaagcaggagcucgacaaguacaagaacgccgucaccgagcuccagcuccucaugcaguccacccccgccaccggcuccggcuccgccaucugcuccggcgucgccgucugcaagguccuccaccucgagggcgaggucaacaagaucaaguccgcccuccucuccaccaacaaggccgucgucucccucuccaacggcgucuccguccucaccuucaagguccucgaccucaagaacuacaucgacaagcagcuccuccccauccucaacaagcaguccugcuccaucuccaacaucgagaccgucaucgaguuccagcagaagaacaaccgccuccucgagaucacccgcgaguucuccgucaacgccggcgucaccacccccgucuccaccuacaugcucaccaacuccgagcuccucucccucaucaacgacaugcccaucaccaacgaccagaagaagcucauguccaacaacguccagaucguccgccagcaguccuacuccaucaugugcaucaucaaggaggagguccucgccuacgucguccagcucccccucuacggcgucaucgacacccccugcuggaagcuccacaccuccccccucugcaccaccaacaccaaggagggcuccaacaucugccucacccgcaccgaccgcggcugguacugcgacaacgccggcuccgucuccuucuucccccaggccgagaccugcaagguccaguccaaccgcgucuucugcgacaccaugaacucccgcacccuccccuccgaggucaaccucugcaacgucgacaucuucaaccccaaguacgacugcaagaucaugaccuccaagaccgacgucuccuccuccgucaucaccucccucggcgccaucgucuccugcuacggcaagaccaagugcaccgccuccaacaagaaccgcggcaucaucaagaccuucuccaacggcugcgacuacgucuccaacaagggcgucgacaccgucuccgucggcaacacccucuacugcgucaacaagcaggagggcaagucccucuacgucaagggcgagcccaucaucaacuucuacgacccccucgucuuccccuccgacgaguucgacgccuccaucucccaggucaacgagaagaucaaccagucccucgccuucauccgcaaguccgacgagcuccuccacaacgucaacgccggcaaguccaccaccaacaucaugaucaccaccaucaucaucgucaucaucgucauccuccucucccucaucgccgucggccuccuccucuacugcaaggcccgcuccacccccgucacccucuccaaggaccagcucuccggcaucaacaacaucgccuucuccaacugaggacuaguaauaaggaaacuguaugaaugucugugggcaggaagugaagagauccuucuguaaagguuuuuggaauuaugucugcugaauaauaaacuuuuuugaaauaauaaaucugguagaaaaaugagaucuaaaaaaaaaaaaaaaaaaaaaaaaaaaaaaaaaaaaaaaaaaaaaaaaaaaaaaaaaaaaaaaaugcaucccccccccccccccccccccccccccccccaaaggcucuuuucagagccaccagaauu

SEQ ID NO: 4664 - RNA, 1948 nt, Artificial Sequence
  mRNA product Design b-4 comprising derived and/or modified sequence from HRSV(A2)__F_DSCav1_mut4 (opt3)
gggagagucccgcagucggcguccagcggcucugcuuguucgugugugugucguugcaggccuuauucaagcuuaccauggagcugcucauccuuaaggccaacgcuauuaccacaauacugacugcagugacguucugcuuugccagcggccagaauaucaccgaagaguucuaccaauccacauguucugcggucucaaaaggguauuugagugcuuuaagaacuggaugguacaccagcguuauuacaaucgaacuguccaacauuaaggagaauaaaugcaacgguaccgacgccaaggugaaacuaaucaagcaggaacucgauaaguauaaaaaugcaguaacugagcugcagcuucugaugcagucuacacccgccaccggcucggggucagcuauauguagcggaguggcagucugcaagguguugcaccucgagggcgaaguuaacaaaaucaagagugcccugcuguccacgaauaaagcuguggucucucucagcaacgguguguccguauuaacuuuuaagguucuggaccuuaagaauuacauugauaaacaauugcugccuauccuaaacaagcagucauguaguauuagcaauaucgagaccgugauagaguuccagcagaaaaacaauaggcuccuggaaauuacacgggaguuuucugucaacgccggggugacuaccccaguguccacauauaugcuuaccaauucagaacuguugagccucaucaacgacaugccgauuacgaacgaucaaaagaaacugaugaguaauaacguccagaucguucgccagcagucuuacuccaucaugugcauuauaaaggaggaaguguuagcguauguagugcaacugccccucuacggagucaucgacacuccuuguuggaaacuucauacaagcccacugugcaccacuaauacaaaggagggcucgaacauuuguuugacccgaacggaucguggcugguacugcgacaaugcagggucuguguccuucuuuccccaggccgaaaccuguaagguucagucaaacagaguguucugcgauacaaugaauaguagaacucugccuagcgaggucaaccucugcaauguggacaucuuuaacccaaaauaugauuguaagauaaugaccuccaaaacagacguaucuagcucaguuauuaccagucugggagcuaucguguccugcuacgguaagacuaaauguacagccagcaauaagaacaggggcaucauuaagaccuucucuaaugggugcgauuaugucucaaacaaaggaguggacacugucagugugggcaauacgcuuuacuguguuaacaagcaagaggguaaaagccuguaugugaagggggaacccaucauuaacuuuuacgacccuuugguauucccauccgaugaguuugacgcaucuauaucgcaggucaaugagaaaaucaaccagagccucgcuuucauucggaaguccgaugaacuguuacacaaugugaacgccggaaagucaacaaccaauaucaugaucacuaccauuauaaucguuauuaucgugauucugcuaagucucaucgcggucggccugcuuuuguauugcaaagcccgcucuacaccggugacccugagcaaggaccagcucuccggcauaaacaauaucgcauucucaaacugaggacuaguaauaaggaaacuguaugaaugucugugggcaggaagugaagagauccuucuguaaagguuuuuggaauuaugucugcugaauaauaaacuuuuuugaaauaauaaaucugguagaaaaaugagaucuaaaaaaaaaaaaaaaaaaaaaaaaaaaaaaaaaaaaaaaaaaaaaaaaaaaaaaaaaaaaaaaaugcaucccccccccccccccccccccccccccccccaaaggcucuuuucagagccaccagaauu

SEQ ID NO: 4665 - RNA, 1948 nt, Artificial Sequence
  mRNA product Design b-4 comprising derived and/or modified sequence from HRSV(A2)__F_DSCav1_mut4 (opt4)
gggagagucccgcagucggcguccagcggcucugcuuguucgugugugugucguugcaggccuuauucaagcuuaccauggagcugcugauccugaaggccaacgccaucaccaccauccugaccgccgugaccuucugcuucgccagcggccagaacaucaccgaggaguucuaccagagcaccugcagcgccgugagcaagggcuaccugagcgcccugagaaccggcugguacaccagcgugaucaccaucgagcugagcaacaucaaggagaacaagugcaacggcaccgacgccaaggugaagcugaucaagcaggagcuggacaaguacaagaacgccgugaccgagcugcagcugcugaugcagagcacccccgccaccggcagcggcagcgccaucugcagcggcguggccgugugcaaggugcugcaccuggagggcgaggugaacaagaucaagagcgcccugcugagcaccaacaaggccguggugagccugagcaacggcgugagcgugcugaccuucaaggugcuggaccugaagaacuacaucgacaagcagcugcugcccauccugaacaagcagagcugcagcaucagcaacaucgagaccgugaucgaguuccagcagaagaacaacagacugcuggagaucaccagagaguucagcgugaacgccggcgugaccacccccgugagcaccuacaugcugaccaacagcgagcugcugagccugaucaacgacaugcccaucaccaacgaccagaagaagcugaugagcaacaacgugcagaucgugagacagcagagcuacagcaucaugugcaucaucaaggaggaggugcuggccuacguggugcagcugccccuguacggcgugaucgacacccccugcuggaagcugcacaccagcccccugugcaccaccaacaccaaggagggcagcaacaucugccugaccagaaccgacagaggcugguacugcgacaacgccggcagcgugagcuucuucccccaggccgagaccugcaaggugcagagcaacagaguguucugcgacaccaugaacagcagaacccugcccagcgaggugaaccugugcaacguggacaucuucaaccccaaguacgacugcaagaucaugaccagcaagaccgacgugagcagcagcgugaucaccagccugggcgccaucgugagcugcuacggcaagaccaagugcaccgccagcaacaagaacagaggcaucaucaagaccuucagcaacggcugcgacuacgugagcaacaagggcguggacaccgugagcgugggcaacacccuguacugcgugaacaagcaggagggcaagagccuguacgugaagggcgagcccaucaucaacuucuacgacccccugguguuccccagcgacgaguucgacgccagcaucagccaggugaacgagaagaucaaccagagccuggccuucaucagaaagagcgacgagcugcugcacaacgugaacgccggcaagagcaccaccaacaucaugaucaccaccaucaucaucgugaucaucgugauccugcugagccugaucgccgugggccugcugcuguacugcaaggccagaagcacccccgugacccugagcaaggaccagcugagcggcaucaacaacaucgccuucagcaacugaggacuaguaauaaggaaacuguaugaaugucugugggcaggaagugaagagauccuucuguaaagguuuuuggaauuaugucugcugaauaauaaacuuuuuugaaauaauaaaucugguagaaaaaugagaucuaaaaaaaaaaaaaaaaaaaaaaaaaaaaaaaaaaaaaaaaaaaaaaaaaaaaaaaaaaaaaaaaugcaucccccccccccccccccccccccccccccccaaaggcucuuuucagagccaccagaauu

SEQ ID NO: 4666 - RNA, 1948 nt, Artificial Sequence
  mRNA product Design b-4 comprising derived and/or modified sequence from HRSV(A2)__F_DSCav1_mut4 (opt5)
gggagagucccgcagucggcguccagcggcucugcuuguucgugugugugucguugcaggccuuauucaagcuuaccauggagcugcucauccugaaggccaacgcuauuaccacaauccuuacggccgugaccuucugcuuugcgagcggccagaauauuacagaagaguucuaccaauccaccuguucugcugucagcaaaggguaucuguccgcccucagaacaggaugguacaccucuguuaucacaauugaacugagcaacaucaaggagaauaaaugcaacggcaccgacgccaaggugaaacuuaucaagcaggaacuggauaaguauaaaaaugcugugacggagcuccagcugcugaugcaguccacccccgccacagggucuggaagcgcuauuuguuccggcgucgccgugugcaagguucuccaccuggagggggaagugaacaaaaucaagagcgcgcuucugucuaccaauaaagccgucgugucccucagcaacggaguuucugugcugacauuuaagguccuugaccugaagaauuacauugauaaacaacuccugccuauccugaacaagcaguccuguagcauuucuaauaucgagaccgugauugaguuccagcagaaaaacaaucggcuccuggaaaucacgcgcgaguuuuccgugaacgcuggcgucacaaccccgguuagcacauauaugcuuaccaauuccgaacugcucucucugaucaacgacaugcccauuaccaacgaucaaaagaaacuuaugagcaauaacgugcagaucgugagacagcaguccuacagcauuaugugcaucauuaaggaggaaguccuggccuaugugguucaacucccucuguacggcgugaucgacacacccuguuggaaacugcauacgucuccucucugcaccacaaauaccaaggagggguccaacaucugucugacacggaccgaucgcggaugguacugcgacaaugcuggcagcgucucuuucuuuccccaggccgaaacguguaaggugcagagcaacagaguuuucugcgauacaaugaacuccagaacccugccuucugaggugaaucucugcaaugucgacauuuuuaacccgaaauaugauuguaagaucaugaccagcaaaacagacguguccagcucugucauuaccucccugggggcgaucgugagcugcuacggaaagacaaaauguacggccucuaauaagaaccggggcauuaucaagaccuucuccaaugggugcgauuauguuagcaacaaaggaguggacacagucuccgugggcaauacccuuuacuguguuaacaagcaagagggcaaaucucuguaugugaagggggaacccaucauuaacuuuuacgacccucucgucuuccccagcgaugaguuugacgcuuccaucucucaggugaaugagaaaauuaaccagagccuggccuucauccgcaaguccgaugaacugcuccacaaugugaacgcuggaaagagcacaaccaauauuaugaucacgaccauuaucaucguuauuaucgucauucugcuuucucugaucgccgugggccuccugcuguauugcaaagccagauccacaccugugacccuuagcaaggaccagcucucugggauuaacaauaucgcuuucuccaacugaggacuaguaauaaggaaacuguaugaaugucugugggcaggaagugaagagauccuucuguaaagguuuuuggaauuaugucugcugaauaauaaacuuuuuugaaauaauaaaucugguagaaaaaugagaucuaaaaaaaaaaaaaaaaaaaaaaaaaaaaaaaaaaaaaaaaaaaaaaaaaaaaaaaaaaaaaaaaugcaucccccccccccccccccccccccccccccccaaaggcucuuuucagagccaccagaauu

SEQ ID NO: 4667 - RNA, 1948 nt, Artificial Sequence
  mRNA product Design b-4 comprising derived and/or modified sequence from HRSV(A2)__F_DSCav1_mut4 (opt6)
gggagagucccgcagucggcguccagcggcucugcuuguucgugugugugucguugcaggccuuauucaagcuuaccauggaacuucuaauacucaaagccaacgcaauaacaacaauauuaacagccguaacauuuugcuucgcaucaggucaaaacauaacagaagaguucuaccaauccacaugcucagcaguaucaaaaggauauuuaagugcucuaagaacaggaugguacacauccguaauaacaaucgaacuaucaaacauaaaagaaaauaaauguaauggaacagacgccaaaguaaaauuaaucaaacaagaacuagacaaauacaaaaacgcaguuacugaauuacaauuauuaaugcaaucaacaccggccacaggaucuggaucagcaauaugcucaggaguagcagucugcaaaguauuacaccuagaaggggaaguuaauaaaaucaaaucagcauuacuauccaccaacaaagcgguaguuucacucuccaacggcguaucugucuuaacauucaaaguauuagaccuaaaaaacuacauugacaaacaacuacuaccaauccuaaacaaacaaucauguuccauaagcaauauagaaacaguaauagaauuucaacaaaaaaacaacagacuauuagaaauaacaagagaauuuuccgucaaugcaggaguuacuaccccugucuccaccuauaugcuaaccaauuccgaacucuuaucauuaauaaacgacaugccuaucacaaaugaccaaaaaaaauuaaugagcaacaacguacaaauaguacgacaacaaucauacucaaucaugugcauaauaaaagaagaaguccuagcauacguuguacaacuaccacuauacggagucauagauaccccaugcuggaaacuccauacaagcccacuaugcacuacaaacacaaaagaaggcucuaauauaugucuaacaagaacagaccgaggaugguacugcgauaaugccggcucagucucauucuuuccgcaagccgaaacuuguaaaguacaaaguaacagaguauuuugugacaccaugaacucaagaacccucccaagcgaagucaaucuaugcaacguugauauauucaaucccaaauacgacugcaaaaucaugaccucaaaaacagacgucagcucauccguuauaacaucacuaggagccaucguaucuugcuauggaaaaacaaaaugcacagcaagcaauaaaaacagaggcauaauaaaaacauucucaaauggaugcgacuacguaucaaacaaaggagucgacacaguuuccguaggaaacacuuuauacugcguaaacaaacaagaaggaaaaucauuauacgucaaaggugaaccaauaauaaacuucuacgauccacuuguauucccaucagacgaauuugacgcaucaauuucacaaguaaacgaaaaaauaaaccaaucacucgcauucauaagaaaaucagaugaacuacuacauaacguaaacgcaggaaaauccacaacaaacaucaugauaacaaccaucauaaucguaauaaucguaauacuauuaucccuaauugcaguaggauuacucuuauauugcaaagcaagaucaacaccaguaacccucaguaaagaccaacuauccggaauaaauaacaucgcauucucaaacuaaggacuaguaauaaggaaacuguaugaaugucugugggcaggaagugaagagauccuucuguaaagguuuuuggaauuaugucugcugaauaauaaacuuuuuugaaauaauaaaucugguagaaaaaugagaucuaaaaaaaaaaaaaaaaaaaaaaaaaaaaaaaaaaaaaaaaaaaaaaaaaaaaaaaaaaaaaaaaugcaucccccccccccccccccccccccccccccccaaaggcucuuuucagagccaccagaauu

SEQ ID NO: 4668 - RNA, 1948 nt, Artificial Sequence
  mRNA product Design b-4 comprising derived and/or modified sequence from HRSV(A2)__F_DSCav1_mut4 (opt11)
gggagagucccgcagucggcguccagcggcucugcuuguucgugugugugucguugcaggccuuauucaagcuuaccauggaacugcucauccucaaagccaacgccaucaccaccauucuuaccgccgucacauucugcuucgccucaggccaaaacaucaccgaagaauuuuaccaauccacuuguucagccgucucaaaaggauaccuaucagcccuccguaccggcugguacaccucggucauaacaauagaacucuccaacauaaaagaaaacaaaugcaacggcaccgacgccaaggucaaacugauaaaacaagaacuugauaaauacaaaaacgccgucacugaacuccaacuccucaugcaauccacucccgcuacuggcucuggcuccgccaucugcucuggcgucgccgucuguaaaguacuccaccucgaaggggaagucaacaaaaucaaaucagcccuccuuagcaccaacaaggccgucgucucccucucaaacggagucagcguccucaccuucaagguccucgaccucaagaacuacaucgacaaacaacuccugcccauccuaaauaaacaauccugcucuaucuccaauaucgaaaccguuauagaguuccaacagaaaaacaaccgacuccucgaaaucacccgcgaguucuccgucaacgcaggcgucaccaccccugugucaaccuacaugcucaccaacagcgaacuacucucacucaucaaugacaugcccaucaccaacgaccaaaagaaacucauguccaacaacguccaaaucguacgucaacaauccuacagcaucaugugcaucauaaaagaagaaguccucgccuacgucguccaacuuccccucuacggcgucauagacacccccugcuggaaacugcauaccucaccccuaugcaccaccaacacuaaagaaggcuccaacaucugccucacccgcacggaccgcggcugguacugcgacaacgccggcuccgucuccuucuucccccaagccgaaacuuguaaaguccaauccaacagagucuucugcgacaccaugaacucuagaacgcugccauccgagguaaaccuaugcaacgucgacaucuucaaucccaaauacgacugcaagaucaugaccucaaaaaccgacguauccuccucaguaaucaccagucucggagcuaucgucuccugcuacggcaaaaccaaaugcacggccucuaacaaaaaccgcggcaucaucaaaaccuucucaaacggaugcgacuacgucagcaacaaaggcguagauaccgucucugucggcaacacacuguacugcguaaacaagcaagaaggaaaaucccucuacguaaaaggcgaacccaucaucaacuucuacgacccccucguuuuccccucagaugaauuugacgccucgauaucacaagucaacgaaaagauaaaucagucccucgccuucauccgaaaauccgacgaacuccuccacaacguuaacgcaggaaaguccaccacaaacaucaugauaacuacaaucauaauagucauuaucgucauacuccucucccuaaucgccguaggccugcuacucuacugcaaagcccgcucaacccccgucacucucucaaaagaccaacucuccggcaucaauaacaucgccuucucaaacuaaggacuaguaauaaggaaacuguaugaaugucugugggcaggaagugaagagauccuucuguaaagguuuuuggaauuaugucugcugaauaauaaacuuuuuugaaauaauaaaucugguagaaaaaugagaucuaaaaaaaaaaaaaaaaaaaaaaaaaaaaaaaaaaaaaaaaaaaaaaaaaaaaaaaaaaaaaaaaugcaucccccccccccccccccccccccccccccccaaaggcucuuuucagagccaccagaauu

SEQ ID NO: 4669 - RNA, 2010 nt, Artificial Sequence
  mRNA product Design b-5 comprising derived and/or modified sequence from HRSV(A2)__F_DSCav1_mut4 (opt1)
gggagacuccugucgggcggaaguaggaggaguagaguuuaaaaacaguacucuuuuuccgguucgggacguaguugaagcaacgacaagccggauaaccgcucuugagacaggaagcuuaccauggagcugcucauccugaaggccaacgccaucaccaccauccugacggcggugaccuucugcuucgccagcggccagaacaucaccgaggaguucuaccaguccacgugcagcgccgucuccaagggguaccucagcgcccugcggaccggcugguacaccuccgugaucaccaucgagcugagcaacaucaaggagaacaagugcaacgggaccgacgccaaggugaagcucaucaagcaggagcuggacaaguacaagaacgcggucacggagcugcagcuccugaugcaguccaccccggcaaccggcuccggcuccgccaucugcagcggcgucgccgugugcaaggugcugcaccucgagggggaggucaacaagaucaagagcgcccugcuguccaccaacaaggccguggugagccucuccaacggcgucagcgugcugaccuucaaggugcuggaccucaagaacuacaucgacaagcagcugcugcccauccugaacaagcagagcugcuccaucagcaacaucgagacggugaucgaguuccagcagaagaacaaccggcuccuggagaucacccgcgaguucagcgugaacgccggggucaccacccccguguccacguacaugcugaccaacagcgagcuccugucccugaucaacgacaugccgaucaccaacgaccagaagaagcucaugagcaacaacgugcagaucguccggcagcaguccuacagcaucaugugcaucaucaaggaggaggugcuggcguacgugguccagcugccccucuacggcgugaucgacacccccugcuggaagcugcacacgagcccccugugcaccaccaacaccaaggagggguccaacaucugccucacgcgcaccgaccggggcugguacugcgacaacgccggcagcgucuccuucuucccgcaggccgagaccugcaaggugcagagcaaccgcguguucugcgacaccaugaacucccggacgcugcccagcgagguaaaccucugcaacgucgacaucuucaaccccaaguacgacugcaagaucaugaccuccaagaccgacgugagcuccagcgugaucaccucccugggggccaucgucagcugcuacggcaagacgaagugcaccgccagcaacaagaaccgggggaucaucaagaccuucuccaacggcugcgacuacgugagcaacaagggcguggacaccguguccgucgggaacacccuguacugcgugaacaagcaggagggcaagagccucuacgugaagggggagcccaucaucaacuucuacgacccgcuggucuuccccuccgacgaguucgacgcgagcaucucccaggugaacgagaagaucaaccagagccuggccuucauccgcaaguccgacgagcugcuccacaacgugaacgccggcaagagcacgaccaacaucaugaucaccaccaucaucaucgucaucaucgugauccugcugucccucaucgccguggggcugcugcucuacugcaaggcccggagcacgcccgucacccuguccaaggaccagcugagcggcaucaacaacaucgcguucuccaacugaggacuaguacuggcugcaucucccuuuccucuguccuccauccuucucccaggauggugaagggggaccugguacccagugauccccaccccaggauccuaaaucaugacuuaccugcuaauaaaaacucauuggaaaagugagaagaucuaaaaaaaaaaaaaaaaaaaaaaaaaaaaaaaaaaaaaaaaaaaaaaaaaaaaaaaaaaaaaaaaugcaucccccccccccccccccccccccccccccccaaaggcucuuuucagagccaccagaauu

SEQ ID NO: 4670 - RNA, 2010 nt, Artificial Sequence
  mRNA product Design b-5 comprising derived and/or modified sequence from HRSV(A2)__F_DSCav1_mut4 (opt1)
gggagacuccugucgggcggaaguaggaggaguagaguuuaaaaacaguacucuuuuuccgguucgggacguaguugaagcaacgacaagccggauaaccgcucuugagacaggaagcuuaccauggagcugcucauccugaaggccaacgccaucaccaccauccugacggcggugaccuucugcuucgccagcggccagaacaucaccgaggaguucuaccaguccacgugcagcgccgucuccaagggguaccucagcgcccugcgcaccggcugguacaccuccgugaucaccaucgagcugagcaacaucaaggagaacaagugcaacgggaccgacgccaaggugaagcucaucaagcaggagcuggacaaguacaagaacgcggucacggagcugcagcuccugaugcaguccacccccgccaccggcagcggguccgccaucugcagcggcguggccgugugcaagguccugcaccucgagggcgaggugaacaagaucaaguccgcgcugcugagcaccaacaaggccguggucucccucagcaacgggguguccgugcugacguucaagguccuggaccucaagaacuacaucgacaagcagcugcugccgauccucaacaagcagagcugcuccaucagcaacaucgagaccgugaucgaguuccagcagaagaacaaccggcugcuggagaucacccgcgaguucuccgugaacgccggcgucaccacgcccgugagcaccuacaugcucaccaacagcgagcugcugucccucaucaacgacaugcccaucaccaacgaccagaagaagcugaugagcaacaacgugcagaucguccggcagcaguccuacagcaucaugugcaucaucaaggaggaggugcuggccuacgugguccagcucccccuguacggggugaucgacacgccgugcuggaagcugcacaccagcccccucugcaccaccaacacgaaggagggcuccaacaucugccugacccgcaccgaccgggggugguacugcgacaacgccggcuccgugagcuucuucccccaggcggagaccugcaagguccaguccaaccgcguguucugcgacacgaugaacagccggacccuccccuccgaggucaaccugugcaacguggacaucuucaacccgaaguacgacugcaagaucaugaccagcaagaccgacguguccagcuccgucaucacgagccugggcgccaucguguccugcuacgggaagaccaagugcaccgccagcaacaagaaccggggcaucaucaagaccuucuccaacgggugcgacuacgugagcaacaagggcgucgacacggugagcgugggcaacacccucuacugcgucaacaagcaggaggggaagucccuguacgugaagggcgagcccaucaucaacuucuacgacccccugguguuccccagcgacgaguucgacgccuccaucagccaggucaacgagaagaucaaccagucccucgccuucauccgcaagagcgacgagcugcugcacaacgugaacgcggggaaguccaccaccaacaucaugaucaccacgaucaucaucgugaucaucgucauccuccugagccugaucgccgugggccuccugcuguacugcaaggcccgguccaccccggugacccugagcaaggaccagcucuccgggaucaacaacaucgccuucagcaacugaggacuaguacuggcugcaucucccuuuccucuguccuccauccuucucccaggauggugaagggggaccugguacccagugauccccaccccaggauccuaaaucaugacuuaccugcuaauaaaaacucauuggaaaagugagaagaucuaaaaaaaaaaaaaaaaaaaaaaaaaaaaaaaaaaaaaaaaaaaaaaaaaaaaaaaaaaaaaaaaugcaucccccccccccccccccccccccccccccccaaaggcucuuuucagagccaccagaauu

SEQ ID NO: 4671 - RNA, 2010 nt, Artificial Sequence
  mRNA product Design b-5 comprising derived and/or modified sequence from HRSV(A2)__F_DSCav1_mut4 (opt2)
gggagacuccugucgggcggaaguaggaggaguagaguuuaaaaacaguacucuuuuuccgguucgggacguaguugaagcaacgacaagccggauaaccgcucuugagacaggaagcuuaccauggagcuccucauccucaaggccaacgccaucaccaccauccucaccgccgucaccuucugcuucgccuccggccagaacaucaccgaggaguucuaccaguccaccugcuccgccgucuccaagggcuaccucuccgcccuccgcaccggcugguacaccuccgucaucaccaucgagcucuccaacaucaaggagaacaagugcaacggcaccgacgccaaggucaagcucaucaagcaggagcucgacaaguacaagaacgccgucaccgagcuccagcuccucaugcaguccacccccgccaccggcuccggcuccgccaucugcuccggcgucgccgucugcaagguccuccaccucgagggcgaggucaacaagaucaaguccgcccuccucuccaccaacaaggccgucgucucccucuccaacggcgucuccguccucaccuucaagguccucgaccucaagaacuacaucgacaagcagcuccuccccauccucaacaagcaguccugcuccaucuccaacaucgagaccgucaucgaguuccagcagaagaacaaccgccuccucgagaucacccgcgaguucuccgucaacgccggcgucaccacccccgucuccaccuacaugcucaccaacuccgagcuccucucccucaucaacgacaugcccaucaccaacgaccagaagaagcucauguccaacaacguccagaucguccgccagcaguccuacuccaucaugugcaucaucaaggaggagguccucgccuacgucguccagcucccccucuacggcgucaucgacacccccugcuggaagcuccacaccuccccccucugcaccaccaacaccaaggagggcuccaacaucugccucacccgcaccgaccgcggcugguacugcgacaacgccggcuccgucuccuucuucccccaggccgagaccugcaagguccaguccaaccgcgucuucugcgacaccaugaacucccgcacccuccccuccgaggucaaccucugcaacgucgacaucuucaaccccaaguacgacugcaagaucaugaccuccaagaccgacgucuccuccuccgucaucaccucccucggcgccaucgucuccugcuacggcaagaccaagugcaccgccuccaacaagaaccgcggcaucaucaagaccuucuccaacggcugcgacuacgucuccaacaagggcgucgacaccgucuccgucggcaacacccucuacugcgucaacaagcaggagggcaagucccucuacgucaagggcgagcccaucaucaacuucuacgacccccucgucuuccccuccgacgaguucgacgccuccaucucccaggucaacgagaagaucaaccagucccucgccuucauccgcaaguccgacgagcuccuccacaacgucaacgccggcaaguccaccaccaacaucaugaucaccaccaucaucaucgucaucaucgucauccuccucucccucaucgccgucggccuccuccucuacugcaaggcccgcuccacccccgucacccucuccaaggaccagcucuccggcaucaacaacaucgccuucuccaacugaggacuaguacuggcugcaucucccuuuccucuguccuccauccuucucccaggauggugaagggggaccugguacccagugauccccaccccaggauccuaaaucaugacuuaccugcuaauaaaaacucauuggaaaagugagaagaucuaaaaaaaaaaaaaaaaaaaaaaaaaaaaaaaaaaaaaaaaaaaaaaaaaaaaaaaaaaaaaaaaugcaucccccccccccccccccccccccccccccccaaaggcucuuuucagagccaccagaauu

SEQ ID NO: 4672 - RNA, 2010 nt, Artificial Sequence
  mRNA product Design b-5 comprising derived and/or modified sequence from HRSV(A2)__F_DSCav1_mut4 (opt3)
gggagacuccugucgggcggaaguaggaggaguagaguuuaaaaacaguacucuuuuuccgguucgggacguaguugaagcaacgacaagccggauaaccgcucuugagacaggaagcuuaccauggagcugcucauccuuaaggccaacgcuauuaccacaauacugacugcagugacguucugcuuugccagcggccagaauaucaccgaagaguucuaccaauccacauguucugcggucucaaaaggguauuugagugcuuuaagaacuggaugguacaccagcguuauuacaaucgaacuguccaacauuaaggagaauaaaugcaacgguaccgacgccaaggugaaacuaaucaagcaggaacucgauaaguauaaaaaugcaguaacugagcugcagcuucugaugcagucuacacccgccaccggcucggggucagcuauauguagcggaguggcagucugcaagguguugcaccucgagggcgaaguuaacaaaaucaagagugcccugcuguccacgaauaaagcuguggucucucucagcaacgguguguccguauuaacuuuuaagguucuggaccuuaagaauuacauugauaaacaauugcugccuauccuaaacaagcagucauguaguauuagcaauaucgagaccgugauagaguuccagcagaaaaacaauaggcuccuggaaauuacacgggaguuuucugucaacgccggggugacuaccccaguguccacauauaugcuuaccaauucagaacuguugagccucaucaacgacaugccgauuacgaacgaucaaaagaaacugaugaguaauaacguccagaucguucgccagcagucuuacuccaucaugugcauuauaaaggaggaaguguuagcguauguagugcaacugccccucuacggagucaucgacacuccuuguuggaaacuucauacaagcccacugugcaccacuaauacaaaggagggcucgaacauuuguuugacccgaacggaucguggcugguacugcgacaaugcagggucuguguccuucuuuccccaggccgaaaccuguaagguucagucaaacagaguguucugcgauacaaugaauaguagaacucugccuagcgaggucaaccucugcaauguggacaucuuuaacccaaaauaugauuguaagauaaugaccuccaaaacagacguaucuagcucaguuauuaccagucugggagcuaucguguccugcuacgguaagacuaaauguacagccagcaauaagaacaggggcaucauuaagaccuucucuaaugggugcgauuaugucucaaacaaaggaguggacacugucagugugggcaauacgcuuuacuguguuaacaagcaagaggguaaaagccuguaugugaagggggaacccaucauuaacuuuuacgacccuuugguauucccauccgaugaguuugacgcaucuauaucgcaggucaaugagaaaaucaaccagagccucgcuuucauucggaaguccgaugaacuguuacacaaugugaacgccggaaagucaacaaccaauaucaugaucacuaccauuauaaucguuauuaucgugauucugcuaagucucaucgcggucggccugcuuuuguauugcaaagcccgcucuacaccggugacccugagcaaggaccagcucuccggcauaaacaauaucgcauucucaaacugaggacuaguacuggcugcaucucccuuuccucuguccuccauccuucucccaggauggugaagggggaccugguacccagugauccccaccccaggauccuaaaucaugacuuaccugcuaauaaaaacucauuggaaaagugagaagaucuaaaaaaaaaaaaaaaaaaaaaaaaaaaaaaaaaaaaaaaaaaaaaaaaaaaaaaaaaaaaaaaaugcaucccccccccccccccccccccccccccccccaaaggcucuuuucagagccaccagaauu

SEQ ID NO: 4673 - RNA, 2010 nt, Artificial Sequence
  mRNA product Design b-5 comprising derived and/or modified sequence from HRSV(A2)__F_DSCav1_mut4 (opt4)
gggagacuccugucgggcggaaguaggaggaguagaguuuaaaaacaguacucuuuuuccgguucgggacguaguugaagcaacgacaagccggauaaccgcucuugagacaggaagcuuaccauggagcugcugauccugaaggccaacgccaucaccaccauccugaccgccgugaccuucugcuucgccagcggccagaacaucaccgaggaguucuaccagagcaccugcagcgccgugagcaagggcuaccugagcgcccugagaaccggcugguacaccagcgugaucaccaucgagcugagcaacaucaaggagaacaagugcaacggcaccgacgccaaggugaagcugaucaagcaggagcuggacaaguacaagaacgccgugaccgagcugcagcugcugaugcagagcacccccgccaccggcagcggcagcgccaucugcagcggcguggccgugugcaaggugcugcaccuggagggcgaggugaacaagaucaagagcgcccugcugagcaccaacaaggccguggugagccugagcaacggcgugagcgugcugaccuucaaggugcuggaccugaagaacuacaucgacaagcagcugcugcccauccugaacaagcagagcugcagcaucagcaacaucgagaccgugaucgaguuccagcagaagaacaacagacugcuggagaucaccagagaguucagcgugaacgccggcgugaccacccccgugagcaccuacaugcugaccaacagcgagcugcugagccugaucaacgacaugcccaucaccaacgaccagaagaagcugaugagcaacaacgugcagaucgugagacagcagagcuacagcaucaugugcaucaucaaggaggaggugcuggccuacguggugcagcugccccuguacggcgugaucgacacccccugcuggaagcugcacaccagcccccugugcaccaccaacaccaaggagggcagcaacaucugccugaccagaaccgacagaggcugguacugcgacaacgccggcagcgugagcuucuucccccaggccgagaccugcaaggugcagagcaacagaguguucugcgacaccaugaacagcagaacccugcccagcgaggugaaccugugcaacguggacaucuucaaccccaaguacgacugcaagaucaugaccagcaagaccgacgugagcagcagcgugaucaccagccugggcgccaucgugagcugcuacggcaagaccaagugcaccgccagcaacaagaacagaggcaucaucaagaccuucagcaacggcugcgacuacgugagcaacaagggcguggacaccgugagcgugggcaacacccuguacugcgugaacaagcaggagggcaagagccuguacgugaagggcgagcccaucaucaacuucuacgacccccugguguuccccagcgacgaguucgacgccagcaucagccaggugaacgagaagaucaaccagagccuggccuucaucagaaagagcgacgagcugcugcacaacgugaacgccggcaagagcaccaccaacaucaugaucaccaccaucaucaucgugaucaucgugauccugcugagccugaucgccgugggccugcugcuguacugcaaggccagaagcacccccgugacccugagcaaggaccagcugagcggcaucaacaacaucgccuucagcaacugaggacuaguacuggcugcaucucccuuuccucuguccuccauccuucucccaggauggugaagggggaccugguacccagugauccccaccccaggauccuaaaucaugacuuaccugcuaauaaaaacucauuggaaaagugagaagaucuaaaaaaaaaaaaaaaaaaaaaaaaaaaaaaaaaaaaaaaaaaaaaaaaaaaaaaaaaaaaaaaaugcaucccccccccccccccccccccccccccccccaaaggcucuuuucagagccaccagaauu

SEQ ID NO: 4674 - RNA, 2010 nt, Artificial Sequence
  mRNA product Design b-5 comprising derived and/or modified sequence from HRSV(A2)__F_DSCav1_mut4 (opt5)
gggagacuccugucgggcggaaguaggaggaguagaguuuaaaaacaguacucuuuuuccgguucgggacguaguugaagcaacgacaagccggauaaccgcucuugagacaggaagcuuaccauggagcugcucauccugaaggccaacgcuauuaccacaauccuuacggccgugaccuucugcuuugcgagcggccagaauauuacagaagaguucuaccaauccaccuguucugcugucagcaaaggguaucuguccgcccucagaacaggaugguacaccucuguuaucacaauugaacugagcaacaucaaggagaauaaaugcaacggcaccgacgccaaggugaaacuuaucaagcaggaacuggauaaguauaaaaaugcugugacggagcuccagcugcugaugcaguccacccccgccacagggucuggaagcgcuauuuguuccggcgucgccgugugcaagguucuccaccuggagggggaagugaacaaaaucaagagcgcgcuucugucuaccaauaaagccgucgugucccucagcaacggaguuucugugcugacauuuaagguccuugaccugaagaauuacauugauaaacaacuccugccuauccugaacaagcaguccuguagcauuucuaauaucgagaccgugauugaguuccagcagaaaaacaaucggcuccuggaaaucacgcgcgaguuuuccgugaacgcuggcgucacaaccccgguuagcacauauaugcuuaccaauuccgaacugcucucucugaucaacgacaugcccauuaccaacgaucaaaagaaacuuaugagcaauaacgugcagaucgugagacagcaguccuacagcauuaugugcaucauuaaggaggaaguccuggccuaugugguucaacucccucuguacggcgugaucgacacacccuguuggaaacugcauacgucuccucucugcaccacaaauaccaaggagggguccaacaucugucugacacggaccgaucgcggaugguacugcgacaaugcuggcagcgucucuuucuuuccccaggccgaaacguguaaggugcagagcaacagaguuuucugcgauacaaugaacuccagaacccugccuucugaggugaaucucugcaaugucgacauuuuuaacccgaaauaugauuguaagaucaugaccagcaaaacagacguguccagcucugucauuaccucccugggggcgaucgugagcugcuacggaaagacaaaauguacggccucuaauaagaaccggggcauuaucaagaccuucuccaaugggugcgauuauguuagcaacaaaggaguggacacagucuccgugggcaauacccuuuacuguguuaacaagcaagagggcaaaucucuguaugugaagggggaacccaucauuaacuuuuacgacccucucgucuuccccagcgaugaguuugacgcuuccaucucucaggugaaugagaaaauuaaccagagccuggccuucauccgcaaguccgaugaacugcuccacaaugugaacgcuggaaagagcacaaccaauauuaugaucacgaccauuaucaucguuauuaucgucauucugcuuucucugaucgccgugggccuccugcuguauugcaaagccagauccacaccugugacccuuagcaaggaccagcucucugggauuaacaauaucgcuuucuccaacugaggacuaguacuggcugcaucucccuuuccucuguccuccauccuucucccaggauggugaagggggaccugguacccagugauccccaccccaggauccuaaaucaugacuuaccugcuaauaaaaacucauuggaaaagugagaagaucuaaaaaaaaaaaaaaaaaaaaaaaaaaaaaaaaaaaaaaaaaaaaaaaaaaaaaaaaaaaaaaaaugcaucccccccccccccccccccccccccccccccaaaggcucuuuucagagccaccagaauu

SEQ ID NO: 4675 - RNA, 2010 nt, Artificial Sequence
  mRNA product Design b-5 comprising derived and/or modified sequence from HRSV(A2)__F_DSCav1_mut4 (opt6)
gggagacuccugucgggcggaaguaggaggaguagaguuuaaaaacaguacucuuuuuccgguucgggacguaguugaagcaacgacaagccggauaaccgcucuugagacaggaagcuuaccauggaacuucuaauacucaaagccaacgcaauaacaacaauauuaacagccguaacauuuugcuucgcaucaggucaaaacauaacagaagaguucuaccaauccacaugcucagcaguaucaaaaggauauuuaagugcucuaagaacaggaugguacacauccguaauaacaaucgaacuaucaaacauaaaagaaaauaaauguaauggaacagacgccaaaguaaaauuaaucaaacaagaacuagacaaauacaaaaacgcaguuacugaauuacaauuauuaaugcaaucaacaccggccacaggaucuggaucagcaauaugcucaggaguagcagucugcaaaguauuacaccuagaaggggaaguuaauaaaaucaaaucagcauuacuauccaccaacaaagcgguaguuucacucuccaacggcguaucugucuuaacauucaaaguauuagaccuaaaaaacuacauugacaaacaacuacuaccaauccuaaacaaacaaucauguuccauaagcaauauagaaacaguaauagaauuucaacaaaaaaacaacagacuauuagaaauaacaagagaauuuuccgucaaugcaggaguuacuaccccugucuccaccuauaugcuaaccaauuccgaacucuuaucauuaauaaacgacaugccuaucacaaaugaccaaaaaaaauuaaugagcaacaacguacaaauaguacgacaacaaucauacucaaucaugugcauaauaaaagaagaaguccuagcauacguuguacaacuaccacuauacggagucauagauaccccaugcuggaaacuccauacaagcccacuaugcacuacaaacacaaaagaaggcucuaauauaugucuaacaagaacagaccgaggaugguacugcgauaaugccggcucagucucauucuuuccgcaagccgaaacuuguaaaguacaaaguaacagaguauuuugugacaccaugaacucaagaacccucccaagcgaagucaaucuaugcaacguugauauauucaaucccaaauacgacugcaaaaucaugaccucaaaaacagacgucagcucauccguuauaacaucacuaggagccaucguaucuugcuauggaaaaacaaaaugcacagcaagcaauaaaaacagaggcauaauaaaaacauucucaaauggaugcgacuacguaucaaacaaaggagucgacacaguuuccguaggaaacacuuuauacugcguaaacaaacaagaaggaaaaucauuauacgucaaaggugaaccaauaauaaacuucuacgauccacuuguauucccaucagacgaauuugacgcaucaauuucacaaguaaacgaaaaaauaaaccaaucacucgcauucauaagaaaaucagaugaacuacuacauaacguaaacgcaggaaaauccacaacaaacaucaugauaacaaccaucauaaucguaauaaucguaauacuauuaucccuaauugcaguaggauuacucuuauauugcaaagcaagaucaacaccaguaacccucaguaaagaccaacuauccggaauaaauaacaucgcauucucaaacuaaggacuaguacuggcugcaucucccuuuccucuguccuccauccuucucccaggauggugaagggggaccugguacccagugauccccaccccaggauccuaaaucaugacuuaccugcuaauaaaaacucauuggaaaagugagaagaucuaaaaaaaaaaaaaaaaaaaaaaaaaaaaaaaaaaaaaaaaaaaaaaaaaaaaaaaaaaaaaaaaugcaucccccccccccccccccccccccccccccccaaaggcucuuuucagagccaccagaauu

SEQ ID NO: 4676 - RNA, 2010 nt, Artificial Sequence
  mRNA product Design b-5 comprising derived and/or modified sequence from HRSV(A2)__F_DSCav1_mut4 (opt11)
gggagacuccugucgggcggaaguaggaggaguagaguuuaaaaacaguacucuuuuuccgguucgggacguaguugaagcaacgacaagccggauaaccgcucuugagacaggaagcuuaccauggaacugcucauccucaaagccaacgccaucaccaccauucuuaccgccgucacauucugcuucgccucaggccaaaacaucaccgaagaauuuuaccaauccacuuguucagccgucucaaaaggauaccuaucagcccuccguaccggcugguacaccucggucauaacaauagaacucuccaacauaaaagaaaacaaaugcaacggcaccgacgccaaggucaaacugauaaaacaagaacuugauaaauacaaaaacgccgucacugaacuccaacuccucaugcaauccacucccgcuacuggcucuggcuccgccaucugcucuggcgucgccgucuguaaaguacuccaccucgaaggggaagucaacaaaaucaaaucagcccuccuuagcaccaacaaggccgucgucucccucucaaacggagucagcguccucaccuucaagguccucgaccucaagaacuacaucgacaaacaacuccugcccauccuaaauaaacaauccugcucuaucuccaauaucgaaaccguuauagaguuccaacagaaaaacaaccgacuccucgaaaucacccgcgaguucuccgucaacgcaggcgucaccaccccugugucaaccuacaugcucaccaacagcgaacuacucucacucaucaaugacaugcccaucaccaacgaccaaaagaaacucauguccaacaacguccaaaucguacgucaacaauccuacagcaucaugugcaucauaaaagaagaaguccucgccuacgucguccaacuuccccucuacggcgucauagacacccccugcuggaaacugcauaccucaccccuaugcaccaccaacacuaaagaaggcuccaacaucugccucacccgcacggaccgcggcugguacugcgacaacgccggcuccgucuccuucuucccccaagccgaaacuuguaaaguccaauccaacagagucuucugcgacaccaugaacucuagaacgcugccauccgagguaaaccuaugcaacgucgacaucuucaaucccaaauacgacugcaagaucaugaccucaaaaaccgacguauccuccucaguaaucaccagucucggagcuaucgucuccugcuacggcaaaaccaaaugcacggccucuaacaaaaaccgcggcaucaucaaaaccuucucaaacggaugcgacuacgucagcaacaaaggcguagauaccgucucugucggcaacacacuguacugcguaaacaagcaagaaggaaaaucccucuacguaaaaggcgaacccaucaucaacuucuacgacccccucguuuuccccucagaugaauuugacgccucgauaucacaagucaacgaaaagauaaaucagucccucgccuucauccgaaaauccgacgaacuccuccacaacguuaacgcaggaaaguccaccacaaacaucaugauaacuacaaucauaauagucauuaucgucauacuccucucccuaaucgccguaggccugcuacucuacugcaaagcccgcucaacccccgucacucucucaaaagaccaacucuccggcaucaauaacaucgccuucucaaacuaaggacuaguacuggcugcaucucccuuuccucuguccuccauccuucucccaggauggugaagggggaccugguacccagugauccccaccccaggauccuaaaucaugacuuaccugcuaauaaaaacucauuggaaaagugagaagaucuaaaaaaaaaaaaaaaaaaaaaaaaaaaaaaaaaaaaaaaaaaaaaaaaaaaaaaaaaaaaaaaaugcaucccccccccccccccccccccccccccccccaaaggcucuuuucagagccaccagaauu

SEQ ID NO: 4677 - RNA, 1916 nt, Artificial Sequence
  mRNA product Design c-1 comprising derived and/or modified sequence from HRSV(A2)__F_DSCav1_mut4 (opt1)
gggagaguccgcucagccagguugcagaagcggcuuagcguguguccuaaucuucucucugcguguagguaggccugugccgcaaacaagcuuaccauggagcugcucauccugaaggccaacgccaucaccaccauccugacggcggugaccuucugcuucgccagcggccagaacaucaccgaggaguucuaccaguccacgugcagcgccgucuccaagggguaccucagcgcccugcggaccggcugguacaccuccgugaucaccaucgagcugagcaacaucaaggagaacaagugcaacgggaccgacgccaaggugaagcucaucaagcaggagcuggacaaguacaagaacgcggucacggagcugcagcuccugaugcaguccaccccggcaaccggcuccggcuccgccaucugcagcggcgucgccgugugcaaggugcugcaccucgagggggaggucaacaagaucaagagcgcccugcuguccaccaacaaggccguggugagccucuccaacggcgucagcgugcugaccuucaaggugcuggaccucaagaacuacaucgacaagcagcugcugcccauccugaacaagcagagcugcuccaucagcaacaucgagacggugaucgaguuccagcagaagaacaaccggcuccuggagaucacccgcgaguucagcgugaacgccggggucaccacccccguguccacguacaugcugaccaacagcgagcuccugucccugaucaacgacaugccgaucaccaacgaccagaagaagcucaugagcaacaacgugcagaucguccggcagcaguccuacagcaucaugugcaucaucaaggaggaggugcuggcguacgugguccagcugccccucuacggcgugaucgacacccccugcuggaagcugcacacgagcccccugugcaccaccaacaccaaggagggguccaacaucugccucacgcgcaccgaccggggcugguacugcgacaacgccggcagcgucuccuucuucccgcaggccgagaccugcaaggugcagagcaaccgcguguucugcgacaccaugaacucccggacgcugcccagcgagguaaaccucugcaacgucgacaucuucaaccccaaguacgacugcaagaucaugaccuccaagaccgacgugagcuccagcgugaucaccucccugggggccaucgucagcugcuacggcaagacgaagugcaccgccagcaacaagaaccgggggaucaucaagaccuucuccaacggcugcgacuacgugagcaacaagggcguggacaccguguccgucgggaacacccuguacugcgugaacaagcaggagggcaagagccucuacgugaagggggagcccaucaucaacuucuacgacccgcuggucuuccccuccgacgaguucgacgcgagcaucucccaggugaacgagaagaucaaccagagccuggccuucauccgcaaguccgacgagcugcuccacaacgugaacgccggcaagagcacgaccaacaucaugaucaccaccaucaucaucgucaucaucgugauccugcugucccucaucgccguggggcugcugcucuacugcaaggcccggagcacgcccgucacccuguccaaggaccagcugagcggcaucaacaacaucgcguucuccaacugaggacuaguguccaccugucccuccugggcugcuggauugucucguuuuccugccaaauaaacaggaucagcgcuuuacagaucuaaaaaaaaaaaaaaaaaaaaaaaaaaaaaaaaaaaaaaaaaaaaaaaaaaaaaaaaaaaaaaaaugcaucccccccccccccccccccccccccccccccaaaggcucuuuucagagccaccagaauu

SEQ ID NO: 4678 - RNA, 1916 nt, Artificial Sequence
  mRNA product Design c-1 comprising derived and/or modified sequence from HRSV(A2)__F_DSCav1_mut4 (opt1)
gggagaguccgcucagccagguugcagaagcggcuuagcguguguccuaaucuucucucugcguguagguaggccugugccgcaaacaagcuuaccauggagcugcucauccugaaggccaacgccaucaccaccauccugacggcggugaccuucugcuucgccagcggccagaacaucaccgaggaguucuaccaguccacgugcagcgccgucuccaagggguaccucagcgcccugcgcaccggcugguacaccuccgugaucaccaucgagcugagcaacaucaaggagaacaagugcaacgggaccgacgccaaggugaagcucaucaagcaggagcuggacaaguacaagaacgcggucacggagcugcagcuccugaugcaguccacccccgccaccggcagcggguccgccaucugcagcggcguggccgugugcaagguccugcaccucgagggcgaggugaacaagaucaaguccgcgcugcugagcaccaacaaggccguggucucccucagcaacgggguguccgugcugacguucaagguccuggaccucaagaacuacaucgacaagcagcugcugccgauccucaacaagcagagcugcuccaucagcaacaucgagaccgugaucgaguuccagcagaagaacaaccggcugcuggagaucacccgcgaguucuccgugaacgccggcgucaccacgcccgugagcaccuacaugcucaccaacagcgagcugcugucccucaucaacgacaugcccaucaccaacgaccagaagaagcugaugagcaacaacgugcagaucguccggcagcaguccuacagcaucaugugcaucaucaaggaggaggugcuggccuacgugguccagcucccccuguacggggugaucgacacgccgugcuggaagcugcacaccagcccccucugcaccaccaacacgaaggagggcuccaacaucugccugacccgcaccgaccgggggugguacugcgacaacgccggcuccgugagcuucuucccccaggcggagaccugcaagguccaguccaaccgcguguucugcgacacgaugaacagccggacccuccccuccgaggucaaccugugcaacguggacaucuucaacccgaaguacgacugcaagaucaugaccagcaagaccgacguguccagcuccgucaucacgagccugggcgccaucguguccugcuacgggaagaccaagugcaccgccagcaacaagaaccggggcaucaucaagaccuucuccaacgggugcgacuacgugagcaacaagggcgucgacacggugagcgugggcaacacccucuacugcgucaacaagcaggaggggaagucccuguacgugaagggcgagcccaucaucaacuucuacgacccccugguguuccccagcgacgaguucgacgccuccaucagccaggucaacgagaagaucaaccagucccucgccuucauccgcaagagcgacgagcugcugcacaacgugaacgcggggaaguccaccaccaacaucaugaucaccacgaucaucaucgugaucaucgucauccuccugagccugaucgccgugggccuccugcuguacugcaaggcccgguccaccccggugacccugagcaaggaccagcucuccgggaucaacaacaucgccuucagcaacugaggacuaguguccaccugucccuccugggcugcuggauugucucguuuuccugccaaauaaacaggaucagcgcuuuacagaucuaaaaaaaaaaaaaaaaaaaaaaaaaaaaaaaaaaaaaaaaaaaaaaaaaaaaaaaaaaaaaaaaugcaucccccccccccccccccccccccccccccccaaaggcucuuuucagagccaccagaauu

SEQ ID NO: 4679 - RNA, 1916 nt, Artificial Sequence
  mRNA product Design c-1 comprising derived and/or modified sequence from HRSV(A2)__F_DSCav1_mut4 (opt2)
gggagaguccgcucagccagguugcagaagcggcuuagcguguguccuaaucuucucucugcguguagguaggccugugccgcaaacaagcuuaccauggagcuccucauccucaaggccaacgccaucaccaccauccucaccgccgucaccuucugcuucgccuccggccagaacaucaccgaggaguucuaccaguccaccugcuccgccgucuccaagggcuaccucuccgcccuccgcaccggcugguacaccuccgucaucaccaucgagcucuccaacaucaaggagaacaagugcaacggcaccgacgccaaggucaagcucaucaagcaggagcucgacaaguacaagaacgccgucaccgagcuccagcuccucaugcaguccacccccgccaccggcuccggcuccgccaucugcuccggcgucgccgucugcaagguccuccaccucgagggcgaggucaacaagaucaaguccgcccuccucuccaccaacaaggccgucgucucccucuccaacggcgucuccguccucaccuucaagguccucgaccucaagaacuacaucgacaagcagcuccuccccauccucaacaagcaguccugcuccaucuccaacaucgagaccgucaucgaguuccagcagaagaacaaccgccuccucgagaucacccgcgaguucuccgucaacgccggcgucaccacccccgucuccaccuacaugcucaccaacuccgagcuccucucccucaucaacgacaugcccaucaccaacgaccagaagaagcucauguccaacaacguccagaucguccgccagcaguccuacuccaucaugugcaucaucaaggaggagguccucgccuacgucguccagcucccccucuacggcgucaucgacacccccugcuggaagcuccacaccuccccccucugcaccaccaacaccaaggagggcuccaacaucugccucacccgcaccgaccgcggcugguacugcgacaacgccggcuccgucuccuucuucccccaggccgagaccugcaagguccaguccaaccgcgucuucugcgacaccaugaacucccgcacccuccccuccgaggucaaccucugcaacgucgacaucuucaaccccaaguacgacugcaagaucaugaccuccaagaccgacgucuccuccuccgucaucaccucccucggcgccaucgucuccugcuacggcaagaccaagugcaccgccuccaacaagaaccgcggcaucaucaagaccuucuccaacggcugcgacuacgucuccaacaagggcgucgacaccgucuccgucggcaacacccucuacugcgucaacaagcaggagggcaagucccucuacgucaagggcgagcccaucaucaacuucuacgacccccucgucuuccccuccgacgaguucgacgccuccaucucccaggucaacgagaagaucaaccagucccucgccuucauccgcaaguccgacgagcuccuccacaacgucaacgccggcaaguccaccaccaacaucaugaucaccaccaucaucaucgucaucaucgucauccuccucucccucaucgccgucggccuccuccucuacugcaaggcccgcuccacccccgucacccucuccaaggaccagcucuccggcaucaacaacaucgccuucuccaacugaggacuaguguccaccugucccuccugggcugcuggauugucucguuuuccugccaaauaaacaggaucagcgcuuuacagaucuaaaaaaaaaaaaaaaaaaaaaaaaaaaaaaaaaaaaaaaaaaaaaaaaaaaaaaaaaaaaaaaaugcaucccccccccccccccccccccccccccccccaaaggcucuuuucagagccaccagaauu

SEQ ID NO: 4680 - RNA, 1916 nt, Artificial Sequence
  mRNA product Design c-1 comprising derived and/or modified sequence from HRSV(A2)__F_DSCav1_mut4 (opt3)
gggagaguccgcucagccagguugcagaagcggcuuagcguguguccuaaucuucucucugcguguagguaggccugugccgcaaacaagcuuaccauggagcugcucauccuuaaggccaacgcuauuaccacaauacugacugcagugacguucugcuuugccagcggccagaauaucaccgaagaguucuaccaauccacauguucugcggucucaaaaggguauuugagugcuuuaagaacuggaugguacaccagcguuauuacaaucgaacuguccaacauuaaggagaauaaaugcaacgguaccgacgccaaggugaaacuaaucaagcaggaacucgauaaguauaaaaaugcaguaacugagcugcagcuucugaugcagucuacacccgccaccggcucggggucagcuauauguagcggaguggcagucugcaagguguugcaccucgagggcgaaguuaacaaaaucaagagugcccugcuguccacgaauaaagcuguggucucucucagcaacgguguguccguauuaacuuuuaagguucuggaccuuaagaauuacauugauaaacaauugcugccuauccuaaacaagcagucauguaguauuagcaauaucgagaccgugauagaguuccagcagaaaaacaauaggcuccuggaaauuacacgggaguuuucugucaacgccggggugacuaccccaguguccacauauaugcuuaccaauucagaacuguugagccucaucaacgacaugccgauuacgaacgaucaaaagaaacugaugaguaauaacguccagaucguucgccagcagucuuacuccaucaugugcauuauaaaggaggaaguguuagcguauguagugcaacugccccucuacggagucaucgacacuccuuguuggaaacuucauacaagcccacugugcaccacuaauacaaaggagggcucgaacauuuguuugacccgaacggaucguggcugguacugcgacaaugcagggucuguguccuucuuuccccaggccgaaaccuguaagguucagucaaacagaguguucugcgauacaaugaauaguagaacucugccuagcgaggucaaccucugcaauguggacaucuuuaacccaaaauaugauuguaagauaaugaccuccaaaacagacguaucuagcucaguuauuaccagucugggagcuaucguguccugcuacgguaagacuaaauguacagccagcaauaagaacaggggcaucauuaagaccuucucuaaugggugcgauuaugucucaaacaaaggaguggacacugucagugugggcaauacgcuuuacuguguuaacaagcaagaggguaaaagccuguaugugaagggggaacccaucauuaacuuuuacgacccuuugguauucccauccgaugaguuugacgcaucuauaucgcaggucaaugagaaaaucaaccagagccucgcuuucauucggaaguccgaugaacuguuacacaaugugaacgccggaaagucaacaaccaauaucaugaucacuaccauuauaaucguuauuaucgugauucugcuaagucucaucgcggucggccugcuuuuguauugcaaagcccgcucuacaccggugacccugagcaaggaccagcucuccggcauaaacaauaucgcauucucaaacugaggacuaguguccaccugucccuccugggcugcuggauugucucguuuuccugccaaauaaacaggaucagcgcuuuacagaucuaaaaaaaaaaaaaaaaaaaaaaaaaaaaaaaaaaaaaaaaaaaaaaaaaaaaaaaaaaaaaaaaugcaucccccccccccccccccccccccccccccccaaaggcucuuuucagagccaccagaauu

SEQ ID NO: 4681 - RNA, 1916 nt, Artificial Sequence
  mRNA product Design c-1 comprising derived and/or modified sequence from HRSV(A2)__F_DSCav1_mut4 (opt4)
gggagaguccgcucagccagguugcagaagcggcuuagcguguguccuaaucuucucucugcguguagguaggccugugccgcaaacaagcuuaccauggagcugcugauccugaaggccaacgccaucaccaccauccugaccgccgugaccuucugcuucgccagcggccagaacaucaccgaggaguucuaccagagcaccugcagcgccgugagcaagggcuaccugagcgcccugagaaccggcugguacaccagcgugaucaccaucgagcugagcaacaucaaggagaacaagugcaacggcaccgacgccaaggugaagcugaucaagcaggagcuggacaaguacaagaacgccgugaccgagcugcagcugcugaugcagagcacccccgccaccggcagcggcagcgccaucugcagcggcguggccgugugcaaggugcugcaccuggagggcgaggugaacaagaucaagagcgcccugcugagcaccaacaaggccguggugagccugagcaacggcgugagcgugcugaccuucaaggugcuggaccugaagaacuacaucgacaagcagcugcugcccauccugaacaagcagagcugcagcaucagcaacaucgagaccgugaucgaguuccagcagaagaacaacagacugcuggagaucaccagagaguucagcgugaacgccggcgugaccacccccgugagcaccuacaugcugaccaacagcgagcugcugagccugaucaacgacaugcccaucaccaacgaccagaagaagcugaugagcaacaacgugcagaucgugagacagcagagcuacagcaucaugugcaucaucaaggaggaggugcuggccuacguggugcagcugccccuguacggcgugaucgacacccccugcuggaagcugcacaccagcccccugugcaccaccaacaccaaggagggcagcaacaucugccugaccagaaccgacagaggcugguacugcgacaacgccggcagcgugagcuucuucccccaggccgagaccugcaaggugcagagcaacagaguguucugcgacaccaugaacagcagaacccugcccagcgaggugaaccugugcaacguggacaucuucaaccccaaguacgacugcaagaucaugaccagcaagaccgacgugagcagcagcgugaucaccagccugggcgccaucgugagcugcuacggcaagaccaagugcaccgccagcaacaagaacagaggcaucaucaagaccuucagcaacggcugcgacuacgugagcaacaagggcguggacaccgugagcgugggcaacacccuguacugcgugaacaagcaggagggcaagagccuguacgugaagggcgagcccaucaucaacuucuacgacccccugguguuccccagcgacgaguucgacgccagcaucagccaggugaacgagaagaucaaccagagccuggccuucaucagaaagagcgacgagcugcugcacaacgugaacgccggcaagagcaccaccaacaucaugaucaccaccaucaucaucgugaucaucgugauccugcugagccugaucgccgugggccugcugcuguacugcaaggccagaagcacccccgugacccugagcaaggaccagcugagcggcaucaacaacaucgccuucagcaacugaggacuaguguccaccugucccuccugggcugcuggauugucucguuuuccugccaaauaaacaggaucagcgcuuuacagaucuaaaaaaaaaaaaaaaaaaaaaaaaaaaaaaaaaaaaaaaaaaaaaaaaaaaaaaaaaaaaaaaaugcaucccccccccccccccccccccccccccccccaaaggcucuuuucagagccaccagaauu

SEQ ID NO: 4682 - RNA, 1916 nt, Artificial Sequence
  mRNA product Design c-1 comprising derived and/or modified sequence from HRSV(A2)__F_DSCav1_mut4 (opt5)
gggagaguccgcucagccagguugcagaagcggcuuagcguguguccuaaucuucucucugcguguagguaggccugugccgcaaacaagcuuaccauggagcugcucauccugaaggccaacgcuauuaccacaauccuuacggccgugaccuucugcuuugcgagcggccagaauauuacagaagaguucuaccaauccaccuguucugcugucagcaaaggguaucuguccgcccucagaacaggaugguacaccucuguuaucacaauugaacugagcaacaucaaggagaauaaaugcaacggcaccgacgccaaggugaaacuuaucaagcaggaacuggauaaguauaaaaaugcugugacggagcuccagcugcugaugcaguccacccccgccacagggucuggaagcgcuauuuguuccggcgucgccgugugcaagguucuccaccuggagggggaagugaacaaaaucaagagcgcgcuucugucuaccaauaaagccgucgugucccucagcaacggaguuucugugcugacauuuaagguccuugaccugaagaauuacauugauaaacaacuccugccuauccugaacaagcaguccuguagcauuucuaauaucgagaccgugauugaguuccagcagaaaaacaaucggcuccuggaaaucacgcgcgaguuuuccgugaacgcuggcgucacaaccccgguuagcacauauaugcuuaccaauuccgaacugcucucucugaucaacgacaugcccauuaccaacgaucaaaagaaacuuaugagcaauaacgugcagaucgugagacagcaguccuacagcauuaugugcaucauuaaggaggaaguccuggccuaugugguucaacucccucuguacggcgugaucgacacacccuguuggaaacugcauacgucuccucucugcaccacaaauaccaaggagggguccaacaucugucugacacggaccgaucgcggaugguacugcgacaaugcuggcagcgucucuuucuuuccccaggccgaaacguguaaggugcagagcaacagaguuuucugcgauacaaugaacuccagaacccugccuucugaggugaaucucugcaaugucgacauuuuuaacccgaaauaugauuguaagaucaugaccagcaaaacagacguguccagcucugucauuaccucccugggggcgaucgugagcugcuacggaaagacaaaauguacggccucuaauaagaaccggggcauuaucaagaccuucuccaaugggugcgauuauguuagcaacaaaggaguggacacagucuccgugggcaauacccuuuacuguguuaacaagcaagagggcaaaucucuguaugugaagggggaacccaucauuaacuuuuacgacccucucgucuuccccagcgaugaguuugacgcuuccaucucucaggugaaugagaaaauuaaccagagccuggccuucauccgcaaguccgaugaacugcuccacaaugugaacgcuggaaagagcacaaccaauauuaugaucacgaccauuaucaucguuauuaucgucauucugcuuucucugaucgccgugggccuccugcuguauugcaaagccagauccacaccugugacccuuagcaaggaccagcucucugggauuaacaauaucgcuuucuccaacugaggacuaguguccaccugucccuccugggcugcuggauugucucguuuuccugccaaauaaacaggaucagcgcuuuacagaucuaaaaaaaaaaaaaaaaaaaaaaaaaaaaaaaaaaaaaaaaaaaaaaaaaaaaaaaaaaaaaaaaugcaucccccccccccccccccccccccccccccccaaaggcucuuuucagagccaccagaauu

SEQ ID NO: 4683 - RNA, 1916 nt, Artificial Sequence
  mRNA product Design c-1 comprising derived and/or modified sequence from HRSV(A2)__F_DSCav1_mut4 (opt6)
gggagaguccgcucagccagguugcagaagcggcuuagcguguguccuaaucuucucucugcguguagguaggccugugccgcaaacaagcuuaccauggaacuucuaauacucaaagccaacgcaauaacaacaauauuaacagccguaacauuuugcuucgcaucaggucaaaacauaacagaagaguucuaccaauccacaugcucagcaguaucaaaaggauauuuaagugcucuaagaacaggaugguacacauccguaauaacaaucgaacuaucaaacauaaaagaaaauaaauguaauggaacagacgccaaaguaaaauuaaucaaacaagaacuagacaaauacaaaaacgcaguuacugaauuacaauuauuaaugcaaucaacaccggccacaggaucuggaucagcaauaugcucaggaguagcagucugcaaaguauuacaccuagaaggggaaguuaauaaaaucaaaucagcauuacuauccaccaacaaagcgguaguuucacucuccaacggcguaucugucuuaacauucaaaguauuagaccuaaaaaacuacauugacaaacaacuacuaccaauccuaaacaaacaaucauguuccauaagcaauauagaaacaguaauagaauuucaacaaaaaaacaacagacuauuagaaauaacaagagaauuuuccgucaaugcaggaguuacuaccccugucuccaccuauaugcuaaccaauuccgaacucuuaucauuaauaaacgacaugccuaucacaaaugaccaaaaaaaauuaaugagcaacaacguacaaauaguacgacaacaaucauacucaaucaugugcauaauaaaagaagaaguccuagcauacguuguacaacuaccacuauacggagucauagauaccccaugcuggaaacuccauacaagcccacuaugcacuacaaacacaaaagaaggcucuaauauaugucuaacaagaacagaccgaggaugguacugcgauaaugccggcucagucucauucuuuccgcaagccgaaacuuguaaaguacaaaguaacagaguauuuugugacaccaugaacucaagaacccucccaagcgaagucaaucuaugcaacguugauauauucaaucccaaauacgacugcaaaaucaugaccucaaaaacagacgucagcucauccguuauaacaucacuaggagccaucguaucuugcuauggaaaaacaaaaugcacagcaagcaauaaaaacagaggcauaauaaaaacauucucaaauggaugcgacuacguaucaaacaaaggagucgacacaguuuccguaggaaacacuuuauacugcguaaacaaacaagaaggaaaaucauuauacgucaaaggugaaccaauaauaaacuucuacgauccacuuguauucccaucagacgaauuugacgcaucaauuucacaaguaaacgaaaaaauaaaccaaucacucgcauucauaagaaaaucagaugaacuacuacauaacguaaacgcaggaaaauccacaacaaacaucaugauaacaaccaucauaaucguaauaaucguaauacuauuaucccuaauugcaguaggauuacucuuauauugcaaagcaagaucaacaccaguaacccucaguaaagaccaacuauccggaauaaauaacaucgcauucucaaacuaaggacuaguguccaccugucccuccugggcugcuggauugucucguuuuccugccaaauaaacaggaucagcgcuuuacagaucuaaaaaaaaaaaaaaaaaaaaaaaaaaaaaaaaaaaaaaaaaaaaaaaaaaaaaaaaaaaaaaaaugcaucccccccccccccccccccccccccccccccaaaggcucuuuucagagccaccagaauu

SEQ ID NO: 4684 - RNA, 1916 nt, Artificial Sequence
  mRNA product Design c-1 comprising derived and/or modified sequence from HRSV(A2)__F_DSCav1_mut4 (opt11)
gggagaguccgcucagccagguugcagaagcggcuuagcguguguccuaaucuucucucugcguguagguaggccugugccgcaaacaagcuuaccauggaacugcucauccucaaagccaacgccaucaccaccauucuuaccgccgucacauucugcuucgccucaggccaaaacaucaccgaagaauuuuaccaauccacuuguucagccgucucaaaaggauaccuaucagcccuccguaccggcugguacaccucggucauaacaauagaacucuccaacauaaaagaaaacaaaugcaacggcaccgacgccaaggucaaacugauaaaacaagaacuugauaaauacaaaaacgccgucacugaacuccaacuccucaugcaauccacucccgcuacuggcucuggcuccgccaucugcucuggcgucgccgucuguaaaguacuccaccucgaaggggaagucaacaaaaucaaaucagcccuccuuagcaccaacaaggccgucgucucccucucaaacggagucagcguccucaccuucaagguccucgaccucaagaacuacaucgacaaacaacuccugcccauccuaaauaaacaauccugcucuaucuccaauaucgaaaccguuauagaguuccaacagaaaaacaaccgacuccucgaaaucacccgcgaguucuccgucaacgcaggcgucaccaccccugugucaaccuacaugcucaccaacagcgaacuacucucacucaucaaugacaugcccaucaccaacgaccaaaagaaacucauguccaacaacguccaaaucguacgucaacaauccuacagcaucaugugcaucauaaaagaagaaguccucgccuacgucguccaacuuccccucuacggcgucauagacacccccugcuggaaacugcauaccucaccccuaugcaccaccaacacuaaagaaggcuccaacaucugccucacccgcacggaccgcggcugguacugcgacaacgccggcuccgucuccuucuucccccaagccgaaacuuguaaaguccaauccaacagagucuucugcgacaccaugaacucuagaacgcugccauccgagguaaaccuaugcaacgucgacaucuucaaucccaaauacgacugcaagaucaugaccucaaaaaccgacguauccuccucaguaaucaccagucucggagcuaucgucuccugcuacggcaaaaccaaaugcacggccucuaacaaaaaccgcggcaucaucaaaaccuucucaaacggaugcgacuacgucagcaacaaaggcguagauaccgucucugucggcaacacacuguacugcguaaacaagcaagaaggaaaaucccucuacguaaaaggcgaacccaucaucaacuucuacgacccccucguuuuccccucagaugaauuugacgccucgauaucacaagucaacgaaaagauaaaucagucccucgccuucauccgaaaauccgacgaacuccuccacaacguuaacgcaggaaaguccaccacaaacaucaugauaacuacaaucauaauagucauuaucgucauacuccucucccuaaucgccguaggccugcuacucuacugcaaagcccgcucaacccccgucacucucucaaaagaccaacucuccggcaucaauaacaucgccuucucaaacuaaggacuaguguccaccugucccuccugggcugcuggauugucucguuuuccugccaaauaaacaggaucagcgcuuuacagaucuaaaaaaaaaaaaaaaaaaaaaaaaaaaaaaaaaaaaaaaaaaaaaaaaaaaaaaaaaaaaaaaaugcaucccccccccccccccccccccccccccccccaaaggcucuuuucagagccaccagaauu

SEQ ID NO: 4685 - RNA, 2006 nt, Artificial Sequence
  mRNA product Design c-2 comprising derived and/or modified sequence from HRSV(A2)__F_DSCav1_mut4 (opt1)
gggagacuccugucgggcggaaguaggaggaguagaguuuaaaaacaguacucuuuuuccgguucgggacguaguugaagcaacgacaagccggauaaccgcucuugagacaggaagcuuaccauggagcugcucauccugaaggccaacgccaucaccaccauccugacggcggugaccuucugcuucgccagcggccagaacaucaccgaggaguucuaccaguccacgugcagcgccgucuccaagggguaccucagcgcccugcggaccggcugguacaccuccgugaucaccaucgagcugagcaacaucaaggagaacaagugcaacgggaccgacgccaaggugaagcucaucaagcaggagcuggacaaguacaagaacgcggucacggagcugcagcuccugaugcaguccaccccggcaaccggcuccggcuccgccaucugcagcggcgucgccgugugcaaggugcugcaccucgagggggaggucaacaagaucaagagcgcccugcuguccaccaacaaggccguggugagccucuccaacggcgucagcgugcugaccuucaaggugcuggaccucaagaacuacaucgacaagcagcugcugcccauccugaacaagcagagcugcuccaucagcaacaucgagacggugaucgaguuccagcagaagaacaaccggcuccuggagaucacccgcgaguucagcgugaacgccggggucaccacccccguguccacguacaugcugaccaacagcgagcuccugucccugaucaacgacaugccgaucaccaacgaccagaagaagcucaugagcaacaacgugcagaucguccggcagcaguccuacagcaucaugugcaucaucaaggaggaggugcuggcguacgugguccagcugccccucuacggcgugaucgacacccccugcuggaagcugcacacgagcccccugugcaccaccaacaccaaggagggguccaacaucugccucacgcgcaccgaccggggcugguacugcgacaacgccggcagcgucuccuucuucccgcaggccgagaccugcaaggugcagagcaaccgcguguucugcgacaccaugaacucccggacgcugcccagcgagguaaaccucugcaacgucgacaucuucaaccccaaguacgacugcaagaucaugaccuccaagaccgacgugagcuccagcgugaucaccucccugggggccaucgucagcugcuacggcaagacgaagugcaccgccagcaacaagaaccgggggaucaucaagaccuucuccaacggcugcgacuacgugagcaacaagggcguggacaccguguccgucgggaacacccuguacugcgugaacaagcaggagggcaagagccucuacgugaagggggagcccaucaucaacuucuacgacccgcuggucuuccccuccgacgaguucgacgcgagcaucucccaggugaacgagaagaucaaccagagccuggccuucauccgcaaguccgacgagcugcuccacaacgugaacgccggcaagagcacgaccaacaucaugaucaccaccaucaucaucgucaucaucgugauccugcugucccucaucgccguggggcugcugcucuacugcaaggcccggagcacgcccgucacccuguccaaggaccagcugagcggcaucaacaacaucgcguucuccaacugaggacuaguggaagcauuuuccuggcugauuaaaagaaauuacucagcuauggucaucuguuccuguuagaaggcuaugcagcauauuauauacuaugcgcauguuaugaaaugcauaauaaaaaauuuuaaaaaaucuaaaagaucuaaaaaaaaaaaaaaaaaaaaaaaaaaaaaaaaaaaaaaaaaaaaaaaaaaaaaaaaaaaaaaaaugcaucccccccccccccccccccccccccccccccaaaggcucuuuucagagccaccagaauu

SEQ ID NO: 4686 - RNA, 2006 nt, Artificial Sequence
  mRNA product Design c-2 comprising derived and/or modified sequence from HRSV(A2)__F_DSCav1_mut4 (opt1)
gggagacuccugucgggcggaaguaggaggaguagaguuuaaaaacaguacucuuuuuccgguucgggacguaguugaagcaacgacaagccggauaaccgcucuugagacaggaagcuuaccauggagcugcucauccugaaggccaacgccaucaccaccauccugacggcggugaccuucugcuucgccagcggccagaacaucaccgaggaguucuaccaguccacgugcagcgccgucuccaagggguaccucagcgcccugcgcaccggcugguacaccuccgugaucaccaucgagcugagcaacaucaaggagaacaagugcaacgggaccgacgccaaggugaagcucaucaagcaggagcuggacaaguacaagaacgcggucacggagcugcagcuccugaugcaguccacccccgccaccggcagcggguccgccaucugcagcggcguggccgugugcaagguccugcaccucgagggcgaggugaacaagaucaaguccgcgcugcugagcaccaacaaggccguggucucccucagcaacgggguguccgugcugacguucaagguccuggaccucaagaacuacaucgacaagcagcugcugccgauccucaacaagcagagcugcuccaucagcaacaucgagaccgugaucgaguuccagcagaagaacaaccggcugcuggagaucacccgcgaguucuccgugaacgccggcgucaccacgcccgugagcaccuacaugcucaccaacagcgagcugcugucccucaucaacgacaugcccaucaccaacgaccagaagaagcugaugagcaacaacgugcagaucguccggcagcaguccuacagcaucaugugcaucaucaaggaggaggugcuggccuacgugguccagcucccccuguacggggugaucgacacgccgugcuggaagcugcacaccagcccccucugcaccaccaacacgaaggagggcuccaacaucugccugacccgcaccgaccgggggugguacugcgacaacgccggcuccgugagcuucuucccccaggcggagaccugcaagguccaguccaaccgcguguucugcgacacgaugaacagccggacccuccccuccgaggucaaccugugcaacguggacaucuucaacccgaaguacgacugcaagaucaugaccagcaagaccgacguguccagcuccgucaucacgagccugggcgccaucguguccugcuacgggaagaccaagugcaccgccagcaacaagaaccggggcaucaucaagaccuucuccaacgggugcgacuacgugagcaacaagggcgucgacacggugagcgugggcaacacccucuacugcgucaacaagcaggaggggaagucccuguacgugaagggcgagcccaucaucaacuucuacgacccccugguguuccccagcgacgaguucgacgccuccaucagccaggucaacgagaagaucaaccagucccucgccuucauccgcaagagcgacgagcugcugcacaacgugaacgcggggaaguccaccaccaacaucaugaucaccacgaucaucaucgugaucaucgucauccuccugagccugaucgccgugggccuccugcuguacugcaaggcccgguccaccccggugacccugagcaaggaccagcucuccgggaucaacaacaucgccuucagcaacugaggacuaguggaagcauuuuccuggcugauuaaaagaaauuacucagcuauggucaucuguuccuguuagaaggcuaugcagcauauuauauacuaugcgcauguuaugaaaugcauaauaaaaaauuuuaaaaaaucuaaaagaucuaaaaaaaaaaaaaaaaaaaaaaaaaaaaaaaaaaaaaaaaaaaaaaaaaaaaaaaaaaaaaaaaugcaucccccccccccccccccccccccccccccccaaaggcucuuuucagagccaccagaauu

SEQ ID NO: 4687 - RNA, 2006 nt, Artificial Sequence
  mRNA product Design c-2 comprising derived and/or modified sequence from HRSV(A2)__F_DSCav1_mut4 (opt2)
gggagacuccugucgggcggaaguaggaggaguagaguuuaaaaacaguacucuuuuuccgguucgggacguaguugaagcaacgacaagccggauaaccgcucuugagacaggaagcuuaccauggagcuccucauccucaaggccaacgccaucaccaccauccucaccgccgucaccuucugcuucgccuccggccagaacaucaccgaggaguucuaccaguccaccugcuccgccgucuccaagggcuaccucuccgcccuccgcaccggcugguacaccuccgucaucaccaucgagcucuccaacaucaaggagaacaagugcaacggcaccgacgccaaggucaagcucaucaagcaggagcucgacaaguacaagaacgccgucaccgagcuccagcuccucaugcaguccacccccgccaccggcuccggcuccgccaucugcuccggcgucgccgucugcaagguccuccaccucgagggcgaggucaacaagaucaaguccgcccuccucuccaccaacaaggccgucgucucccucuccaacggcgucuccguccucaccuucaagguccucgaccucaagaacuacaucgacaagcagcuccuccccauccucaacaagcaguccugcuccaucuccaacaucgagaccgucaucgaguuccagcagaagaacaaccgccuccucgagaucacccgcgaguucuccgucaacgccggcgucaccacccccgucuccaccuacaugcucaccaacuccgagcuccucucccucaucaacgacaugcccaucaccaacgaccagaagaagcucauguccaacaacguccagaucguccgccagcaguccuacuccaucaugugcaucaucaaggaggagguccucgccuacgucguccagcucccccucuacggcgucaucgacacccccugcuggaagcuccacaccuccccccucugcaccaccaacaccaaggagggcuccaacaucugccucacccgcaccgaccgcggcugguacugcgacaacgccggcuccgucuccuucuucccccaggccgagaccugcaagguccaguccaaccgcgucuucugcgacaccaugaacucccgcacccuccccuccgaggucaaccucugcaacgucgacaucuucaaccccaaguacgacugcaagaucaugaccuccaagaccgacgucuccuccuccgucaucaccucccucggcgccaucgucuccugcuacggcaagaccaagugcaccgccuccaacaagaaccgcggcaucaucaagaccuucuccaacggcugcgacuacgucuccaacaagggcgucgacaccgucuccgucggcaacacccucuacugcgucaacaagcaggagggcaagucccucuacgucaagggcgagcccaucaucaacuucuacgacccccucgucuuccccuccgacgaguucgacgccuccaucucccaggucaacgagaagaucaaccagucccucgccuucauccgcaaguccgacgagcuccuccacaacgucaacgccggcaaguccaccaccaacaucaugaucaccaccaucaucaucgucaucaucgucauccuccucucccucaucgccgucggccuccuccucuacugcaaggcccgcuccacccccgucacccucuccaaggaccagcucuccggcaucaacaacaucgccuucuccaacugaggacuaguggaagcauuuuccuggcugauuaaaagaaauuacucagcuauggucaucuguuccuguuagaaggcuaugcagcauauuauauacuaugcgcauguuaugaaaugcauaauaaaaaauuuuaaaaaaucuaaaagaucuaaaaaaaaaaaaaaaaaaaaaaaaaaaaaaaaaaaaaaaaaaaaaaaaaaaaaaaaaaaaaaaaugcaucccccccccccccccccccccccccccccccaaaggcucuuuucagagccaccagaauu

SEQ ID NO: 4688 - RNA, 2006 nt, Artificial Sequence
  mRNA product Design c-2 comprising derived and/or modified sequence from HRSV(A2)__F_DSCav1_mut4 (opt3)
gggagacuccugucgggcggaaguaggaggaguagaguuuaaaaacaguacucuuuuuccgguucgggacguaguugaagcaacgacaagccggauaaccgcucuugagacaggaagcuuaccauggagcugcucauccuuaaggccaacgcuauuaccacaauacugacugcagugacguucugcuuugccagcggccagaauaucaccgaagaguucuaccaauccacauguucugcggucucaaaaggguauuugagugcuuuaagaacuggaugguacaccagcguuauuacaaucgaacuguccaacauuaaggagaauaaaugcaacgguaccgacgccaaggugaaacuaaucaagcaggaacucgauaaguauaaaaaugcaguaacugagcugcagcuucugaugcagucuacacccgccaccggcucggggucagcuauauguagcggaguggcagucugcaagguguugcaccucgagggcgaaguuaacaaaaucaagagugcccugcuguccacgaauaaagcuguggucucucucagcaacgguguguccguauuaacuuuuaagguucuggaccuuaagaauuacauugauaaacaauugcugccuauccuaaacaagcagucauguaguauuagcaauaucgagaccgugauagaguuccagcagaaaaacaauaggcuccuggaaauuacacgggaguuuucugucaacgccggggugacuaccccaguguccacauauaugcuuaccaauucagaacuguugagccucaucaacgacaugccgauuacgaacgaucaaaagaaacugaugaguaauaacguccagaucguucgccagcagucuuacuccaucaugugcauuauaaaggaggaaguguuagcguauguagugcaacugccccucuacggagucaucgacacuccuuguuggaaacuucauacaagcccacugugcaccacuaauacaaaggagggcucgaacauuuguuugacccgaacggaucguggcugguacugcgacaaugcagggucuguguccuucuuuccccaggccgaaaccuguaagguucagucaaacagaguguucugcgauacaaugaauaguagaacucugccuagcgaggucaaccucugcaauguggacaucuuuaacccaaaauaugauuguaagauaaugaccuccaaaacagacguaucuagcucaguuauuaccagucugggagcuaucguguccugcuacgguaagacuaaauguacagccagcaauaagaacaggggcaucauuaagaccuucucuaaugggugcgauuaugucucaaacaaaggaguggacacugucagugugggcaauacgcuuuacuguguuaacaagcaagaggguaaaagccuguaugugaagggggaacccaucauuaacuuuuacgacccuuugguauucccauccgaugaguuugacgcaucuauaucgcaggucaaugagaaaaucaaccagagccucgcuuucauucggaaguccgaugaacuguuacacaaugugaacgccggaaagucaacaaccaauaucaugaucacuaccauuauaaucguuauuaucgugauucugcuaagucucaucgcggucggccugcuuuuguauugcaaagcccgcucuacaccggugacccugagcaaggaccagcucuccggcauaaacaauaucgcauucucaaacugaggacuaguggaagcauuuuccuggcugauuaaaagaaauuacucagcuauggucaucuguuccuguuagaaggcuaugcagcauauuauauacuaugcgcauguuaugaaaugcauaauaaaaaauuuuaaaaaaucuaaaagaucuaaaaaaaaaaaaaaaaaaaaaaaaaaaaaaaaaaaaaaaaaaaaaaaaaaaaaaaaaaaaaaaaugcaucccccccccccccccccccccccccccccccaaaggcucuuuucagagccaccagaauu

SEQ ID NO: 4689 - RNA, 2006 nt, Artificial Sequence
  mRNA product Design c-2 comprising derived and/or modified sequence from HRSV(A2)__F_DSCav1_mut4 (opt4)
gggagacuccugucgggcggaaguaggaggaguagaguuuaaaaacaguacucuuuuuccgguucgggacguaguugaagcaacgacaagccggauaaccgcucuugagacaggaagcuuaccauggagcugcugauccugaaggccaacgccaucaccaccauccugaccgccgugaccuucugcuucgccagcggccagaacaucaccgaggaguucuaccagagcaccugcagcgccgugagcaagggcuaccugagcgcccugagaaccggcugguacaccagcgugaucaccaucgagcugagcaacaucaaggagaacaagugcaacggcaccgacgccaaggugaagcugaucaagcaggagcuggacaaguacaagaacgccgugaccgagcugcagcugcugaugcagagcacccccgccaccggcagcggcagcgccaucugcagcggcguggccgugugcaaggugcugcaccuggagggcgaggugaacaagaucaagagcgcccugcugagcaccaacaaggccguggugagccugagcaacggcgugagcgugcugaccuucaaggugcuggaccugaagaacuacaucgacaagcagcugcugcccauccugaacaagcagagcugcagcaucagcaacaucgagaccgugaucgaguuccagcagaagaacaacagacugcuggagaucaccagagaguucagcgugaacgccggcgugaccacccccgugagcaccuacaugcugaccaacagcgagcugcugagccugaucaacgacaugcccaucaccaacgaccagaagaagcugaugagcaacaacgugcagaucgugagacagcagagcuacagcaucaugugcaucaucaaggaggaggugcuggccuacguggugcagcugccccuguacggcgugaucgacacccccugcuggaagcugcacaccagcccccugugcaccaccaacaccaaggagggcagcaacaucugccugaccagaaccgacagaggcugguacugcgacaacgccggcagcgugagcuucuucccccaggccgagaccugcaaggugcagagcaacagaguguucugcgacaccaugaacagcagaacccugcccagcgaggugaaccugugcaacguggacaucuucaaccccaaguacgacugcaagaucaugaccagcaagaccgacgugagcagcagcgugaucaccagccugggcgccaucgugagcugcuacggcaagaccaagugcaccgccagcaacaagaacagaggcaucaucaagaccuucagcaacggcugcgacuacgugagcaacaagggcguggacaccgugagcgugggcaacacccuguacugcgugaacaagcaggagggcaagagccuguacgugaagggcgagcccaucaucaacuucuacgacccccugguguuccccagcgacgaguucgacgccagcaucagccaggugaacgagaagaucaaccagagccuggccuucaucagaaagagcgacgagcugcugcacaacgugaacgccggcaagagcaccaccaacaucaugaucaccaccaucaucaucgugaucaucgugauccugcugagccugaucgccgugggccugcugcuguacugcaaggccagaagcacccccgugacccugagcaaggaccagcugagcggcaucaacaacaucgccuucagcaacugaggacuaguggaagcauuuuccuggcugauuaaaagaaauuacucagcuauggucaucuguuccuguuagaaggcuaugcagcauauuauauacuaugcgcauguuaugaaaugcauaauaaaaaauuuuaaaaaaucuaaaagaucuaaaaaaaaaaaaaaaaaaaaaaaaaaaaaaaaaaaaaaaaaaaaaaaaaaaaaaaaaaaaaaaaugcaucccccccccccccccccccccccccccccccaaaggcucuuuucagagccaccagaauu

SEQ ID NO: 4690 - RNA, 2006 nt, Artificial Sequence
  mRNA product Design c-2 comprising derived and/or modified sequence from HRSV(A2)__F_DSCav1_mut4 (opt5)
gggagacuccugucgggcggaaguaggaggaguagaguuuaaaaacaguacucuuuuuccgguucgggacguaguugaagcaacgacaagccggauaaccgcucuugagacaggaagcuuaccauggagcugcucauccugaaggccaacgcuauuaccacaauccuuacggccgugaccuucugcuuugcgagcggccagaauauuacagaagaguucuaccaauccaccuguucugcugucagcaaaggguaucuguccgcccucagaacaggaugguacaccucuguuaucacaauugaacugagcaacaucaaggagaauaaaugcaacggcaccgacgccaaggugaaacuuaucaagcaggaacuggauaaguauaaaaaugcugugacggagcuccagcugcugaugcaguccacccccgccacagggucuggaagcgcuauuuguuccggcgucgccgugugcaagguucuccaccuggagggggaagugaacaaaaucaagagcgcgcuucugucuaccaauaaagccgucgugucccucagcaacggaguuucugugcugacauuuaagguccuugaccugaagaauuacauugauaaacaacuccugccuauccugaacaagcaguccuguagcauuucuaauaucgagaccgugauugaguuccagcagaaaaacaaucggcuccuggaaaucacgcgcgaguuuuccgugaacgcuggcgucacaaccccgguuagcacauauaugcuuaccaauuccgaacugcucucucugaucaacgacaugcccauuaccaacgaucaaaagaaacuuaugagcaauaacgugcagaucgugagacagcaguccuacagcauuaugugcaucauuaaggaggaaguccuggccuaugugguucaacucccucuguacggcgugaucgacacacccuguuggaaacugcauacgucuccucucugcaccacaaauaccaaggagggguccaacaucugucugacacggaccgaucgcggaugguacugcgacaaugcuggcagcgucucuuucuuuccccaggccgaaacguguaaggugcagagcaacagaguuuucugcgauacaaugaacuccagaacccugccuucugaggugaaucucugcaaugucgacauuuuuaacccgaaauaugauuguaagaucaugaccagcaaaacagacguguccagcucugucauuaccucccugggggcgaucgugagcugcuacggaaagacaaaauguacggccucuaauaagaaccggggcauuaucaagaccuucuccaaugggugcgauuauguuagcaacaaaggaguggacacagucuccgugggcaauacccuuuacuguguuaacaagcaagagggcaaaucucuguaugugaagggggaacccaucauuaacuuuuacgacccucucgucuuccccagcgaugaguuugacgcuuccaucucucaggugaaugagaaaauuaaccagagccuggccuucauccgcaaguccgaugaacugcuccacaaugugaacgcuggaaagagcacaaccaauauuaugaucacgaccauuaucaucguuauuaucgucauucugcuuucucugaucgccgugggccuccugcuguauugcaaagccagauccacaccugugacccuuagcaaggaccagcucucugggauuaacaauaucgcuuucuccaacugaggacuaguggaagcauuuuccuggcugauuaaaagaaauuacucagcuauggucaucuguuccuguuagaaggcuaugcagcauauuauauacuaugcgcauguuaugaaaugcauaauaaaaaauuuuaaaaaaucuaaaagaucuaaaaaaaaaaaaaaaaaaaaaaaaaaaaaaaaaaaaaaaaaaaaaaaaaaaaaaaaaaaaaaaaugcaucccccccccccccccccccccccccccccccaaaggcucuuuucagagccaccagaauu

SEQ ID NO: 4691 - RNA, 2006 nt, Artificial Sequence
  mRNA product Design c-2 comprising derived and/or modified sequence from HRSV(A2)__F_DSCav1_mut4 (opt6)
gggagacuccugucgggcggaaguaggaggaguagaguuuaaaaacaguacucuuuuuccgguucgggacguaguugaagcaacgacaagccggauaaccgcucuugagacaggaagcuuaccauggaacuucuaauacucaaagccaacgcaauaacaacaauauuaacagccguaacauuuugcuucgcaucaggucaaaacauaacagaagaguucuaccaauccacaugcucagcaguaucaaaaggauauuuaagugcucuaagaacaggaugguacacauccguaauaacaaucgaacuaucaaacauaaaagaaaauaaauguaauggaacagacgccaaaguaaaauuaaucaaacaagaacuagacaaauacaaaaacgcaguuacugaauuacaauuauuaaugcaaucaacaccggccacaggaucuggaucagcaauaugcucaggaguagcagucugcaaaguauuacaccuagaaggggaaguuaauaaaaucaaaucagcauuacuauccaccaacaaagcgguaguuucacucuccaacggcguaucugucuuaacauucaaaguauuagaccuaaaaaacuacauugacaaacaacuacuaccaauccuaaacaaacaaucauguuccauaagcaauauagaaacaguaauagaauuucaacaaaaaaacaacagacuauuagaaauaacaagagaauuuuccgucaaugcaggaguuacuaccccugucuccaccuauaugcuaaccaauuccgaacucuuaucauuaauaaacgacaugccuaucacaaaugaccaaaaaaaauuaaugagcaacaacguacaaauaguacgacaacaaucauacucaaucaugugcauaauaaaagaagaaguccuagcauacguuguacaacuaccacuauacggagucauagauaccccaugcuggaaacuccauacaagcccacuaugcacuacaaacacaaaagaaggcucuaauauaugucuaacaagaacagaccgaggaugguacugcgauaaugccggcucagucucauucuuuccgcaagccgaaacuuguaaaguacaaaguaacagaguauuuugugacaccaugaacucaagaacccucccaagcgaagucaaucuaugcaacguugauauauucaaucccaaauacgacugcaaaaucaugaccucaaaaacagacgucagcucauccguuauaacaucacuaggagccaucguaucuugcuauggaaaaacaaaaugcacagcaagcaauaaaaacagaggcauaauaaaaacauucucaaauggaugcgacuacguaucaaacaaaggagucgacacaguuuccguaggaaacacuuuauacugcguaaacaaacaagaaggaaaaucauuauacgucaaaggugaaccaauaauaaacuucuacgauccacuuguauucccaucagacgaauuugacgcaucaauuucacaaguaaacgaaaaaauaaaccaaucacucgcauucauaagaaaaucagaugaacuacuacauaacguaaacgcaggaaaauccacaacaaacaucaugauaacaaccaucauaaucguaauaaucguaauacuauuaucccuaauugcaguaggauuacucuuauauugcaaagcaagaucaacaccaguaacccucaguaaagaccaacuauccggaauaaauaacaucgcauucucaaacuaaggacuaguggaagcauuuuccuggcugauuaaaagaaauuacucagcuauggucaucuguuccuguuagaaggcuaugcagcauauuauauacuaugcgcauguuaugaaaugcauaauaaaaaauuuuaaaaaaucuaaaagaucuaaaaaaaaaaaaaaaaaaaaaaaaaaaaaaaaaaaaaaaaaaaaaaaaaaaaaaaaaaaaaaaaugcaucccccccccccccccccccccccccccccccaaaggcucuuuucagagccaccagaauu

SEQ ID NO: 4692 - RNA, 2006 nt, Artificial Sequence
  mRNA product Design c-2 comprising derived and/or modified sequence from HRSV(A2)__F_DSCav1_mut4 (opt11)
gggagacuccugucgggcggaaguaggaggaguagaguuuaaaaacaguacucuuuuuccgguucgggacguaguugaagcaacgacaagccggauaaccgcucuugagacaggaagcuuaccauggaacugcucauccucaaagccaacgccaucaccaccauucuuaccgccgucacauucugcuucgccucaggccaaaacaucaccgaagaauuuuaccaauccacuuguucagccgucucaaaaggauaccuaucagcccuccguaccggcugguacaccucggucauaacaauagaacucuccaacauaaaagaaaacaaaugcaacggcaccgacgccaaggucaaacugauaaaacaagaacuugauaaauacaaaaacgccgucacugaacuccaacuccucaugcaauccacucccgcuacuggcucuggcuccgccaucugcucuggcgucgccgucuguaaaguacuccaccucgaaggggaagucaacaaaaucaaaucagcccuccuuagcaccaacaaggccgucgucucccucucaaacggagucagcguccucaccuucaagguccucgaccucaagaacuacaucgacaaacaacuccugcccauccuaaauaaacaauccugcucuaucuccaauaucgaaaccguuauagaguuccaacagaaaaacaaccgacuccucgaaaucacccgcgaguucuccgucaacgcaggcgucaccaccccugugucaaccuacaugcucaccaacagcgaacuacucucacucaucaaugacaugcccaucaccaacgaccaaaagaaacucauguccaacaacguccaaaucguacgucaacaauccuacagcaucaugugcaucauaaaagaagaaguccucgccuacgucguccaacuuccccucuacggcgucauagacacccccugcuggaaacugcauaccucaccccuaugcaccaccaacacuaaagaaggcuccaacaucugccucacccgcacggaccgcggcugguacugcgacaacgccggcuccgucuccuucuucccccaagccgaaacuuguaaaguccaauccaacagagucuucugcgacaccaugaacucuagaacgcugccauccgagguaaaccuaugcaacgucgacaucuucaaucccaaauacgacugcaagaucaugaccucaaaaaccgacguauccuccucaguaaucaccagucucggagcuaucgucuccugcuacggcaaaaccaaaugcacggccucuaacaaaaaccgcggcaucaucaaaaccuucucaaacggaugcgacuacgucagcaacaaaggcguagauaccgucucugucggcaacacacuguacugcguaaacaagcaagaaggaaaaucccucuacguaaaaggcgaacccaucaucaacuucuacgacccccucguuuuccccucagaugaauuugacgccucgauaucacaagucaacgaaaagauaaaucagucccucgccuucauccgaaaauccgacgaacuccuccacaacguuaacgcaggaaaguccaccacaaacaucaugauaacuacaaucauaauagucauuaucgucauacuccucucccuaaucgccguaggccugcuacucuacugcaaagcccgcucaacccccgucacucucucaaaagaccaacucuccggcaucaauaacaucgccuucucaaacuaaggacuaguggaagcauuuuccuggcugauuaaaagaaauuacucagcuauggucaucuguuccuguuagaaggcuaugcagcauauuauauacuaugcgcauguuaugaaaugcauaauaaaaaauuuuaaaaaaucuaaaagaucuaaaaaaaaaaaaaaaaaaaaaaaaaaaaaaaaaaaaaaaaaaaaaaaaaaaaaaaaaaaaaaaaugcaucccccccccccccccccccccccccccccccaaaggcucuuuucagagccaccagaauu

SEQ ID NO: 4693 - RNA, 1983 nt, Artificial Sequence
  mRNA product Design c-3 comprising derived and/or modified sequence from HRSV(A2)__F_DSCav1_mut4 (opt1)
gggagaguccgcucagccagguugcagaagcggcuuagcguguguccuaaucuucucucugcguguagguaggccugugccgcaaacaagcuuaccauggagcugcucauccugaaggccaacgccaucaccaccauccugacggcggugaccuucugcuucgccagcggccagaacaucaccgaggaguucuaccaguccacgugcagcgccgucuccaagggguaccucagcgcccugcggaccggcugguacaccuccgugaucaccaucgagcugagcaacaucaaggagaacaagugcaacgggaccgacgccaaggugaagcucaucaagcaggagcuggacaaguacaagaacgcggucacggagcugcagcuccugaugcaguccaccccggcaaccggcuccggcuccgccaucugcagcggcgucgccgugugcaaggugcugcaccucgagggggaggucaacaagaucaagagcgcccugcuguccaccaacaaggccguggugagccucuccaacggcgucagcgugcugaccuucaaggugcuggaccucaagaacuacaucgacaagcagcugcugcccauccugaacaagcagagcugcuccaucagcaacaucgagacggugaucgaguuccagcagaagaacaaccggcuccuggagaucacccgcgaguucagcgugaacgccggggucaccacccccguguccacguacaugcugaccaacagcgagcuccugucccugaucaacgacaugccgaucaccaacgaccagaagaagcucaugagcaacaacgugcagaucguccggcagcaguccuacagcaucaugugcaucaucaaggaggaggugcuggcguacgugguccagcugccccucuacggcgugaucgacacccccugcuggaagcugcacacgagcccccugugcaccaccaacaccaaggagggguccaacaucugccucacgcgcaccgaccggggcugguacugcgacaacgccggcagcgucuccuucuucccgcaggccgagaccugcaaggugcagagcaaccgcguguucugcgacaccaugaacucccggacgcugcccagcgagguaaaccucugcaacgucgacaucuucaaccccaaguacgacugcaagaucaugaccuccaagaccgacgugagcuccagcgugaucaccucccugggggccaucgucagcugcuacggcaagacgaagugcaccgccagcaacaagaaccgggggaucaucaagaccuucuccaacggcugcgacuacgugagcaacaagggcguggacaccguguccgucgggaacacccuguacugcgugaacaagcaggagggcaagagccucuacgugaagggggagcccaucaucaacuucuacgacccgcuggucuuccccuccgacgaguucgacgcgagcaucucccaggugaacgagaagaucaaccagagccuggccuucauccgcaaguccgacgagcugcuccacaacgugaacgccggcaagagcacgaccaacaucaugaucaccaccaucaucaucgucaucaucgugauccugcugucccucaucgccguggggcugcugcucuacugcaaggcccggagcacgcccgucacccuguccaaggaccagcugagcggcaucaacaacaucgcguucuccaacugaggacuaguacuggcugcaucucccuuuccucuguccuccauccuucucccaggauggugaagggggaccugguacccagugauccccaccccaggauccuaaaucaugacuuaccugcuaauaaaaacucauuggaaaagugagaagaucuaaaaaaaaaaaaaaaaaaaaaaaaaaaaaaaaaaaaaaaaaaaaaaaaaaaaaaaaaaaaaaaaugcaucccccccccccccccccccccccccccccccaaaggcucuuuucagagccaccagaauu

SEQ ID NO: 4694 - RNA, 1983 nt, Artificial Sequence
  mRNA product Design c-3 comprising derived and/or modified sequence from HRSV(A2)__F_DSCav1_mut4 (opt1)
gggagaguccgcucagccagguugcagaagcggcuuagcguguguccuaaucuucucucugcguguagguaggccugugccgcaaacaagcuuaccauggagcugcucauccugaaggccaacgccaucaccaccauccugacggcggugaccuucugcuucgccagcggccagaacaucaccgaggaguucuaccaguccacgugcagcgccgucuccaagggguaccucagcgcccugcgcaccggcugguacaccuccgugaucaccaucgagcugagcaacaucaaggagaacaagugcaacgggaccgacgccaaggugaagcucaucaagcaggagcuggacaaguacaagaacgcggucacggagcugcagcuccugaugcaguccacccccgccaccggcagcggguccgccaucugcagcggcguggccgugugcaagguccugcaccucgagggcgaggugaacaagaucaaguccgcgcugcugagcaccaacaaggccguggucucccucagcaacgggguguccgugcugacguucaagguccuggaccucaagaacuacaucgacaagcagcugcugccgauccucaacaagcagagcugcuccaucagcaacaucgagaccgugaucgaguuccagcagaagaacaaccggcugcuggagaucacccgcgaguucuccgugaacgccggcgucaccacgcccgugagcaccuacaugcucaccaacagcgagcugcugucccucaucaacgacaugcccaucaccaacgaccagaagaagcugaugagcaacaacgugcagaucguccggcagcaguccuacagcaucaugugcaucaucaaggaggaggugcuggccuacgugguccagcucccccuguacggggugaucgacacgccgugcuggaagcugcacaccagcccccucugcaccaccaacacgaaggagggcuccaacaucugccugacccgcaccgaccgggggugguacugcgacaacgccggcuccgugagcuucuucccccaggcggagaccugcaagguccaguccaaccgcguguucugcgacacgaugaacagccggacccuccccuccgaggucaaccugugcaacguggacaucuucaacccgaaguacgacugcaagaucaugaccagcaagaccgacguguccagcuccgucaucacgagccugggcgccaucguguccugcuacgggaagaccaagugcaccgccagcaacaagaaccggggcaucaucaagaccuucuccaacgggugcgacuacgugagcaacaagggcgucgacacggugagcgugggcaacacccucuacugcgucaacaagcaggaggggaagucccuguacgugaagggcgagcccaucaucaacuucuacgacccccugguguuccccagcgacgaguucgacgccuccaucagccaggucaacgagaagaucaaccagucccucgccuucauccgcaagagcgacgagcugcugcacaacgugaacgcggggaaguccaccaccaacaucaugaucaccacgaucaucaucgugaucaucgucauccuccugagccugaucgccgugggccuccugcuguacugcaaggcccgguccaccccggugacccugagcaaggaccagcucuccgggaucaacaacaucgccuucagcaacugaggacuaguacuggcugcaucucccuuuccucuguccuccauccuucucccaggauggugaagggggaccugguacccagugauccccaccccaggauccuaaaucaugacuuaccugcuaauaaaaacucauuggaaaagugagaagaucuaaaaaaaaaaaaaaaaaaaaaaaaaaaaaaaaaaaaaaaaaaaaaaaaaaaaaaaaaaaaaaaaugcaucccccccccccccccccccccccccccccccaaaggcucuuuucagagccaccagaauu

SEQ ID NO: 4695 - RNA, 1983 nt, Artificial Sequence
  mRNA product Design c-3 comprising derived and/or modified sequence from HRSV(A2)__F_DSCav1_mut4 (opt2)
gggagaguccgcucagccagguugcagaagcggcuuagcguguguccuaaucuucucucugcguguagguaggccugugccgcaaacaagcuuaccauggagcuccucauccucaaggccaacgccaucaccaccauccucaccgccgucaccuucugcuucgccuccggccagaacaucaccgaggaguucuaccaguccaccugcuccgccgucuccaagggcuaccucuccgcccuccgcaccggcugguacaccuccgucaucaccaucgagcucuccaacaucaaggagaacaagugcaacggcaccgacgccaaggucaagcucaucaagcaggagcucgacaaguacaagaacgccgucaccgagcuccagcuccucaugcaguccacccccgccaccggcuccggcuccgccaucugcuccggcgucgccgucugcaagguccuccaccucgagggcgaggucaacaagaucaaguccgcccuccucuccaccaacaaggccgucgucucccucuccaacggcgucuccguccucaccuucaagguccucgaccucaagaacuacaucgacaagcagcuccuccccauccucaacaagcaguccugcuccaucuccaacaucgagaccgucaucgaguuccagcagaagaacaaccgccuccucgagaucacccgcgaguucuccgucaacgccggcgucaccacccccgucuccaccuacaugcucaccaacuccgagcuccucucccucaucaacgacaugcccaucaccaacgaccagaagaagcucauguccaacaacguccagaucguccgccagcaguccuacuccaucaugugcaucaucaaggaggagguccucgccuacgucguccagcucccccucuacggcgucaucgacacccccugcuggaagcuccacaccuccccccucugcaccaccaacaccaaggagggcuccaacaucugccucacccgcaccgaccgcggcugguacugcgacaacgccggcuccgucuccuucuucccccaggccgagaccugcaagguccaguccaaccgcgucuucugcgacaccaugaacucccgcacccuccccuccgaggucaaccucugcaacgucgacaucuucaaccccaaguacgacugcaagaucaugaccuccaagaccgacgucuccuccuccgucaucaccucccucggcgccaucgucuccugcuacggcaagaccaagugcaccgccuccaacaagaaccgcggcaucaucaagaccuucuccaacggcugcgacuacgucuccaacaagggcgucgacaccgucuccgucggcaacacccucuacugcgucaacaagcaggagggcaagucccucuacgucaagggcgagcccaucaucaacuucuacgacccccucgucuuccccuccgacgaguucgacgccuccaucucccaggucaacgagaagaucaaccagucccucgccuucauccgcaaguccgacgagcuccuccacaacgucaacgccggcaaguccaccaccaacaucaugaucaccaccaucaucaucgucaucaucgucauccuccucucccucaucgccgucggccuccuccucuacugcaaggcccgcuccacccccgucacccucuccaaggaccagcucuccggcaucaacaacaucgccuucuccaacugaggacuaguacuggcugcaucucccuuuccucuguccuccauccuucucccaggauggugaagggggaccugguacccagugauccccaccccaggauccuaaaucaugacuuaccugcuaauaaaaacucauuggaaaagugagaagaucuaaaaaaaaaaaaaaaaaaaaaaaaaaaaaaaaaaaaaaaaaaaaaaaaaaaaaaaaaaaaaaaaugcaucccccccccccccccccccccccccccccccaaaggcucuuuucagagccaccagaauu

SEQ ID NO: 4696 - RNA, 1983 nt, Artificial Sequence
  mRNA product Design c-3 comprising derived and/or modified sequence from HRSV(A2)__F_DSCav1_mut4 (opt3)
gggagaguccgcucagccagguugcagaagcggcuuagcguguguccuaaucuucucucugcguguagguaggccugugccgcaaacaagcuuaccauggagcugcucauccuuaaggccaacgcuauuaccacaauacugacugcagugacguucugcuuugccagcggccagaauaucaccgaagaguucuaccaauccacauguucugcggucucaaaaggguauuugagugcuuuaagaacuggaugguacaccagcguuauuacaaucgaacuguccaacauuaaggagaauaaaugcaacgguaccgacgccaaggugaaacuaaucaagcaggaacucgauaaguauaaaaaugcaguaacugagcugcagcuucugaugcagucuacacccgccaccggcucggggucagcuauauguagcggaguggcagucugcaagguguugcaccucgagggcgaaguuaacaaaaucaagagugcccugcuguccacgaauaaagcuguggucucucucagcaacgguguguccguauuaacuuuuaagguucuggaccuuaagaauuacauugauaaacaauugcugccuauccuaaacaagcagucauguaguauuagcaauaucgagaccgugauagaguuccagcagaaaaacaauaggcuccuggaaauuacacgggaguuuucugucaacgccggggugacuaccccaguguccacauauaugcuuaccaauucagaacuguugagccucaucaacgacaugccgauuacgaacgaucaaaagaaacugaugaguaauaacguccagaucguucgccagcagucuuacuccaucaugugcauuauaaaggaggaaguguuagcguauguagugcaacugccccucuacggagucaucgacacuccuuguuggaaacuucauacaagcccacugugcaccacuaauacaaaggagggcucgaacauuuguuugacccgaacggaucguggcugguacugcgacaaugcagggucuguguccuucuuuccccaggccgaaaccuguaagguucagucaaacagaguguucugcgauacaaugaauaguagaacucugccuagcgaggucaaccucugcaauguggacaucuuuaacccaaaauaugauuguaagauaaugaccuccaaaacagacguaucuagcucaguuauuaccagucugggagcuaucguguccugcuacgguaagacuaaauguacagccagcaauaagaacaggggcaucauuaagaccuucucuaaugggugcgauuaugucucaaacaaaggaguggacacugucagugugggcaauacgcuuuacuguguuaacaagcaagaggguaaaagccuguaugugaagggggaacccaucauuaacuuuuacgacccuuugguauucccauccgaugaguuugacgcaucuauaucgcaggucaaugagaaaaucaaccagagccucgcuuucauucggaaguccgaugaacuguuacacaaugugaacgccggaaagucaacaaccaauaucaugaucacuaccauuauaaucguuauuaucgugauucugcuaagucucaucgcggucggccugcuuuuguauugcaaagcccgcucuacaccggugacccugagcaaggaccagcucuccggcauaaacaauaucgcauucucaaacugaggacuaguacuggcugcaucucccuuuccucuguccuccauccuucucccaggauggugaagggggaccugguacccagugauccccaccccaggauccuaaaucaugacuuaccugcuaauaaaaacucauuggaaaagugagaagaucuaaaaaaaaaaaaaaaaaaaaaaaaaaaaaaaaaaaaaaaaaaaaaaaaaaaaaaaaaaaaaaaaugcaucccccccccccccccccccccccccccccccaaaggcucuuuucagagccaccagaauu

SEQ ID NO: 4697 - RNA, 1983 nt, Artificial Sequence
  mRNA product Design c-3 comprising derived and/or modified sequence from HRSV(A2)__F_DSCav1_mut4 (opt4)
gggagaguccgcucagccagguugcagaagcggcuuagcguguguccuaaucuucucucugcguguagguaggccugugccgcaaacaagcuuaccauggagcugcugauccugaaggccaacgccaucaccaccauccugaccgccgugaccuucugcuucgccagcggccagaacaucaccgaggaguucuaccagagcaccugcagcgccgugagcaagggcuaccugagcgcccugagaaccggcugguacaccagcgugaucaccaucgagcugagcaacaucaaggagaacaagugcaacggcaccgacgccaaggugaagcugaucaagcaggagcuggacaaguacaagaacgccgugaccgagcugcagcugcugaugcagagcacccccgccaccggcagcggcagcgccaucugcagcggcguggccgugugcaaggugcugcaccuggagggcgaggugaacaagaucaagagcgcccugcugagcaccaacaaggccguggugagccugagcaacggcgugagcgugcugaccuucaaggugcuggaccugaagaacuacaucgacaagcagcugcugcccauccugaacaagcagagcugcagcaucagcaacaucgagaccgugaucgaguuccagcagaagaacaacagacugcuggagaucaccagagaguucagcgugaacgccggcgugaccacccccgugagcaccuacaugcugaccaacagcgagcugcugagccugaucaacgacaugcccaucaccaacgaccagaagaagcugaugagcaacaacgugcagaucgugagacagcagagcuacagcaucaugugcaucaucaaggaggaggugcuggccuacguggugcagcugccccuguacggcgugaucgacacccccugcuggaagcugcacaccagcccccugugcaccaccaacaccaaggagggcagcaacaucugccugaccagaaccgacagaggcugguacugcgacaacgccggcagcgugagcuucuucccccaggccgagaccugcaaggugcagagcaacagaguguucugcgacaccaugaacagcagaacccugcccagcgaggugaaccugugcaacguggacaucuucaaccccaaguacgacugcaagaucaugaccagcaagaccgacgugagcagcagcgugaucaccagccugggcgccaucgugagcugcuacggcaagaccaagugcaccgccagcaacaagaacagaggcaucaucaagaccuucagcaacggcugcgacuacgugagcaacaagggcguggacaccgugagcgugggcaacacccuguacugcgugaacaagcaggagggcaagagccuguacgugaagggcgagcccaucaucaacuucuacgacccccugguguuccccagcgacgaguucgacgccagcaucagccaggugaacgagaagaucaaccagagccuggccuucaucagaaagagcgacgagcugcugcacaacgugaacgccggcaagagcaccaccaacaucaugaucaccaccaucaucaucgugaucaucgugauccugcugagccugaucgccgugggccugcugcuguacugcaaggccagaagcacccccgugacccugagcaaggaccagcugagcggcaucaacaacaucgccuucagcaacugaggacuaguacuggcugcaucucccuuuccucuguccuccauccuucucccaggauggugaagggggaccugguacccagugauccccaccccaggauccuaaaucaugacuuaccugcuaauaaaaacucauuggaaaagugagaagaucuaaaaaaaaaaaaaaaaaaaaaaaaaaaaaaaaaaaaaaaaaaaaaaaaaaaaaaaaaaaaaaaaugcaucccccccccccccccccccccccccccccccaaaggcucuuuucagagccaccagaauu

SEQ ID NO: 4698 - RNA, 1983 nt, Artificial Sequence
  mRNA product Design c-3 comprising derived and/or modified sequence from HRSV(A2)__F_DSCav1_mut4 (opt5)
gggagaguccgcucagccagguugcagaagcggcuuagcguguguccuaaucuucucucugcguguagguaggccugugccgcaaacaagcuuaccauggagcugcucauccugaaggccaacgcuauuaccacaauccuuacggccgugaccuucugcuuugcgagcggccagaauauuacagaagaguucuaccaauccaccuguucugcugucagcaaaggguaucuguccgcccucagaacaggaugguacaccucuguuaucacaauugaacugagcaacaucaaggagaauaaaugcaacggcaccgacgccaaggugaaacuuaucaagcaggaacuggauaaguauaaaaaugcugugacggagcuccagcugcugaugcaguccacccccgccacagggucuggaagcgcuauuuguuccggcgucgccgugugcaagguucuccaccuggagggggaagugaacaaaaucaagagcgcgcuucugucuaccaauaaagccgucgugucccucagcaacggaguuucugugcugacauuuaagguccuugaccugaagaauuacauugauaaacaacuccugccuauccugaacaagcaguccuguagcauuucuaauaucgagaccgugauugaguuccagcagaaaaacaaucggcuccuggaaaucacgcgcgaguuuuccgugaacgcuggcgucacaaccccgguuagcacauauaugcuuaccaauuccgaacugcucucucugaucaacgacaugcccauuaccaacgaucaaaagaaacuuaugagcaauaacgugcagaucgugagacagcaguccuacagcauuaugugcaucauuaaggaggaaguccuggccuaugugguucaacucccucuguacggcgugaucgacacacccuguuggaaacugcauacgucuccucucugcaccacaaauaccaaggagggguccaacaucugucugacacggaccgaucgcggaugguacugcgacaaugcuggcagcgucucuuucuuuccccaggccgaaacguguaaggugcagagcaacagaguuuucugcgauacaaugaacuccagaacccugccuucugaggugaaucucugcaaugucgacauuuuuaacccgaaauaugauuguaagaucaugaccagcaaaacagacguguccagcucugucauuaccucccugggggcgaucgugagcugcuacggaaagacaaaauguacggccucuaauaagaaccggggcauuaucaagaccuucuccaaugggugcgauuauguuagcaacaaaggaguggacacagucuccgugggcaauacccuuuacuguguuaacaagcaagagggcaaaucucuguaugugaagggggaacccaucauuaacuuuuacgacccucucgucuuccccagcgaugaguuugacgcuuccaucucucaggugaaugagaaaauuaaccagagccuggccuucauccgcaaguccgaugaacugcuccacaaugugaacgcuggaaagagcacaaccaauauuaugaucacgaccauuaucaucguuauuaucgucauucugcuuucucugaucgccgugggccuccugcuguauugcaaagccagauccacaccugugacccuuagcaaggaccagcucucugggauuaacaauaucgcuuucuccaacugaggacuaguacuggcugcaucucccuuuccucuguccuccauccuucucccaggauggugaagggggaccugguacccagugauccccaccccaggauccuaaaucaugacuuaccugcuaauaaaaacucauuggaaaagugagaagaucuaaaaaaaaaaaaaaaaaaaaaaaaaaaaaaaaaaaaaaaaaaaaaaaaaaaaaaaaaaaaaaaaugcaucccccccccccccccccccccccccccccccaaaggcucuuuucagagccaccagaauu

SEQ ID NO: 4699 - RNA, 1983 nt, Artificial Sequence
  mRNA product Design c-3 comprising derived and/or modified sequence from HRSV(A2)__F_DSCav1_mut4 (opt6)
gggagaguccgcucagccagguugcagaagcggcuuagcguguguccuaaucuucucucugcguguagguaggccugugccgcaaacaagcuuaccauggaacuucuaauacucaaagccaacgcaauaacaacaauauuaacagccguaacauuuugcuucgcaucaggucaaaacauaacagaagaguucuaccaauccacaugcucagcaguaucaaaaggauauuuaagugcucuaagaacaggaugguacacauccguaauaacaaucgaacuaucaaacauaaaagaaaauaaauguaauggaacagacgccaaaguaaaauuaaucaaacaagaacuagacaaauacaaaaacgcaguuacugaauuacaauuauuaaugcaaucaacaccggccacaggaucuggaucagcaauaugcucaggaguagcagucugcaaaguauuacaccuagaaggggaaguuaauaaaaucaaaucagcauuacuauccaccaacaaagcgguaguuucacucuccaacggcguaucugucuuaacauucaaaguauuagaccuaaaaaacuacauugacaaacaacuacuaccaauccuaaacaaacaaucauguuccauaagcaauauagaaacaguaauagaauuucaacaaaaaaacaacagacuauuagaaauaacaagagaauuuuccgucaaugcaggaguuacuaccccugucuccaccuauaugcuaaccaauuccgaacucuuaucauuaauaaacgacaugccuaucacaaaugaccaaaaaaaauuaaugagcaacaacguacaaauaguacgacaacaaucauacucaaucaugugcauaauaaaagaagaaguccuagcauacguuguacaacuaccacuauacggagucauagauaccccaugcuggaaacuccauacaagcccacuaugcacuacaaacacaaaagaaggcucuaauauaugucuaacaagaacagaccgaggaugguacugcgauaaugccggcucagucucauucuuuccgcaagccgaaacuuguaaaguacaaaguaacagaguauuuugugacaccaugaacucaagaacccucccaagcgaagucaaucuaugcaacguugauauauucaaucccaaauacgacugcaaaaucaugaccucaaaaacagacgucagcucauccguuauaacaucacuaggagccaucguaucuugcuauggaaaaacaaaaugcacagcaagcaauaaaaacagaggcauaauaaaaacauucucaaauggaugcgacuacguaucaaacaaaggagucgacacaguuuccguaggaaacacuuuauacugcguaaacaaacaagaaggaaaaucauuauacgucaaaggugaaccaauaauaaacuucuacgauccacuuguauucccaucagacgaauuugacgcaucaauuucacaaguaaacgaaaaaauaaaccaaucacucgcauucauaagaaaaucagaugaacuacuacauaacguaaacgcaggaaaauccacaacaaacaucaugauaacaaccaucauaaucguaauaaucguaauacuauuaucccuaauugcaguaggauuacucuuauauugcaaagcaagaucaacaccaguaacccucaguaaagaccaacuauccggaauaaauaacaucgcauucucaaacuaaggacuaguacuggcugcaucucccuuuccucuguccuccauccuucucccaggauggugaagggggaccugguacccagugauccccaccccaggauccuaaaucaugacuuaccugcuaauaaaaacucauuggaaaagugagaagaucuaaaaaaaaaaaaaaaaaaaaaaaaaaaaaaaaaaaaaaaaaaaaaaaaaaaaaaaaaaaaaaaaugcaucccccccccccccccccccccccccccccccaaaggcucuuuucagagccaccagaauu

SEQ ID NO: 4700 - RNA, 1983 nt, Artificial Sequence
  mRNA product Design c-3 comprising derived and/or modified sequence from HRSV(A2)__F_DSCav1_mut4 (opt11)
gggagaguccgcucagccagguugcagaagcggcuuagcguguguccuaaucuucucucugcguguagguaggccugugccgcaaacaagcuuaccauggaacugcucauccucaaagccaacgccaucaccaccauucuuaccgccgucacauucugcuucgccucaggccaaaacaucaccgaagaauuuuaccaauccacuuguucagccgucucaaaaggauaccuaucagcccuccguaccggcugguacaccucggucauaacaauagaacucuccaacauaaaagaaaacaaaugcaacggcaccgacgccaaggucaaacugauaaaacaagaacuugauaaauacaaaaacgccgucacugaacuccaacuccucaugcaauccacucccgcuacuggcucuggcuccgccaucugcucuggcgucgccgucuguaaaguacuccaccucgaaggggaagucaacaaaaucaaaucagcccuccuuagcaccaacaaggccgucgucucccucucaaacggagucagcguccucaccuucaagguccucgaccucaagaacuacaucgacaaacaacuccugcccauccuaaauaaacaauccugcucuaucuccaauaucgaaaccguuauagaguuccaacagaaaaacaaccgacuccucgaaaucacccgcgaguucuccgucaacgcaggcgucaccaccccugugucaaccuacaugcucaccaacagcgaacuacucucacucaucaaugacaugcccaucaccaacgaccaaaagaaacucauguccaacaacguccaaaucguacgucaacaauccuacagcaucaugugcaucauaaaagaagaaguccucgccuacgucguccaacuuccccucuacggcgucauagacacccccugcuggaaacugcauaccucaccccuaugcaccaccaacacuaaagaaggcuccaacaucugccucacccgcacggaccgcggcugguacugcgacaacgccggcuccgucuccuucuucccccaagccgaaacuuguaaaguccaauccaacagagucuucugcgacaccaugaacucuagaacgcugccauccgagguaaaccuaugcaacgucgacaucuucaaucccaaauacgacugcaagaucaugaccucaaaaaccgacguauccuccucaguaaucaccagucucggagcuaucgucuccugcuacggcaaaaccaaaugcacggccucuaacaaaaaccgcggcaucaucaaaaccuucucaaacggaugcgacuacgucagcaacaaaggcguagauaccgucucugucggcaacacacuguacugcguaaacaagcaagaaggaaaaucccucuacguaaaaggcgaacccaucaucaacuucuacgacccccucguuuuccccucagaugaauuugacgccucgauaucacaagucaacgaaaagauaaaucagucccucgccuucauccgaaaauccgacgaacuccuccacaacguuaacgcaggaaaguccaccacaaacaucaugauaacuacaaucauaauagucauuaucgucauacuccucucccuaaucgccguaggccugcuacucuacugcaaagcccgcucaacccccgucacucucucaaaagaccaacucuccggcaucaauaacaucgccuucucaaacuaaggacuaguacuggcugcaucucccuuuccucuguccuccauccuucucccaggauggugaagggggaccugguacccagugauccccaccccaggauccuaaaucaugacuuaccugcuaauaaaaacucauuggaaaagugagaagaucuaaaaaaaaaaaaaaaaaaaaaaaaaaaaaaaaaaaaaaaaaaaaaaaaaaaaaaaaaaaaaaaaugcaucccccccccccccccccccccccccccccccaaaggcucuuuucagagccaccagaauu

SEQ ID NO: 4701 - RNA, 1979 nt, Artificial Sequence
  mRNA product Design c-4 comprising derived and/or modified sequence from HRSV(A2)__F_DSCav1_mut4 (opt1)
gggagaguccgcucagccagguugcagaagcggcuuagcguguguccuaaucuucucucugcguguagguaggccugugccgcaaacaagcuuaccauggagcugcucauccugaaggccaacgccaucaccaccauccugacggcggugaccuucugcuucgccagcggccagaacaucaccgaggaguucuaccaguccacgugcagcgccgucuccaagggguaccucagcgcccugcggaccggcugguacaccuccgugaucaccaucgagcugagcaacaucaaggagaacaagugcaacgggaccgacgccaaggugaagcucaucaagcaggagcuggacaaguacaagaacgcggucacggagcugcagcuccugaugcaguccaccccggcaaccggcuccggcuccgccaucugcagcggcgucgccgugugcaaggugcugcaccucgagggggaggucaacaagaucaagagcgcccugcuguccaccaacaaggccguggugagccucuccaacggcgucagcgugcugaccuucaaggugcuggaccucaagaacuacaucgacaagcagcugcugcccauccugaacaagcagagcugcuccaucagcaacaucgagacggugaucgaguuccagcagaagaacaaccggcuccuggagaucacccgcgaguucagcgugaacgccggggucaccacccccguguccacguacaugcugaccaacagcgagcuccugucccugaucaacgacaugccgaucaccaacgaccagaagaagcucaugagcaacaacgugcagaucguccggcagcaguccuacagcaucaugugcaucaucaaggaggaggugcuggcguacgugguccagcugccccucuacggcgugaucgacacccccugcuggaagcugcacacgagcccccugugcaccaccaacaccaaggagggguccaacaucugccucacgcgcaccgaccggggcugguacugcgacaacgccggcagcgucuccuucuucccgcaggccgagaccugcaaggugcagagcaaccgcguguucugcgacaccaugaacucccggacgcugcccagcgagguaaaccucugcaacgucgacaucuucaaccccaaguacgacugcaagaucaugaccuccaagaccgacgugagcuccagcgugaucaccucccugggggccaucgucagcugcuacggcaagacgaagugcaccgccagcaacaagaaccgggggaucaucaagaccuucuccaacggcugcgacuacgugagcaacaagggcguggacaccguguccgucgggaacacccuguacugcgugaacaagcaggagggcaagagccucuacgugaagggggagcccaucaucaacuucuacgacccgcuggucuuccccuccgacgaguucgacgcgagcaucucccaggugaacgagaagaucaaccagagccuggccuucauccgcaaguccgacgagcugcuccacaacgugaacgccggcaagagcacgaccaacaucaugaucaccaccaucaucaucgucaucaucgugauccugcugucccucaucgccguggggcugcugcucuacugcaaggcccggagcacgcccgucacccuguccaaggaccagcugagcggcaucaacaacaucgcguucuccaacugaggacuaguggaagcauuuuccuggcugauuaaaagaaauuacucagcuauggucaucuguuccuguuagaaggcuaugcagcauauuauauacuaugcgcauguuaugaaaugcauaauaaaaaauuuuaaaaaaucuaaaagaucuaaaaaaaaaaaaaaaaaaaaaaaaaaaaaaaaaaaaaaaaaaaaaaaaaaaaaaaaaaaaaaaaugcaucccccccccccccccccccccccccccccccaaaggcucuuuucagagccaccagaauu

SEQ ID NO: 4702 - RNA, 1979 nt, Artificial Sequence
  mRNA product Design c-4 comprising derived and/or modified sequence from HRSV(A2)__F_DSCav1_mut4 (opt1)
gggagaguccgcucagccagguugcagaagcggcuuagcguguguccuaaucuucucucugcguguagguaggccugugccgcaaacaagcuuaccauggagcugcucauccugaaggccaacgccaucaccaccauccugacggcggugaccuucugcuucgccagcggccagaacaucaccgaggaguucuaccaguccacgugcagcgccgucuccaagggguaccucagcgcccugcgcaccggcugguacaccuccgugaucaccaucgagcugagcaacaucaaggagaacaagugcaacgggaccgacgccaaggugaagcucaucaagcaggagcuggacaaguacaagaacgcggucacggagcugcagcuccugaugcaguccacccccgccaccggcagcggguccgccaucugcagcggcguggccgugugcaagguccugcaccucgagggcgaggugaacaagaucaaguccgcgcugcugagcaccaacaaggccguggucucccucagcaacgggguguccgugcugacguucaagguccuggaccucaagaacuacaucgacaagcagcugcugccgauccucaacaagcagagcugcuccaucagcaacaucgagaccgugaucgaguuccagcagaagaacaaccggcugcuggagaucacccgcgaguucuccgugaacgccggcgucaccacgcccgugagcaccuacaugcucaccaacagcgagcugcugucccucaucaacgacaugcccaucaccaacgaccagaagaagcugaugagcaacaacgugcagaucguccggcagcaguccuacagcaucaugugcaucaucaaggaggaggugcuggccuacgugguccagcucccccuguacggggugaucgacacgccgugcuggaagcugcacaccagcccccucugcaccaccaacacgaaggagggcuccaacaucugccugacccgcaccgaccgggggugguacugcgacaacgccggcuccgugagcuucuucccccaggcggagaccugcaagguccaguccaaccgcguguucugcgacacgaugaacagccggacccuccccuccgaggucaaccugugcaacguggacaucuucaacccgaaguacgacugcaagaucaugaccagcaagaccgacguguccagcuccgucaucacgagccugggcgccaucguguccugcuacgggaagaccaagugcaccgccagcaacaagaaccggggcaucaucaagaccuucuccaacgggugcgacuacgugagcaacaagggcgucgacacggugagcgugggcaacacccucuacugcgucaacaagcaggaggggaagucccuguacgugaagggcgagcccaucaucaacuucuacgacccccugguguuccccagcgacgaguucgacgccuccaucagccaggucaacgagaagaucaaccagucccucgccuucauccgcaagagcgacgagcugcugcacaacgugaacgcggggaaguccaccaccaacaucaugaucaccacgaucaucaucgugaucaucgucauccuccugagccugaucgccgugggccuccugcuguacugcaaggcccgguccaccccggugacccugagcaaggaccagcucuccgggaucaacaacaucgccuucagcaacugaggacuaguggaagcauuuuccuggcugauuaaaagaaauuacucagcuauggucaucuguuccuguuagaaggcuaugcagcauauuauauacuaugcgcauguuaugaaaugcauaauaaaaaauuuuaaaaaaucuaaaagaucuaaaaaaaaaaaaaaaaaaaaaaaaaaaaaaaaaaaaaaaaaaaaaaaaaaaaaaaaaaaaaaaaugcaucccccccccccccccccccccccccccccccaaaggcucuuuucagagccaccagaauu

SEQ ID NO: 4703 - RNA, 1979 nt, Artificial Sequence
  mRNA product Design c-4 comprising derived and/or modified sequence from HRSV(A2)__F_DSCav1_mut4 (opt2)
gggagaguccgcucagccagguugcagaagcggcuuagcguguguccuaaucuucucucugcguguagguaggccugugccgcaaacaagcuuaccauggagcuccucauccucaaggccaacgccaucaccaccauccucaccgccgucaccuucugcuucgccuccggccagaacaucaccgaggaguucuaccaguccaccugcuccgccgucuccaagggcuaccucuccgcccuccgcaccggcugguacaccuccgucaucaccaucgagcucuccaacaucaaggagaacaagugcaacggcaccgacgccaaggucaagcucaucaagcaggagcucgacaaguacaagaacgccgucaccgagcuccagcuccucaugcaguccacccccgccaccggcuccggcuccgccaucugcuccggcgucgccgucugcaagguccuccaccucgagggcgaggucaacaagaucaaguccgcccuccucuccaccaacaaggccgucgucucccucuccaacggcgucuccguccucaccuucaagguccucgaccucaagaacuacaucgacaagcagcuccuccccauccucaacaagcaguccugcuccaucuccaacaucgagaccgucaucgaguuccagcagaagaacaaccgccuccucgagaucacccgcgaguucuccgucaacgccggcgucaccacccccgucuccaccuacaugcucaccaacuccgagcuccucucccucaucaacgacaugcccaucaccaacgaccagaagaagcucauguccaacaacguccagaucguccgccagcaguccuacuccaucaugugcaucaucaaggaggagguccucgccuacgucguccagcucccccucuacggcgucaucgacacccccugcuggaagcuccacaccuccccccucugcaccaccaacaccaaggagggcuccaacaucugccucacccgcaccgaccgcggcugguacugcgacaacgccggcuccgucuccuucuucccccaggccgagaccugcaagguccaguccaaccgcgucuucugcgacaccaugaacucccgcacccuccccuccgaggucaaccucugcaacgucgacaucuucaaccccaaguacgacugcaagaucaugaccuccaagaccgacgucuccuccuccgucaucaccucccucggcgccaucgucuccugcuacggcaagaccaagugcaccgccuccaacaagaaccgcggcaucaucaagaccuucuccaacggcugcgacuacgucuccaacaagggcgucgacaccgucuccgucggcaacacccucuacugcgucaacaagcaggagggcaagucccucuacgucaagggcgagcccaucaucaacuucuacgacccccucgucuuccccuccgacgaguucgacgccuccaucucccaggucaacgagaagaucaaccagucccucgccuucauccgcaaguccgacgagcuccuccacaacgucaacgccggcaaguccaccaccaacaucaugaucaccaccaucaucaucgucaucaucgucauccuccucucccucaucgccgucggccuccuccucuacugcaaggcccgcuccacccccgucacccucuccaaggaccagcucuccggcaucaacaacaucgccuucuccaacugaggacuaguggaagcauuuuccuggcugauuaaaagaaauuacucagcuauggucaucuguuccuguuagaaggcuaugcagcauauuauauacuaugcgcauguuaugaaaugcauaauaaaaaauuuuaaaaaaucuaaaagaucuaaaaaaaaaaaaaaaaaaaaaaaaaaaaaaaaaaaaaaaaaaaaaaaaaaaaaaaaaaaaaaaaugcaucccccccccccccccccccccccccccccccaaaggcucuuuucagagccaccagaauu

SEQ ID NO: 4704 - RNA, 1979 nt, Artificial Sequence
  mRNA product Design c-4 comprising derived and/or modified sequence from HRSV(A2)__F_DSCav1_mut4 (opt3)
gggagaguccgcucagccagguugcagaagcggcuuagcguguguccuaaucuucucucugcguguagguaggccugugccgcaaacaagcuuaccauggagcugcucauccuuaaggccaacgcuauuaccacaauacugacugcagugacguucugcuuugccagcggccagaauaucaccgaagaguucuaccaauccacauguucugcggucucaaaaggguauuugagugcuuuaagaacuggaugguacaccagcguuauuacaaucgaacuguccaacauuaaggagaauaaaugcaacgguaccgacgccaaggugaaacuaaucaagcaggaacucgauaaguauaaaaaugcaguaacugagcugcagcuucugaugcagucuacacccgccaccggcucggggucagcuauauguagcggaguggcagucugcaagguguugcaccucgagggcgaaguuaacaaaaucaagagugcccugcuguccacgaauaaagcuguggucucucucagcaacgguguguccguauuaacuuuuaagguucuggaccuuaagaauuacauugauaaacaauugcugccuauccuaaacaagcagucauguaguauuagcaauaucgagaccgugauagaguuccagcagaaaaacaauaggcuccuggaaauuacacgggaguuuucugucaacgccggggugacuaccccaguguccacauauaugcuuaccaauucagaacuguugagccucaucaacgacaugccgauuacgaacgaucaaaagaaacugaugaguaauaacguccagaucguucgccagcagucuuacuccaucaugugcauuauaaaggaggaaguguuagcguauguagugcaacugccccucuacggagucaucgacacuccuuguuggaaacuucauacaagcccacugugcaccacuaauacaaaggagggcucgaacauuuguuugacccgaacggaucguggcugguacugcgacaaugcagggucuguguccuucuuuccccaggccgaaaccuguaagguucagucaaacagaguguucugcgauacaaugaauaguagaacucugccuagcgaggucaaccucugcaauguggacaucuuuaacccaaaauaugauuguaagauaaugaccuccaaaacagacguaucuagcucaguuauuaccagucugggagcuaucguguccugcuacgguaagacuaaauguacagccagcaauaagaacaggggcaucauuaagaccuucucuaaugggugcgauuaugucucaaacaaaggaguggacacugucagugugggcaauacgcuuuacuguguuaacaagcaagaggguaaaagccuguaugugaagggggaacccaucauuaacuuuuacgacccuuugguauucccauccgaugaguuugacgcaucuauaucgcaggucaaugagaaaaucaaccagagccucgcuuucauucggaaguccgaugaacuguuacacaaugugaacgccggaaagucaacaaccaauaucaugaucacuaccauuauaaucguuauuaucgugauucugcuaagucucaucgcggucggccugcuuuuguauugcaaagcccgcucuacaccggugacccugagcaaggaccagcucuccggcauaaacaauaucgcauucucaaacugaggacuaguggaagcauuuuccuggcugauuaaaagaaauuacucagcuauggucaucuguuccuguuagaaggcuaugcagcauauuauauacuaugcgcauguuaugaaaugcauaauaaaaaauuuuaaaaaaucuaaaagaucuaaaaaaaaaaaaaaaaaaaaaaaaaaaaaaaaaaaaaaaaaaaaaaaaaaaaaaaaaaaaaaaaugcaucccccccccccccccccccccccccccccccaaaggcucuuuucagagccaccagaauu

SEQ ID NO: 4705 - RNA, 1979 nt, Artificial Sequence
  mRNA product Design c-4 comprising derived and/or modified sequence from HRSV(A2)__F_DSCav1_mut4 (opt4)
gggagaguccgcucagccagguugcagaagcggcuuagcguguguccuaaucuucucucugcguguagguaggccugugccgcaaacaagcuuaccauggagcugcugauccugaaggccaacgccaucaccaccauccugaccgccgugaccuucugcuucgccagcggccagaacaucaccgaggaguucuaccagagcaccugcagcgccgugagcaagggcuaccugagcgcccugagaaccggcugguacaccagcgugaucaccaucgagcugagcaacaucaaggagaacaagugcaacggcaccgacgccaaggugaagcugaucaagcaggagcuggacaaguacaagaacgccgugaccgagcugcagcugcugaugcagagcacccccgccaccggcagcggcagcgccaucugcagcggcguggccgugugcaaggugcugcaccuggagggcgaggugaacaagaucaagagcgcccugcugagcaccaacaaggccguggugagccugagcaacggcgugagcgugcugaccuucaaggugcuggaccugaagaacuacaucgacaagcagcugcugcccauccugaacaagcagagcugcagcaucagcaacaucgagaccgugaucgaguuccagcagaagaacaacagacugcuggagaucaccagagaguucagcgugaacgccggcgugaccacccccgugagcaccuacaugcugaccaacagcgagcugcugagccugaucaacgacaugcccaucaccaacgaccagaagaagcugaugagcaacaacgugcagaucgugagacagcagagcuacagcaucaugugcaucaucaaggaggaggugcuggccuacguggugcagcugccccuguacggcgugaucgacacccccugcuggaagcugcacaccagcccccugugcaccaccaacaccaaggagggcagcaacaucugccugaccagaaccgacagaggcugguacugcgacaacgccggcagcgugagcuucuucccccaggccgagaccugcaaggugcagagcaacagaguguucugcgacaccaugaacagcagaacccugcccagcgaggugaaccugugcaacguggacaucuucaaccccaaguacgacugcaagaucaugaccagcaagaccgacgugagcagcagcgugaucaccagccugggcgccaucgugagcugcuacggcaagaccaagugcaccgccagcaacaagaacagaggcaucaucaagaccuucagcaacggcugcgacuacgugagcaacaagggcguggacaccgugagcgugggcaacacccuguacugcgugaacaagcaggagggcaagagccuguacgugaagggcgagcccaucaucaacuucuacgacccccugguguuccccagcgacgaguucgacgccagcaucagccaggugaacgagaagaucaaccagagccuggccuucaucagaaagagcgacgagcugcugcacaacgugaacgccggcaagagcaccaccaacaucaugaucaccaccaucaucaucgugaucaucgugauccugcugagccugaucgccgugggccugcugcuguacugcaaggccagaagcacccccgugacccugagcaaggaccagcugagcggcaucaacaacaucgccuucagcaacugaggacuaguggaagcauuuuccuggcugauuaaaagaaauuacucagcuauggucaucuguuccuguuagaaggcuaugcagcauauuauauacuaugcgcauguuaugaaaugcauaauaaaaaauuuuaaaaaaucuaaaagaucuaaaaaaaaaaaaaaaaaaaaaaaaaaaaaaaaaaaaaaaaaaaaaaaaaaaaaaaaaaaaaaaaugcaucccccccccccccccccccccccccccccccaaaggcucuuuucagagccaccagaauu

SEQ ID NO: 4706 - RNA, 1979 nt, Artificial Sequence
  mRNA product Design c-4 comprising derived and/or modified sequence from HRSV(A2)__F_DSCav1_mut4 (opt5)
gggagaguccgcucagccagguugcagaagcggcuuagcguguguccuaaucuucucucugcguguagguaggccugugccgcaaacaagcuuaccauggagcugcucauccugaaggccaacgcuauuaccacaauccuuacggccgugaccuucugcuuugcgagcggccagaauauuacagaagaguucuaccaauccaccuguucugcugucagcaaaggguaucuguccgcccucagaacaggaugguacaccucuguuaucacaauugaacugagcaacaucaaggagaauaaaugcaacggcaccgacgccaaggugaaacuuaucaagcaggaacuggauaaguauaaaaaugcugugacggagcuccagcugcugaugcaguccacccccgccacagggucuggaagcgcuauuuguuccggcgucgccgugugcaagguucuccaccuggagggggaagugaacaaaaucaagagcgcgcuucugucuaccaauaaagccgucgugucccucagcaacggaguuucugugcugacauuuaagguccuugaccugaagaauuacauugauaaacaacuccugccuauccugaacaagcaguccuguagcauuucuaauaucgagaccgugauugaguuccagcagaaaaacaaucggcuccuggaaaucacgcgcgaguuuuccgugaacgcuggcgucacaaccccgguuagcacauauaugcuuaccaauuccgaacugcucucucugaucaacgacaugcccauuaccaacgaucaaaagaaacuuaugagcaauaacgugcagaucgugagacagcaguccuacagcauuaugugcaucauuaaggaggaaguccuggccuaugugguucaacucccucuguacggcgugaucgacacacccuguuggaaacugcauacgucuccucucugcaccacaaauaccaaggagggguccaacaucugucugacacggaccgaucgcggaugguacugcgacaaugcuggcagcgucucuuucuuuccccaggccgaaacguguaaggugcagagcaacagaguuuucugcgauacaaugaacuccagaacccugccuucugaggugaaucucugcaaugucgacauuuuuaacccgaaauaugauuguaagaucaugaccagcaaaacagacguguccagcucugucauuaccucccugggggcgaucgugagcugcuacggaaagacaaaauguacggccucuaauaagaaccggggcauuaucaagaccuucuccaaugggugcgauuauguuagcaacaaaggaguggacacagucuccgugggcaauacccuuuacuguguuaacaagcaagagggcaaaucucuguaugugaagggggaacccaucauuaacuuuuacgacccucucgucuuccccagcgaugaguuugacgcuuccaucucucaggugaaugagaaaauuaaccagagccuggccuucauccgcaaguccgaugaacugcuccacaaugugaacgcuggaaagagcacaaccaauauuaugaucacgaccauuaucaucguuauuaucgucauucugcuuucucugaucgccgugggccuccugcuguauugcaaagccagauccacaccugugacccuuagcaaggaccagcucucugggauuaacaauaucgcuuucuccaacugaggacuaguggaagcauuuuccuggcugauuaaaagaaauuacucagcuauggucaucuguuccuguuagaaggcuaugcagcauauuauauacuaugcgcauguuaugaaaugcauaauaaaaaauuuuaaaaaaucuaaaagaucuaaaaaaaaaaaaaaaaaaaaaaaaaaaaaaaaaaaaaaaaaaaaaaaaaaaaaaaaaaaaaaaaugcaucccccccccccccccccccccccccccccccaaaggcucuuuucagagccaccagaauu

SEQ ID NO: 4707 - RNA, 1979 nt, Artificial Sequence
  mRNA product Design c-4 comprising derived and/or modified sequence from HRSV(A2)__F_DSCav1_mut4 (opt6)
gggagaguccgcucagccagguugcagaagcggcuuagcguguguccuaaucuucucucugcguguagguaggccugugccgcaaacaagcuuaccauggaacuucuaauacucaaagccaacgcaauaacaacaauauuaacagccguaacauuuugcuucgcaucaggucaaaacauaacagaagaguucuaccaauccacaugcucagcaguaucaaaaggauauuuaagugcucuaagaacaggaugguacacauccguaauaacaaucgaacuaucaaacauaaaagaaaauaaauguaauggaacagacgccaaaguaaaauuaaucaaacaagaacuagacaaauacaaaaacgcaguuacugaauuacaauuauuaaugcaaucaacaccggccacaggaucuggaucagcaauaugcucaggaguagcagucugcaaaguauuacaccuagaaggggaaguuaauaaaaucaaaucagcauuacuauccaccaacaaagcgguaguuucacucuccaacggcguaucugucuuaacauucaaaguauuagaccuaaaaaacuacauugacaaacaacuacuaccaauccuaaacaaacaaucauguuccauaagcaauauagaaacaguaauagaauuucaacaaaaaaacaacagacuauuagaaauaacaagagaauuuuccgucaaugcaggaguuacuaccccugucuccaccuauaugcuaaccaauuccgaacucuuaucauuaauaaacgacaugccuaucacaaaugaccaaaaaaaauuaaugagcaacaacguacaaauaguacgacaacaaucauacucaaucaugugcauaauaaaagaagaaguccuagcauacguuguacaacuaccacuauacggagucauagauaccccaugcuggaaacuccauacaagcccacuaugcacuacaaacacaaaagaaggcucuaauauaugucuaacaagaacagaccgaggaugguacugcgauaaugccggcucagucucauucuuuccgcaagccgaaacuuguaaaguacaaaguaacagaguauuuugugacaccaugaacucaagaacccucccaagcgaagucaaucuaugcaacguugauauauucaaucccaaauacgacugcaaaaucaugaccucaaaaacagacgucagcucauccguuauaacaucacuaggagccaucguaucuugcuauggaaaaacaaaaugcacagcaagcaauaaaaacagaggcauaauaaaaacauucucaaauggaugcgacuacguaucaaacaaaggagucgacacaguuuccguaggaaacacuuuauacugcguaaacaaacaagaaggaaaaucauuauacgucaaaggugaaccaauaauaaacuucuacgauccacuuguauucccaucagacgaauuugacgcaucaauuucacaaguaaacgaaaaaauaaaccaaucacucgcauucauaagaaaaucagaugaacuacuacauaacguaaacgcaggaaaauccacaacaaacaucaugauaacaaccaucauaaucguaauaaucguaauacuauuaucccuaauugcaguaggauuacucuuauauugcaaagcaagaucaacaccaguaacccucaguaaagaccaacuauccggaauaaauaacaucgcauucucaaacuaaggacuaguggaagcauuuuccuggcugauuaaaagaaauuacucagcuauggucaucuguuccuguuagaaggcuaugcagcauauuauauacuaugcgcauguuaugaaaugcauaauaaaaaauuuuaaaaaaucuaaaagaucuaaaaaaaaaaaaaaaaaaaaaaaaaaaaaaaaaaaaaaaaaaaaaaaaaaaaaaaaaaaaaaaaugcaucccccccccccccccccccccccccccccccaaaggcucuuuucagagccaccagaauu

SEQ ID NO: 4708 - RNA, 1979 nt, Artificial Sequence
  mRNA product Design c-4 comprising derived and/or modified sequence from HRSV(A2)__F_DSCav1_mut4 (opt11)
gggagaguccgcucagccagguugcagaagcggcuuagcguguguccuaaucuucucucugcguguagguaggccugugccgcaaacaagcuuaccauggaacugcucauccucaaagccaacgccaucaccaccauucuuaccgccgucacauucugcuucgccucaggccaaaacaucaccgaagaauuuuaccaauccacuuguucagccgucucaaaaggauaccuaucagcccuccguaccggcugguacaccucggucauaacaauagaacucuccaacauaaaagaaaacaaaugcaacggcaccgacgccaaggucaaacugauaaaacaagaacuugauaaauacaaaaacgccgucacugaacuccaacuccucaugcaauccacucccgcuacuggcucuggcuccgccaucugcucuggcgucgccgucuguaaaguacuccaccucgaaggggaagucaacaaaaucaaaucagcccuccuuagcaccaacaaggccgucgucucccucucaaacggagucagcguccucaccuucaagguccucgaccucaagaacuacaucgacaaacaacuccugcccauccuaaauaaacaauccugcucuaucuccaauaucgaaaccguuauagaguuccaacagaaaaacaaccgacuccucgaaaucacccgcgaguucuccgucaacgcaggcgucaccaccccugugucaaccuacaugcucaccaacagcgaacuacucucacucaucaaugacaugcccaucaccaacgaccaaaagaaacucauguccaacaacguccaaaucguacgucaacaauccuacagcaucaugugcaucauaaaagaagaaguccucgccuacgucguccaacuuccccucuacggcgucauagacacccccugcuggaaacugcauaccucaccccuaugcaccaccaacacuaaagaaggcuccaacaucugccucacccgcacggaccgcggcugguacugcgacaacgccggcuccgucuccuucuucccccaagccgaaacuuguaaaguccaauccaacagagucuucugcgacaccaugaacucuagaacgcugccauccgagguaaaccuaugcaacgucgacaucuucaaucccaaauacgacugcaagaucaugaccucaaaaaccgacguauccuccucaguaaucaccagucucggagcuaucgucuccugcuacggcaaaaccaaaugcacggccucuaacaaaaaccgcggcaucaucaaaaccuucucaaacggaugcgacuacgucagcaacaaaggcguagauaccgucucugucggcaacacacuguacugcguaaacaagcaagaaggaaaaucccucuacguaaaaggcgaacccaucaucaacuucuacgacccccucguuuuccccucagaugaauuugacgccucgauaucacaagucaacgaaaagauaaaucagucccucgccuucauccgaaaauccgacgaacuccuccacaacguuaacgcaggaaaguccaccacaaacaucaugauaacuacaaucauaauagucauuaucgucauacuccucucccuaaucgccguaggccugcuacucuacugcaaagcccgcucaacccccgucacucucucaaaagaccaacucuccggcaucaauaacaucgccuucucaaacuaaggacuaguggaagcauuuuccuggcugauuaaaagaaauuacucagcuauggucaucuguuccuguuagaaggcuaugcagcauauuauauacuaugcgcauguuaugaaaugcauaauaaaaaauuuuaaaaaaucuaaaagaucuaaaaaaaaaaaaaaaaaaaaaaaaaaaaaaaaaaaaaaaaaaaaaaaaaaaaaaaaaaaaaaaaugcaucccccccccccccccccccccccccccccccaaaggcucuuuucagagccaccagaauu

SEQ ID NO: 4709 - RNA, 1897 nt, Artificial Sequence
  mRNA product Design c-5 comprising derived and/or modified sequence from HRSV(A2)__F_DSCav1_mut4 (opt1)
gggagagcggcucggccauuuugucccagucaguccggaggcugcggcugcagaaguaccgccugcggaguaacugcaaagaagcuuaccauggagcugcucauccugaaggccaacgccaucaccaccauccugacggcggugaccuucugcuucgccagcggccagaacaucaccgaggaguucuaccaguccacgugcagcgccgucuccaagggguaccucagcgcccugcggaccggcugguacaccuccgugaucaccaucgagcugagcaacaucaaggagaacaagugcaacgggaccgacgccaaggugaagcucaucaagcaggagcuggacaaguacaagaacgcggucacggagcugcagcuccugaugcaguccaccccggcaaccggcuccggcuccgccaucugcagcggcgucgccgugugcaaggugcugcaccucgagggggaggucaacaagaucaagagcgcccugcuguccaccaacaaggccguggugagccucuccaacggcgucagcgugcugaccuucaaggugcuggaccucaagaacuacaucgacaagcagcugcugcccauccugaacaagcagagcugcuccaucagcaacaucgagacggugaucgaguuccagcagaagaacaaccggcuccuggagaucacccgcgaguucagcgugaacgccggggucaccacccccguguccacguacaugcugaccaacagcgagcuccugucccugaucaacgacaugccgaucaccaacgaccagaagaagcucaugagcaacaacgugcagaucguccggcagcaguccuacagcaucaugugcaucaucaaggaggaggugcuggcguacgugguccagcugccccucuacggcgugaucgacacccccugcuggaagcugcacacgagcccccugugcaccaccaacaccaaggagggguccaacaucugccucacgcgcaccgaccggggcugguacugcgacaacgccggcagcgucuccuucuucccgcaggccgagaccugcaaggugcagagcaaccgcguguucugcgacaccaugaacucccggacgcugcccagcgagguaaaccucugcaacgucgacaucuucaaccccaaguacgacugcaagaucaugaccuccaagaccgacgugagcuccagcgugaucaccucccugggggccaucgucagcugcuacggcaagacgaagugcaccgccagcaacaagaaccgggggaucaucaagaccuucuccaacggcugcgacuacgugagcaacaagggcguggacaccguguccgucgggaacacccuguacugcgugaacaagcaggagggcaagagccucuacgugaagggggagcccaucaucaacuucuacgacccgcuggucuuccccuccgacgaguucgacgcgagcaucucccaggugaacgagaagaucaaccagagccuggccuucauccgcaaguccgacgagcugcuccacaacgugaacgccggcaagagcacgaccaacaucaugaucaccaccaucaucaucgucaucaucgugauccugcugucccucaucgccguggggcugcugcucuacugcaaggcccggagcacgcccgucacccuguccaaggaccagcugagcggcaucaacaacaucgcguucuccaacugaggacuagucccuguucccagagcccacuuuuuuuucuuuuuuugaaauaaaauagccugucuuucagaucuaaaaaaaaaaaaaaaaaaaaaaaaaaaaaaaaaaaaaaaaaaaaaaaaaaaaaaaaaaaaaaaaugcaucccccccccccccccccccccccccccccccaaaggcucuuuucagagccaccagaauu

SEQ ID NO: 4710 - RNA, 1897 nt, Artificial Sequence
  mRNA product Design c-5 comprising derived and/or modified sequence from HRSV(A2)__F_DSCav1_mut4 (opt1)
gggagagcggcucggccauuuugucccagucaguccggaggcugcggcugcagaaguaccgccugcggaguaacugcaaagaagcuuaccauggagcugcucauccugaaggccaacgccaucaccaccauccugacggcggugaccuucugcuucgccagcggccagaacaucaccgaggaguucuaccaguccacgugcagcgccgucuccaagggguaccucagcgcccugcgcaccggcugguacaccuccgugaucaccaucgagcugagcaacaucaaggagaacaagugcaacgggaccgacgccaaggugaagcucaucaagcaggagcuggacaaguacaagaacgcggucacggagcugcagcuccugaugcaguccacccccgccaccggcagcggguccgccaucugcagcggcguggccgugugcaagguccugcaccucgagggcgaggugaacaagaucaaguccgcgcugcugagcaccaacaaggccguggucucccucagcaacgggguguccgugcugacguucaagguccuggaccucaagaacuacaucgacaagcagcugcugccgauccucaacaagcagagcugcuccaucagcaacaucgagaccgugaucgaguuccagcagaagaacaaccggcugcuggagaucacccgcgaguucuccgugaacgccggcgucaccacgcccgugagcaccuacaugcucaccaacagcgagcugcugucccucaucaacgacaugcccaucaccaacgaccagaagaagcugaugagcaacaacgugcagaucguccggcagcaguccuacagcaucaugugcaucaucaaggaggaggugcuggccuacgugguccagcucccccuguacggggugaucgacacgccgugcuggaagcugcacaccagcccccucugcaccaccaacacgaaggagggcuccaacaucugccugacccgcaccgaccgggggugguacugcgacaacgccggcuccgugagcuucuucccccaggcggagaccugcaagguccaguccaaccgcguguucugcgacacgaugaacagccggacccuccccuccgaggucaaccugugcaacguggacaucuucaacccgaaguacgacugcaagaucaugaccagcaagaccgacguguccagcuccgucaucacgagccugggcgccaucguguccugcuacgggaagaccaagugcaccgccagcaacaagaaccggggcaucaucaagaccuucuccaacgggugcgacuacgugagcaacaagggcgucgacacggugagcgugggcaacacccucuacugcgucaacaagcaggaggggaagucccuguacgugaagggcgagcccaucaucaacuucuacgacccccugguguuccccagcgacgaguucgacgccuccaucagccaggucaacgagaagaucaaccagucccucgccuucauccgcaagagcgacgagcugcugcacaacgugaacgcggggaaguccaccaccaacaucaugaucaccacgaucaucaucgugaucaucgucauccuccugagccugaucgccgugggccuccugcuguacugcaaggcccgguccaccccggugacccugagcaaggaccagcucuccgggaucaacaacaucgccuucagcaacugaggacuagucccuguucccagagcccacuuuuuuuucuuuuuuugaaauaaaauagccugucuuucagaucuaaaaaaaaaaaaaaaaaaaaaaaaaaaaaaaaaaaaaaaaaaaaaaaaaaaaaaaaaaaaaaaaugcaucccccccccccccccccccccccccccccccaaaggcucuuuucagagccaccagaauu

SEQ ID NO: 4711 - RNA, 1897 nt, Artificial Sequence
  mRNA product Design c-5 comprising derived and/or modified sequence from HRSV(A2)__F_DSCav1_mut4 (opt2)
gggagagcggcucggccauuuugucccagucaguccggaggcugcggcugcagaaguaccgccugcggaguaacugcaaagaagcuuaccauggagcuccucauccucaaggccaacgccaucaccaccauccucaccgccgucaccuucugcuucgccuccggccagaacaucaccgaggaguucuaccaguccaccugcuccgccgucuccaagggcuaccucuccgcccuccgcaccggcugguacaccuccgucaucaccaucgagcucuccaacaucaaggagaacaagugcaacggcaccgacgccaaggucaagcucaucaagcaggagcucgacaaguacaagaacgccgucaccgagcuccagcuccucaugcaguccacccccgccaccggcuccggcuccgccaucugcuccggcgucgccgucugcaagguccuccaccucgagggcgaggucaacaagaucaaguccgcccuccucuccaccaacaaggccgucgucucccucuccaacggcgucuccguccucaccuucaagguccucgaccucaagaacuacaucgacaagcagcuccuccccauccucaacaagcaguccugcuccaucuccaacaucgagaccgucaucgaguuccagcagaagaacaaccgccuccucgagaucacccgcgaguucuccgucaacgccggcgucaccacccccgucuccaccuacaugcucaccaacuccgagcuccucucccucaucaacgacaugcccaucaccaacgaccagaagaagcucauguccaacaacguccagaucguccgccagcaguccuacuccaucaugugcaucaucaaggaggagguccucgccuacgucguccagcucccccucuacggcgucaucgacacccccugcuggaagcuccacaccuccccccucugcaccaccaacaccaaggagggcuccaacaucugccucacccgcaccgaccgcggcugguacugcgacaacgccggcuccgucuccuucuucccccaggccgagaccugcaagguccaguccaaccgcgucuucugcgacaccaugaacucccgcacccuccccuccgaggucaaccucugcaacgucgacaucuucaaccccaaguacgacugcaagaucaugaccuccaagaccgacgucuccuccuccgucaucaccucccucggcgccaucgucuccugcuacggcaagaccaagugcaccgccuccaacaagaaccgcggcaucaucaagaccuucuccaacggcugcgacuacgucuccaacaagggcgucgacaccgucuccgucggcaacacccucuacugcgucaacaagcaggagggcaagucccucuacgucaagggcgagcccaucaucaacuucuacgacccccucgucuuccccuccgacgaguucgacgccuccaucucccaggucaacgagaagaucaaccagucccucgccuucauccgcaaguccgacgagcuccuccacaacgucaacgccggcaaguccaccaccaacaucaugaucaccaccaucaucaucgucaucaucgucauccuccucucccucaucgccgucggccuccuccucuacugcaaggcccgcuccacccccgucacccucuccaaggaccagcucuccggcaucaacaacaucgccuucuccaacugaggacuagucccuguucccagagcccacuuuuuuuucuuuuuuugaaauaaaauagccugucuuucagaucuaaaaaaaaaaaaaaaaaaaaaaaaaaaaaaaaaaaaaaaaaaaaaaaaaaaaaaaaaaaaaaaaugcaucccccccccccccccccccccccccccccccaaaggcucuuuucagagccaccagaauu

SEQ ID NO: 4712 - RNA, 1897 nt, Artificial Sequence
  mRNA product Design c-5 comprising derived and/or modified sequence from HRSV(A2)__F_DSCav1_mut4 (opt3)
gggagagcggcucggccauuuugucccagucaguccggaggcugcggcugcagaaguaccgccugcggaguaacugcaaagaagcuuaccauggagcugcucauccuuaaggccaacgcuauuaccacaauacugacugcagugacguucugcuuugccagcggccagaauaucaccgaagaguucuaccaauccacauguucugcggucucaaaaggguauuugagugcuuuaagaacuggaugguacaccagcguuauuacaaucgaacuguccaacauuaaggagaauaaaugcaacgguaccgacgccaaggugaaacuaaucaagcaggaacucgauaaguauaaaaaugcaguaacugagcugcagcuucugaugcagucuacacccgccaccggcucggggucagcuauauguagcggaguggcagucugcaagguguugcaccucgagggcgaaguuaacaaaaucaagagugcccugcuguccacgaauaaagcuguggucucucucagcaacgguguguccguauuaacuuuuaagguucuggaccuuaagaauuacauugauaaacaauugcugccuauccuaaacaagcagucauguaguauuagcaauaucgagaccgugauagaguuccagcagaaaaacaauaggcuccuggaaauuacacgggaguuuucugucaacgccggggugacuaccccaguguccacauauaugcuuaccaauucagaacuguugagccucaucaacgacaugccgauuacgaacgaucaaaagaaacugaugaguaauaacguccagaucguucgccagcagucuuacuccaucaugugcauuauaaaggaggaaguguuagcguauguagugcaacugccccucuacggagucaucgacacuccuuguuggaaacuucauacaagcccacugugcaccacuaauacaaaggagggcucgaacauuuguuugacccgaacggaucguggcugguacugcgacaaugcagggucuguguccuucuuuccccaggccgaaaccuguaagguucagucaaacagaguguucugcgauacaaugaauaguagaacucugccuagcgaggucaaccucugcaauguggacaucuuuaacccaaaauaugauuguaagauaaugaccuccaaaacagacguaucuagcucaguuauuaccagucugggagcuaucguguccugcuacgguaagacuaaauguacagccagcaauaagaacaggggcaucauuaagaccuucucuaaugggugcgauuaugucucaaacaaaggaguggacacugucagugugggcaauacgcuuuacuguguuaacaagcaagaggguaaaagccuguaugugaagggggaacccaucauuaacuuuuacgacccuuugguauucccauccgaugaguuugacgcaucuauaucgcaggucaaugagaaaaucaaccagagccucgcuuucauucggaaguccgaugaacuguuacacaaugugaacgccggaaagucaacaaccaauaucaugaucacuaccauuauaaucguuauuaucgugauucugcuaagucucaucgcggucggccugcuuuuguauugcaaagcccgcucuacaccggugacccugagcaaggaccagcucuccggcauaaacaauaucgcauucucaaacugaggacuagucccuguucccagagcccacuuuuuuuucuuuuuuugaaauaaaauagccugucuuucagaucuaaaaaaaaaaaaaaaaaaaaaaaaaaaaaaaaaaaaaaaaaaaaaaaaaaaaaaaaaaaaaaaaugcaucccccccccccccccccccccccccccccccaaaggcucuuuucagagccaccagaauu

SEQ ID NO: 4713 - RNA, 1897 nt, Artificial Sequence
  mRNA product Design c-5 comprising derived and/or modified sequence from HRSV(A2)__F_DSCav1_mut4 (opt4)
gggagagcggcucggccauuuugucccagucaguccggaggcugcggcugcagaaguaccgccugcggaguaacugcaaagaagcuuaccauggagcugcugauccugaaggccaacgccaucaccaccauccugaccgccgugaccuucugcuucgccagcggccagaacaucaccgaggaguucuaccagagcaccugcagcgccgugagcaagggcuaccugagcgcccugagaaccggcugguacaccagcgugaucaccaucgagcugagcaacaucaaggagaacaagugcaacggcaccgacgccaaggugaagcugaucaagcaggagcuggacaaguacaagaacgccgugaccgagcugcagcugcugaugcagagcacccccgccaccggcagcggcagcgccaucugcagcggcguggccgugugcaaggugcugcaccuggagggcgaggugaacaagaucaagagcgcccugcugagcaccaacaaggccguggugagccugagcaacggcgugagcgugcugaccuucaaggugcuggaccugaagaacuacaucgacaagcagcugcugcccauccugaacaagcagagcugcagcaucagcaacaucgagaccgugaucgaguuccagcagaagaacaacagacugcuggagaucaccagagaguucagcgugaacgccggcgugaccacccccgugagcaccuacaugcugaccaacagcgagcugcugagccugaucaacgacaugcccaucaccaacgaccagaagaagcugaugagcaacaacgugcagaucgugagacagcagagcuacagcaucaugugcaucaucaaggaggaggugcuggccuacguggugcagcugccccuguacggcgugaucgacacccccugcuggaagcugcacaccagcccccugugcaccaccaacaccaaggagggcagcaacaucugccugaccagaaccgacagaggcugguacugcgacaacgccggcagcgugagcuucuucccccaggccgagaccugcaaggugcagagcaacagaguguucugcgacaccaugaacagcagaacccugcccagcgaggugaaccugugcaacguggacaucuucaaccccaaguacgacugcaagaucaugaccagcaagaccgacgugagcagcagcgugaucaccagccugggcgccaucgugagcugcuacggcaagaccaagugcaccgccagcaacaagaacagaggcaucaucaagaccuucagcaacggcugcgacuacgugagcaacaagggcguggacaccgugagcgugggcaacacccuguacugcgugaacaagcaggagggcaagagccuguacgugaagggcgagcccaucaucaacuucuacgacccccugguguuccccagcgacgaguucgacgccagcaucagccaggugaacgagaagaucaaccagagccuggccuucaucagaaagagcgacgagcugcugcacaacgugaacgccggcaagagcaccaccaacaucaugaucaccaccaucaucaucgugaucaucgugauccugcugagccugaucgccgugggccugcugcuguacugcaaggccagaagcacccccgugacccugagcaaggaccagcugagcggcaucaacaacaucgccuucagcaacugaggacuagucccuguucccagagcccacuuuuuuuucuuuuuuugaaauaaaauagccugucuuucagaucuaaaaaaaaaaaaaaaaaaaaaaaaaaaaaaaaaaaaaaaaaaaaaaaaaaaaaaaaaaaaaaaaugcaucccccccccccccccccccccccccccccccaaaggcucuuuucagagccaccagaauu

SEQ ID NO: 4714 - RNA, 1897 nt, Artificial Sequence
  mRNA product Design c-5 comprising derived and/or modified sequence from HRSV(A2)__F_DSCav1_mut4 (opt5)
gggagagcggcucggccauuuugucccagucaguccggaggcugcggcugcagaaguaccgccugcggaguaacugcaaagaagcuuaccauggagcugcucauccugaaggccaacgcuauuaccacaauccuuacggccgugaccuucugcuuugcgagcggccagaauauuacagaagaguucuaccaauccaccuguucugcugucagcaaaggguaucuguccgcccucagaacaggaugguacaccucuguuaucacaauugaacugagcaacaucaaggagaauaaaugcaacggcaccgacgccaaggugaaacuuaucaagcaggaacuggauaaguauaaaaaugcugugacggagcuccagcugcugaugcaguccacccccgccacagggucuggaagcgcuauuuguuccggcgucgccgugugcaagguucuccaccuggagggggaagugaacaaaaucaagagcgcgcuucugucuaccaauaaagccgucgugucccucagcaacggaguuucugugcugacauuuaagguccuugaccugaagaauuacauugauaaacaacuccugccuauccugaacaagcaguccuguagcauuucuaauaucgagaccgugauugaguuccagcagaaaaacaaucggcuccuggaaaucacgcgcgaguuuuccgugaacgcuggcgucacaaccccgguuagcacauauaugcuuaccaauuccgaacugcucucucugaucaacgacaugcccauuaccaacgaucaaaagaaacuuaugagcaauaacgugcagaucgugagacagcaguccuacagcauuaugugcaucauuaaggaggaaguccuggccuaugugguucaacucccucuguacggcgugaucgacacacccuguuggaaacugcauacgucuccucucugcaccacaaauaccaaggagggguccaacaucugucugacacggaccgaucgcggaugguacugcgacaaugcuggcagcgucucuuucuuuccccaggccgaaacguguaaggugcagagcaacagaguuuucugcgauacaaugaacuccagaacccugccuucugaggugaaucucugcaaugucgacauuuuuaacccgaaauaugauuguaagaucaugaccagcaaaacagacguguccagcucugucauuaccucccugggggcgaucgugagcugcuacggaaagacaaaauguacggccucuaauaagaaccggggcauuaucaagaccuucuccaaugggugcgauuauguuagcaacaaaggaguggacacagucuccgugggcaauacccuuuacuguguuaacaagcaagagggcaaaucucuguaugugaagggggaacccaucauuaacuuuuacgacccucucgucuuccccagcgaugaguuugacgcuuccaucucucaggugaaugagaaaauuaaccagagccuggccuucauccgcaaguccgaugaacugcuccacaaugugaacgcuggaaagagcacaaccaauauuaugaucacgaccauuaucaucguuauuaucgucauucugcuuucucugaucgccgugggccuccugcuguauugcaaagccagauccacaccugugacccuuagcaaggaccagcucucugggauuaacaauaucgcuuucuccaacugaggacuagucccuguucccagagcccacuuuuuuuucuuuuuuugaaauaaaauagccugucuuucagaucuaaaaaaaaaaaaaaaaaaaaaaaaaaaaaaaaaaaaaaaaaaaaaaaaaaaaaaaaaaaaaaaaugcaucccccccccccccccccccccccccccccccaaaggcucuuuucagagccaccagaauu

SEQ ID NO: 4715 - RNA, 1897 nt, Artificial Sequence
  mRNA product Design c-5 comprising derived and/or modified sequence from HRSV(A2)__F_DSCav1_mut4 (opt6)
gggagagcggcucggccauuuugucccagucaguccggaggcugcggcugcagaaguaccgccugcggaguaacugcaaagaagcuuaccauggaacuucuaauacucaaagccaacgcaauaacaacaauauuaacagccguaacauuuugcuucgcaucaggucaaaacauaacagaagaguucuaccaauccacaugcucagcaguaucaaaaggauauuuaagugcucuaagaacaggaugguacacauccguaauaacaaucgaacuaucaaacauaaaagaaaauaaauguaauggaacagacgccaaaguaaaauuaaucaaacaagaacuagacaaauacaaaaacgcaguuacugaauuacaauuauuaaugcaaucaacaccggccacaggaucuggaucagcaauaugcucaggaguagcagucugcaaaguauuacaccuagaaggggaaguuaauaaaaucaaaucagcauuacuauccaccaacaaagcgguaguuucacucuccaacggcguaucugucuuaacauucaaaguauuagaccuaaaaaacuacauugacaaacaacuacuaccaauccuaaacaaacaaucauguuccauaagcaauauagaaacaguaauagaauuucaacaaaaaaacaacagacuauuagaaauaacaagagaauuuuccgucaaugcaggaguuacuaccccugucuccaccuauaugcuaaccaauuccgaacucuuaucauuaauaaacgacaugccuaucacaaaugaccaaaaaaaauuaaugagcaacaacguacaaauaguacgacaacaaucauacucaaucaugugcauaauaaaagaagaaguccuagcauacguuguacaacuaccacuauacggagucauagauaccccaugcuggaaacuccauacaagcccacuaugcacuacaaacacaaaagaaggcucuaauauaugucuaacaagaacagaccgaggaugguacugcgauaaugccggcucagucucauucuuuccgcaagccgaaacuuguaaaguacaaaguaacagaguauuuugugacaccaugaacucaagaacccucccaagcgaagucaaucuaugcaacguugauauauucaaucccaaauacgacugcaaaaucaugaccucaaaaacagacgucagcucauccguuauaacaucacuaggagccaucguaucuugcuauggaaaaacaaaaugcacagcaagcaauaaaaacagaggcauaauaaaaacauucucaaauggaugcgacuacguaucaaacaaaggagucgacacaguuuccguaggaaacacuuuauacugcguaaacaaacaagaaggaaaaucauuauacgucaaaggugaaccaauaauaaacuucuacgauccacuuguauucccaucagacgaauuugacgcaucaauuucacaaguaaacgaaaaaauaaaccaaucacucgcauucauaagaaaaucagaugaacuacuacauaacguaaacgcaggaaaauccacaacaaacaucaugauaacaaccaucauaaucguaauaaucguaauacuauuaucccuaauugcaguaggauuacucuuauauugcaaagcaagaucaacaccaguaacccucaguaaagaccaacuauccggaauaaauaacaucgcauucucaaacuaaggacuagucccuguucccagagcccacuuuuuuuucuuuuuuugaaauaaaauagccugucuuucagaucuaaaaaaaaaaaaaaaaaaaaaaaaaaaaaaaaaaaaaaaaaaaaaaaaaaaaaaaaaaaaaaaaugcaucccccccccccccccccccccccccccccccaaaggcucuuuucagagccaccagaauu

SEQ ID NO: 4716 - RNA, 1897 nt, Artificial Sequence
  mRNA product Design c-5 comprising derived and/or modified sequence from HRSV(A2)__F_DSCav1_mut4 (opt11)
gggagagcggcucggccauuuugucccagucaguccggaggcugcggcugcagaaguaccgccugcggaguaacugcaaagaagcuuaccauggaacugcucauccucaaagccaacgccaucaccaccauucuuaccgccgucacauucugcuucgccucaggccaaaacaucaccgaagaauuuuaccaauccacuuguucagccgucucaaaaggauaccuaucagcccuccguaccggcugguacaccucggucauaacaauagaacucuccaacauaaaagaaaacaaaugcaacggcaccgacgccaaggucaaacugauaaaacaagaacuugauaaauacaaaaacgccgucacugaacuccaacuccucaugcaauccacucccgcuacuggcucuggcuccgccaucugcucuggcgucgccgucuguaaaguacuccaccucgaaggggaagucaacaaaaucaaaucagcccuccuuagcaccaacaaggccgucgucucccucucaaacggagucagcguccucaccuucaagguccucgaccucaagaacuacaucgacaaacaacuccugcccauccuaaauaaacaauccugcucuaucuccaauaucgaaaccguuauagaguuccaacagaaaaacaaccgacuccucgaaaucacccgcgaguucuccgucaacgcaggcgucaccaccccugugucaaccuacaugcucaccaacagcgaacuacucucacucaucaaugacaugcccaucaccaacgaccaaaagaaacucauguccaacaacguccaaaucguacgucaacaauccuacagcaucaugugcaucauaaaagaagaaguccucgccuacgucguccaacuuccccucuacggcgucauagacacccccugcuggaaacugcauaccucaccccuaugcaccaccaacacuaaagaaggcuccaacaucugccucacccgcacggaccgcggcugguacugcgacaacgccggcuccgucuccuucuucccccaagccgaaacuuguaaaguccaauccaacagagucuucugcgacaccaugaacucuagaacgcugccauccgagguaaaccuaugcaacgucgacaucuucaaucccaaauacgacugcaagaucaugaccucaaaaaccgacguauccuccucaguaaucaccagucucggagcuaucgucuccugcuacggcaaaaccaaaugcacggccucuaacaaaaaccgcggcaucaucaaaaccuucucaaacggaugcgacuacgucagcaacaaaggcguagauaccgucucugucggcaacacacuguacugcguaaacaagcaagaaggaaaaucccucuacguaaaaggcgaacccaucaucaacuucuacgacccccucguuuuccccucagaugaauuugacgccucgauaucacaagucaacgaaaagauaaaucagucccucgccuucauccgaaaauccgacgaacuccuccacaacguuaacgcaggaaaguccaccacaaacaucaugauaacuacaaucauaauagucauuaucgucauacuccucucccuaaucgccguaggccugcuacucuacugcaaagcccgcucaacccccgucacucucucaaaagaccaacucuccggcaucaauaacaucgccuucucaaacuaaggacuagucccuguucccagagcccacuuuuuuuucuuuuuuugaaauaaaauagccugucuuucagaucuaaaaaaaaaaaaaaaaaaaaaaaaaaaaaaaaaaaaaaaaaaaaaaaaaaaaaaaaaaaaaaaaugcaucccccccccccccccccccccccccccccccaaaggcucuuuucagagccaccagaauu

SEQ ID NO: 4717 - RNA, 1906 nt, Artificial Sequence
  mRNA product Design d-1 comprising derived and/or modified sequence from HRSV(A2)__F_DSCav1_mut4 (opt1)
gggagacccgugacccggaaguuguacggcuacgcgacuuucccucccacaaacccucgcgcccuuccuuuccuacuugggcccggcagaaagcuuaccauggagcugcucauccugaaggccaacgccaucaccaccauccugacggcggugaccuucugcuucgccagcggccagaacaucaccgaggaguucuaccaguccacgugcagcgccgucuccaagggguaccucagcgcccugcggaccggcugguacaccuccgugaucaccaucgagcugagcaacaucaaggagaacaagugcaacgggaccgacgccaaggugaagcucaucaagcaggagcuggacaaguacaagaacgcggucacggagcugcagcuccugaugcaguccaccccggcaaccggcuccggcuccgccaucugcagcggcgucgccgugugcaaggugcugcaccucgagggggaggucaacaagaucaagagcgcccugcuguccaccaacaaggccguggugagccucuccaacggcgucagcgugcugaccuucaaggugcuggaccucaagaacuacaucgacaagcagcugcugcccauccugaacaagcagagcugcuccaucagcaacaucgagacggugaucgaguuccagcagaagaacaaccggcuccuggagaucacccgcgaguucagcgugaacgccggggucaccacccccguguccacguacaugcugaccaacagcgagcuccugucccugaucaacgacaugccgaucaccaacgaccagaagaagcucaugagcaacaacgugcagaucguccggcagcaguccuacagcaucaugugcaucaucaaggaggaggugcuggcguacgugguccagcugccccucuacggcgugaucgacacccccugcuggaagcugcacacgagcccccugugcaccaccaacaccaaggagggguccaacaucugccucacgcgcaccgaccggggcugguacugcgacaacgccggcagcgucuccuucuucccgcaggccgagaccugcaaggugcagagcaaccgcguguucugcgacaccaugaacucccggacgcugcccagcgagguaaaccucugcaacgucgacaucuucaaccccaaguacgacugcaagaucaugaccuccaagaccgacgugagcuccagcgugaucaccucccugggggccaucgucagcugcuacggcaagacgaagugcaccgccagcaacaagaaccgggggaucaucaagaccuucuccaacggcugcgacuacgugagcaacaagggcguggacaccguguccgucgggaacacccuguacugcgugaacaagcaggagggcaagagccucuacgugaagggggagcccaucaucaacuucuacgacccgcuggucuuccccuccgacgaguucgacgcgagcaucucccaggugaacgagaagaucaaccagagccuggccuucauccgcaaguccgacgagcugcuccacaacgugaacgccggcaagagcacgaccaacaucaugaucaccaccaucaucaucgucaucaucgugauccugcugucccucaucgccguggggcugcugcucuacugcaaggcccggagcacgcccgucacccuguccaaggaccagcugagcggcaucaacaacaucgcguucuccaacugaggacuagucccuguucccagagcccacuuuuuuuucuuuuuuugaaauaaaauagccugucuuucagaucuaaaaaaaaaaaaaaaaaaaaaaaaaaaaaaaaaaaaaaaaaaaaaaaaaaaaaaaaaaaaaaaaugcaucccccccccccccccccccccccccccccccaaaggcucuuuucagagccaccagaauu

SEQ ID NO: 4718 - RNA, 1906 nt, Artificial Sequence
  mRNA product Design d-1 comprising derived and/or modified sequence from HRSV(A2)__F_DSCav1_mut4 (opt1)
gggagacccgugacccggaaguuguacggcuacgcgacuuucccucccacaaacccucgcgcccuuccuuuccuacuugggcccggcagaaagcuuaccauggagcugcucauccugaaggccaacgccaucaccaccauccugacggcggugaccuucugcuucgccagcggccagaacaucaccgaggaguucuaccaguccacgugcagcgccgucuccaagggguaccucagcgcccugcgcaccggcugguacaccuccgugaucaccaucgagcugagcaacaucaaggagaacaagugcaacgggaccgacgccaaggugaagcucaucaagcaggagcuggacaaguacaagaacgcggucacggagcugcagcuccugaugcaguccacccccgccaccggcagcggguccgccaucugcagcggcguggccgugugcaagguccugcaccucgagggcgaggugaacaagaucaaguccgcgcugcugagcaccaacaaggccguggucucccucagcaacgggguguccgugcugacguucaagguccuggaccucaagaacuacaucgacaagcagcugcugccgauccucaacaagcagagcugcuccaucagcaacaucgagaccgugaucgaguuccagcagaagaacaaccggcugcuggagaucacccgcgaguucuccgugaacgccggcgucaccacgcccgugagcaccuacaugcucaccaacagcgagcugcugucccucaucaacgacaugcccaucaccaacgaccagaagaagcugaugagcaacaacgugcagaucguccggcagcaguccuacagcaucaugugcaucaucaaggaggaggugcuggccuacgugguccagcucccccuguacggggugaucgacacgccgugcuggaagcugcacaccagcccccucugcaccaccaacacgaaggagggcuccaacaucugccugacccgcaccgaccgggggugguacugcgacaacgccggcuccgugagcuucuucccccaggcggagaccugcaagguccaguccaaccgcguguucugcgacacgaugaacagccggacccuccccuccgaggucaaccugugcaacguggacaucuucaacccgaaguacgacugcaagaucaugaccagcaagaccgacguguccagcuccgucaucacgagccugggcgccaucguguccugcuacgggaagaccaagugcaccgccagcaacaagaaccggggcaucaucaagaccuucuccaacgggugcgacuacgugagcaacaagggcgucgacacggugagcgugggcaacacccucuacugcgucaacaagcaggaggggaagucccuguacgugaagggcgagcccaucaucaacuucuacgacccccugguguuccccagcgacgaguucgacgccuccaucagccaggucaacgagaagaucaaccagucccucgccuucauccgcaagagcgacgagcugcugcacaacgugaacgcggggaaguccaccaccaacaucaugaucaccacgaucaucaucgugaucaucgucauccuccugagccugaucgccgugggccuccugcuguacugcaaggcccgguccaccccggugacccugagcaaggaccagcucuccgggaucaacaacaucgccuucagcaacugaggacuagucccuguucccagagcccacuuuuuuuucuuuuuuugaaauaaaauagccugucuuucagaucuaaaaaaaaaaaaaaaaaaaaaaaaaaaaaaaaaaaaaaaaaaaaaaaaaaaaaaaaaaaaaaaaugcaucccccccccccccccccccccccccccccccaaaggcucuuuucagagccaccagaauu

SEQ ID NO: 4719 - RNA, 1906 nt, Artificial Sequence
  mRNA product Design d-1 comprising derived and/or modified sequence from HRSV(A2)__F_DSCav1_mut4 (opt2)
gggagacccgugacccggaaguuguacggcuacgcgacuuucccucccacaaacccucgcgcccuuccuuuccuacuugggcccggcagaaagcuuaccauggagcuccucauccucaaggccaacgccaucaccaccauccucaccgccgucaccuucugcuucgccuccggccagaacaucaccgaggaguucuaccaguccaccugcuccgccgucuccaagggcuaccucuccgcccuccgcaccggcugguacaccuccgucaucaccaucgagcucuccaacaucaaggagaacaagugcaacggcaccgacgccaaggucaagcucaucaagcaggagcucgacaaguacaagaacgccgucaccgagcuccagcuccucaugcaguccacccccgccaccggcuccggcuccgccaucugcuccggcgucgccgucugcaagguccuccaccucgagggcgaggucaacaagaucaaguccgcccuccucuccaccaacaaggccgucgucucccucuccaacggcgucuccguccucaccuucaagguccucgaccucaagaacuacaucgacaagcagcuccuccccauccucaacaagcaguccugcuccaucuccaacaucgagaccgucaucgaguuccagcagaagaacaaccgccuccucgagaucacccgcgaguucuccgucaacgccggcgucaccacccccgucuccaccuacaugcucaccaacuccgagcuccucucccucaucaacgacaugcccaucaccaacgaccagaagaagcucauguccaacaacguccagaucguccgccagcaguccuacuccaucaugugcaucaucaaggaggagguccucgccuacgucguccagcucccccucuacggcgucaucgacacccccugcuggaagcuccacaccuccccccucugcaccaccaacaccaaggagggcuccaacaucugccucacccgcaccgaccgcggcugguacugcgacaacgccggcuccgucuccuucuucccccaggccgagaccugcaagguccaguccaaccgcgucuucugcgacaccaugaacucccgcacccuccccuccgaggucaaccucugcaacgucgacaucuucaaccccaaguacgacugcaagaucaugaccuccaagaccgacgucuccuccuccgucaucaccucccucggcgccaucgucuccugcuacggcaagaccaagugcaccgccuccaacaagaaccgcggcaucaucaagaccuucuccaacggcugcgacuacgucuccaacaagggcgucgacaccgucuccgucggcaacacccucuacugcgucaacaagcaggagggcaagucccucuacgucaagggcgagcccaucaucaacuucuacgacccccucgucuuccccuccgacgaguucgacgccuccaucucccaggucaacgagaagaucaaccagucccucgccuucauccgcaaguccgacgagcuccuccacaacgucaacgccggcaaguccaccaccaacaucaugaucaccaccaucaucaucgucaucaucgucauccuccucucccucaucgccgucggccuccuccucuacugcaaggcccgcuccacccccgucacccucuccaaggaccagcucuccggcaucaacaacaucgccuucuccaacugaggacuagucccuguucccagagcccacuuuuuuuucuuuuuuugaaauaaaauagccugucuuucagaucuaaaaaaaaaaaaaaaaaaaaaaaaaaaaaaaaaaaaaaaaaaaaaaaaaaaaaaaaaaaaaaaaugcaucccccccccccccccccccccccccccccccaaaggcucuuuucagagccaccagaauu

SEQ ID NO: 4720 - RNA, 1906 nt, Artificial Sequence
  mRNA product Design d-1 comprising derived and/or modified sequence from HRSV(A2)__F_DSCav1_mut4 (opt3)
gggagacccgugacccggaaguuguacggcuacgcgacuuucccucccacaaacccucgcgcccuuccuuuccuacuugggcccggcagaaagcuuaccauggagcugcucauccuuaaggccaacgcuauuaccacaauacugacugcagugacguucugcuuugccagcggccagaauaucaccgaagaguucuaccaauccacauguucugcggucucaaaaggguauuugagugcuuuaagaacuggaugguacaccagcguuauuacaaucgaacuguccaacauuaaggagaauaaaugcaacgguaccgacgccaaggugaaacuaaucaagcaggaacucgauaaguauaaaaaugcaguaacugagcugcagcuucugaugcagucuacacccgccaccggcucggggucagcuauauguagcggaguggcagucugcaagguguugcaccucgagggcgaaguuaacaaaaucaagagugcccugcuguccacgaauaaagcuguggucucucucagcaacgguguguccguauuaacuuuuaagguucuggaccuuaagaauuacauugauaaacaauugcugccuauccuaaacaagcagucauguaguauuagcaauaucgagaccgugauagaguuccagcagaaaaacaauaggcuccuggaaauuacacgggaguuuucugucaacgccggggugacuaccccaguguccacauauaugcuuaccaauucagaacuguugagccucaucaacgacaugccgauuacgaacgaucaaaagaaacugaugaguaauaacguccagaucguucgccagcagucuuacuccaucaugugcauuauaaaggaggaaguguuagcguauguagugcaacugccccucuacggagucaucgacacuccuuguuggaaacuucauacaagcccacugugcaccacuaauacaaaggagggcucgaacauuuguuugacccgaacggaucguggcugguacugcgacaaugcagggucuguguccuucuuuccccaggccgaaaccuguaagguucagucaaacagaguguucugcgauacaaugaauaguagaacucugccuagcgaggucaaccucugcaauguggacaucuuuaacccaaaauaugauuguaagauaaugaccuccaaaacagacguaucuagcucaguuauuaccagucugggagcuaucguguccugcuacgguaagacuaaauguacagccagcaauaagaacaggggcaucauuaagaccuucucuaaugggugcgauuaugucucaaacaaaggaguggacacugucagugugggcaauacgcuuuacuguguuaacaagcaagaggguaaaagccuguaugugaagggggaacccaucauuaacuuuuacgacccuuugguauucccauccgaugaguuugacgcaucuauaucgcaggucaaugagaaaaucaaccagagccucgcuuucauucggaaguccgaugaacuguuacacaaugugaacgccggaaagucaacaaccaauaucaugaucacuaccauuauaaucguuauuaucgugauucugcuaagucucaucgcggucggccugcuuuuguauugcaaagcccgcucuacaccggugacccugagcaaggaccagcucuccggcauaaacaauaucgcauucucaaacugaggacuagucccuguucccagagcccacuuuuuuuucuuuuuuugaaauaaaauagccugucuuucagaucuaaaaaaaaaaaaaaaaaaaaaaaaaaaaaaaaaaaaaaaaaaaaaaaaaaaaaaaaaaaaaaaaugcaucccccccccccccccccccccccccccccccaaaggcucuuuucagagccaccagaauu

SEQ ID NO: 4721 - RNA, 1906 nt, Artificial Sequence
  mRNA product Design d-1 comprising derived and/or modified sequence from HRSV(A2)__F_DSCav1_mut4 (opt4)
gggagacccgugacccggaaguuguacggcuacgcgacuuucccucccacaaacccucgcgcccuuccuuuccuacuugggcccggcagaaagcuuaccauggagcugcugauccugaaggccaacgccaucaccaccauccugaccgccgugaccuucugcuucgccagcggccagaacaucaccgaggaguucuaccagagcaccugcagcgccgugagcaagggcuaccugagcgcccugagaaccggcugguacaccagcgugaucaccaucgagcugagcaacaucaaggagaacaagugcaacggcaccgacgccaaggugaagcugaucaagcaggagcuggacaaguacaagaacgccgugaccgagcugcagcugcugaugcagagcacccccgccaccggcagcggcagcgccaucugcagcggcguggccgugugcaaggugcugcaccuggagggcgaggugaacaagaucaagagcgcccugcugagcaccaacaaggccguggugagccugagcaacggcgugagcgugcugaccuucaaggugcuggaccugaagaacuacaucgacaagcagcugcugcccauccugaacaagcagagcugcagcaucagcaacaucgagaccgugaucgaguuccagcagaagaacaacagacugcuggagaucaccagagaguucagcgugaacgccggcgugaccacccccgugagcaccuacaugcugaccaacagcgagcugcugagccugaucaacgacaugcccaucaccaacgaccagaagaagcugaugagcaacaacgugcagaucgugagacagcagagcuacagcaucaugugcaucaucaaggaggaggugcuggccuacguggugcagcugccccuguacggcgugaucgacacccccugcuggaagcugcacaccagcccccugugcaccaccaacaccaaggagggcagcaacaucugccugaccagaaccgacagaggcugguacugcgacaacgccggcagcgugagcuucuucccccaggccgagaccugcaaggugcagagcaacagaguguucugcgacaccaugaacagcagaacccugcccagcgaggugaaccugugcaacguggacaucuucaaccccaaguacgacugcaagaucaugaccagcaagaccgacgugagcagcagcgugaucaccagccugggcgccaucgugagcugcuacggcaagaccaagugcaccgccagcaacaagaacagaggcaucaucaagaccuucagcaacggcugcgacuacgugagcaacaagggcguggacaccgugagcgugggcaacacccuguacugcgugaacaagcaggagggcaagagccuguacgugaagggcgagcccaucaucaacuucuacgacccccugguguuccccagcgacgaguucgacgccagcaucagccaggugaacgagaagaucaaccagagccuggccuucaucagaaagagcgacgagcugcugcacaacgugaacgccggcaagagcaccaccaacaucaugaucaccaccaucaucaucgugaucaucgugauccugcugagccugaucgccgugggccugcugcuguacugcaaggccagaagcacccccgugacccugagcaaggaccagcugagcggcaucaacaacaucgccuucagcaacugaggacuagucccuguucccagagcccacuuuuuuuucuuuuuuugaaauaaaauagccugucuuucagaucuaaaaaaaaaaaaaaaaaaaaaaaaaaaaaaaaaaaaaaaaaaaaaaaaaaaaaaaaaaaaaaaaugcaucccccccccccccccccccccccccccccccaaaggcucuuuucagagccaccagaauu

SEQ ID NO: 4722 - RNA, 1906 nt, Artificial Sequence
  mRNA product Design d-1 comprising derived and/or modified sequence from HRSV(A2)__F_DSCav1_mut4 (opt5)
gggagacccgugacccggaaguuguacggcuacgcgacuuucccucccacaaacccucgcgcccuuccuuuccuacuugggcccggcagaaagcuuaccauggagcugcucauccugaaggccaacgcuauuaccacaauccuuacggccgugaccuucugcuuugcgagcggccagaauauuacagaagaguucuaccaauccaccuguucugcugucagcaaaggguaucuguccgcccucagaacaggaugguacaccucuguuaucacaauugaacugagcaacaucaaggagaauaaaugcaacggcaccgacgccaaggugaaacuuaucaagcaggaacuggauaaguauaaaaaugcugugacggagcuccagcugcugaugcaguccacccccgccacagggucuggaagcgcuauuuguuccggcgucgccgugugcaagguucuccaccuggagggggaagugaacaaaaucaagagcgcgcuucugucuaccaauaaagccgucgugucccucagcaacggaguuucugugcugacauuuaagguccuugaccugaagaauuacauugauaaacaacuccugccuauccugaacaagcaguccuguagcauuucuaauaucgagaccgugauugaguuccagcagaaaaacaaucggcuccuggaaaucacgcgcgaguuuuccgugaacgcuggcgucacaaccccgguuagcacauauaugcuuaccaauuccgaacugcucucucugaucaacgacaugcccauuaccaacgaucaaaagaaacuuaugagcaauaacgugcagaucgugagacagcaguccuacagcauuaugugcaucauuaaggaggaaguccuggccuaugugguucaacucccucuguacggcgugaucgacacacccuguuggaaacugcauacgucuccucucugcaccacaaauaccaaggagggguccaacaucugucugacacggaccgaucgcggaugguacugcgacaaugcuggcagcgucucuuucuuuccccaggccgaaacguguaaggugcagagcaacagaguuuucugcgauacaaugaacuccagaacccugccuucugaggugaaucucugcaaugucgacauuuuuaacccgaaauaugauuguaagaucaugaccagcaaaacagacguguccagcucugucauuaccucccugggggcgaucgugagcugcuacggaaagacaaaauguacggccucuaauaagaaccggggcauuaucaagaccuucuccaaugggugcgauuauguuagcaacaaaggaguggacacagucuccgugggcaauacccuuuacuguguuaacaagcaagagggcaaaucucuguaugugaagggggaacccaucauuaacuuuuacgacccucucgucuuccccagcgaugaguuugacgcuuccaucucucaggugaaugagaaaauuaaccagagccuggccuucauccgcaaguccgaugaacugcuccacaaugugaacgcuggaaagagcacaaccaauauuaugaucacgaccauuaucaucguuauuaucgucauucugcuuucucugaucgccgugggccuccugcuguauugcaaagccagauccacaccugugacccuuagcaaggaccagcucucugggauuaacaauaucgcuuucuccaacugaggacuagucccuguucccagagcccacuuuuuuuucuuuuuuugaaauaaaauagccugucuuucagaucuaaaaaaaaaaaaaaaaaaaaaaaaaaaaaaaaaaaaaaaaaaaaaaaaaaaaaaaaaaaaaaaaugcaucccccccccccccccccccccccccccccccaaaggcucuuuucagagccaccagaauu

SEQ ID NO: 4723 - RNA, 1906 nt, Artificial Sequence
  mRNA product Design d-1 comprising derived and/or modified sequence from HRSV(A2)__F_DSCav1_mut4 (opt6)
gggagacccgugacccggaaguuguacggcuacgcgacuuucccucccacaaacccucgcgcccuuccuuuccuacuugggcccggcagaaagcuuaccauggaacuucuaauacucaaagccaacgcaauaacaacaauauuaacagccguaacauuuugcuucgcaucaggucaaaacauaacagaagaguucuaccaauccacaugcucagcaguaucaaaaggauauuuaagugcucuaagaacaggaugguacacauccguaauaacaaucgaacuaucaaacauaaaagaaaauaaauguaauggaacagacgccaaaguaaaauuaaucaaacaagaacuagacaaauacaaaaacgcaguuacugaauuacaauuauuaaugcaaucaacaccggccacaggaucuggaucagcaauaugcucaggaguagcagucugcaaaguauuacaccuagaaggggaaguuaauaaaaucaaaucagcauuacuauccaccaacaaagcgguaguuucacucuccaacggcguaucugucuuaacauucaaaguauuagaccuaaaaaacuacauugacaaacaacuacuaccaauccuaaacaaacaaucauguuccauaagcaauauagaaacaguaauagaauuucaacaaaaaaacaacagacuauuagaaauaacaagagaauuuuccgucaaugcaggaguuacuaccccugucuccaccuauaugcuaaccaauuccgaacucuuaucauuaauaaacgacaugccuaucacaaaugaccaaaaaaaauuaaugagcaacaacguacaaauaguacgacaacaaucauacucaaucaugugcauaauaaaagaagaaguccuagcauacguuguacaacuaccacuauacggagucauagauaccccaugcuggaaacuccauacaagcccacuaugcacuacaaacacaaaagaaggcucuaauauaugucuaacaagaacagaccgaggaugguacugcgauaaugccggcucagucucauucuuuccgcaagccgaaacuuguaaaguacaaaguaacagaguauuuugugacaccaugaacucaagaacccucccaagcgaagucaaucuaugcaacguugauauauucaaucccaaauacgacugcaaaaucaugaccucaaaaacagacgucagcucauccguuauaacaucacuaggagccaucguaucuugcuauggaaaaacaaaaugcacagcaagcaauaaaaacagaggcauaauaaaaacauucucaaauggaugcgacuacguaucaaacaaaggagucgacacaguuuccguaggaaacacuuuauacugcguaaacaaacaagaaggaaaaucauuauacgucaaaggugaaccaauaauaaacuucuacgauccacuuguauucccaucagacgaauuugacgcaucaauuucacaaguaaacgaaaaaauaaaccaaucacucgcauucauaagaaaaucagaugaacuacuacauaacguaaacgcaggaaaauccacaacaaacaucaugauaacaaccaucauaaucguaauaaucguaauacuauuaucccuaauugcaguaggauuacucuuauauugcaaagcaagaucaacaccaguaacccucaguaaagaccaacuauccggaauaaauaacaucgcauucucaaacuaaggacuagucccuguucccagagcccacuuuuuuuucuuuuuuugaaauaaaauagccugucuuucagaucuaaaaaaaaaaaaaaaaaaaaaaaaaaaaaaaaaaaaaaaaaaaaaaaaaaaaaaaaaaaaaaaaugcaucccccccccccccccccccccccccccccccaaaggcucuuuucagagccaccagaauu

SEQ ID NO: 4724 - RNA, 1906 nt, Artificial Sequence
  mRNA product Design d-1 comprising derived and/or modified sequence from HRSV(A2)__F_DSCav1_mut4 (opt11)
gggagacccgugacccggaaguuguacggcuacgcgacuuucccucccacaaacccucgcgcccuuccuuuccuacuugggcccggcagaaagcuuaccauggaacugcucauccucaaagccaacgccaucaccaccauucuuaccgccgucacauucugcuucgccucaggccaaaacaucaccgaagaauuuuaccaauccacuuguucagccgucucaaaaggauaccuaucagcccuccguaccggcugguacaccucggucauaacaauagaacucuccaacauaaaagaaaacaaaugcaacggcaccgacgccaaggucaaacugauaaaacaagaacuugauaaauacaaaaacgccgucacugaacuccaacuccucaugcaauccacucccgcuacuggcucuggcuccgccaucugcucuggcgucgccgucuguaaaguacuccaccucgaaggggaagucaacaaaaucaaaucagcccuccuuagcaccaacaaggccgucgucucccucucaaacggagucagcguccucaccuucaagguccucgaccucaagaacuacaucgacaaacaacuccugcccauccuaaauaaacaauccugcucuaucuccaauaucgaaaccguuauagaguuccaacagaaaaacaaccgacuccucgaaaucacccgcgaguucuccgucaacgcaggcgucaccaccccugugucaaccuacaugcucaccaacagcgaacuacucucacucaucaaugacaugcccaucaccaacgaccaaaagaaacucauguccaacaacguccaaaucguacgucaacaauccuacagcaucaugugcaucauaaaagaagaaguccucgccuacgucguccaacuuccccucuacggcgucauagacacccccugcuggaaacugcauaccucaccccuaugcaccaccaacacuaaagaaggcuccaacaucugccucacccgcacggaccgcggcugguacugcgacaacgccggcuccgucuccuucuucccccaagccgaaacuuguaaaguccaauccaacagagucuucugcgacaccaugaacucuagaacgcugccauccgagguaaaccuaugcaacgucgacaucuucaaucccaaauacgacugcaagaucaugaccucaaaaaccgacguauccuccucaguaaucaccagucucggagcuaucgucuccugcuacggcaaaaccaaaugcacggccucuaacaaaaaccgcggcaucaucaaaaccuucucaaacggaugcgacuacgucagcaacaaaggcguagauaccgucucugucggcaacacacuguacugcguaaacaagcaagaaggaaaaucccucuacguaaaaggcgaacccaucaucaacuucuacgacccccucguuuuccccucagaugaauuugacgccucgauaucacaagucaacgaaaagauaaaucagucccucgccuucauccgaaaauccgacgaacuccuccacaacguuaacgcaggaaaguccaccacaaacaucaugauaacuacaaucauaauagucauuaucgucauacuccucucccuaaucgccguaggccugcuacucuacugcaaagcccgcucaacccccgucacucucucaaaagaccaacucuccggcaucaauaacaucgccuucucaaacuaaggacuagucccuguucccagagcccacuuuuuuuucuuuuuuugaaauaaaauagccugucuuucagaucuaaaaaaaaaaaaaaaaaaaaaaaaaaaaaaaaaaaaaaaaaaaaaaaaaaaaaaaaaaaaaaaaugcaucccccccccccccccccccccccccccccccaaaggcucuuuucagagccaccagaauu

SEQ ID NO: 4725 - RNA, 1961 nt, Artificial Sequence
  mRNA product Design d-2 comprising derived and/or modified sequence from HRSV(A2)__F_DSCav1_mut4 (opt1)
gggagagcggcucggccauuuugucccagucaguccggaggcugcggcugcagaaguaccgccugcggaguaacugcaaagaagcuuaccauggagcugcucauccugaaggccaacgccaucaccaccauccugacggcggugaccuucugcuucgccagcggccagaacaucaccgaggaguucuaccaguccacgugcagcgccgucuccaagggguaccucagcgcccugcggaccggcugguacaccuccgugaucaccaucgagcugagcaacaucaaggagaacaagugcaacgggaccgacgccaaggugaagcucaucaagcaggagcuggacaaguacaagaacgcggucacggagcugcagcuccugaugcaguccaccccggcaaccggcuccggcuccgccaucugcagcggcgucgccgugugcaaggugcugcaccucgagggggaggucaacaagaucaagagcgcccugcuguccaccaacaaggccguggugagccucuccaacggcgucagcgugcugaccuucaaggugcuggaccucaagaacuacaucgacaagcagcugcugcccauccugaacaagcagagcugcuccaucagcaacaucgagacggugaucgaguuccagcagaagaacaaccggcuccuggagaucacccgcgaguucagcgugaacgccggggucaccacccccguguccacguacaugcugaccaacagcgagcuccugucccugaucaacgacaugccgaucaccaacgaccagaagaagcucaugagcaacaacgugcagaucguccggcagcaguccuacagcaucaugugcaucaucaaggaggaggugcuggcguacgugguccagcugccccucuacggcgugaucgacacccccugcuggaagcugcacacgagcccccugugcaccaccaacaccaaggagggguccaacaucugccucacgcgcaccgaccggggcugguacugcgacaacgccggcagcgucuccuucuucccgcaggccgagaccugcaaggugcagagcaaccgcguguucugcgacaccaugaacucccggacgcugcccagcgagguaaaccucugcaacgucgacaucuucaaccccaaguacgacugcaagaucaugaccuccaagaccgacgugagcuccagcgugaucaccucccugggggccaucgucagcugcuacggcaagacgaagugcaccgccagcaacaagaaccgggggaucaucaagaccuucuccaacggcugcgacuacgugagcaacaagggcguggacaccguguccgucgggaacacccuguacugcgugaacaagcaggagggcaagagccucuacgugaagggggagcccaucaucaacuucuacgacccgcuggucuuccccuccgacgaguucgacgcgagcaucucccaggugaacgagaagaucaaccagagccuggccuucauccgcaaguccgacgagcugcuccacaacgugaacgccggcaagagcacgaccaacaucaugaucaccaccaucaucaucgucaucaucgugauccugcugucccucaucgccguggggcugcugcucuacugcaaggcccggagcacgcccgucacccuguccaaggaccagcugagcggcaucaacaacaucgcguucuccaacugaggacuaguaauaaggaaacuguaugaaugucugugggcaggaagugaagagauccuucuguaaagguuuuuggaauuaugucugcugaauaauaaacuuuuuugaaauaauaaaucugguagaaaaaugagaucuaaaaaaaaaaaaaaaaaaaaaaaaaaaaaaaaaaaaaaaaaaaaaaaaaaaaaaaaaaaaaaaaugcaucccccccccccccccccccccccccccccccaaaggcucuuuucagagccaccagaauu

SEQ ID NO: 4726 - RNA, 1961 nt, Artificial Sequence
  mRNA product Design d-2 comprising derived and/or modified sequence from HRSV(A2)__F_DSCav1_mut4 (opt1)
gggagagcggcucggccauuuugucccagucaguccggaggcugcggcugcagaaguaccgccugcggaguaacugcaaagaagcuuaccauggagcugcucauccugaaggccaacgccaucaccaccauccugacggcggugaccuucugcuucgccagcggccagaacaucaccgaggaguucuaccaguccacgugcagcgccgucuccaagggguaccucagcgcccugcgcaccggcugguacaccuccgugaucaccaucgagcugagcaacaucaaggagaacaagugcaacgggaccgacgccaaggugaagcucaucaagcaggagcuggacaaguacaagaacgcggucacggagcugcagcuccugaugcaguccacccccgccaccggcagcggguccgccaucugcagcggcguggccgugugcaagguccugcaccucgagggcgaggugaacaagaucaaguccgcgcugcugagcaccaacaaggccguggucucccucagcaacgggguguccgugcugacguucaagguccuggaccucaagaacuacaucgacaagcagcugcugccgauccucaacaagcagagcugcuccaucagcaacaucgagaccgugaucgaguuccagcagaagaacaaccggcugcuggagaucacccgcgaguucuccgugaacgccggcgucaccacgcccgugagcaccuacaugcucaccaacagcgagcugcugucccucaucaacgacaugcccaucaccaacgaccagaagaagcugaugagcaacaacgugcagaucguccggcagcaguccuacagcaucaugugcaucaucaaggaggaggugcuggccuacgugguccagcucccccuguacggggugaucgacacgccgugcuggaagcugcacaccagcccccucugcaccaccaacacgaaggagggcuccaacaucugccugacccgcaccgaccgggggugguacugcgacaacgccggcuccgugagcuucuucccccaggcggagaccugcaagguccaguccaaccgcguguucugcgacacgaugaacagccggacccuccccuccgaggucaaccugugcaacguggacaucuucaacccgaaguacgacugcaagaucaugaccagcaagaccgacguguccagcuccgucaucacgagccugggcgccaucguguccugcuacgggaagaccaagugcaccgccagcaacaagaaccggggcaucaucaagaccuucuccaacgggugcgacuacgugagcaacaagggcgucgacacggugagcgugggcaacacccucuacugcgucaacaagcaggaggggaagucccuguacgugaagggcgagcccaucaucaacuucuacgacccccugguguuccccagcgacgaguucgacgccuccaucagccaggucaacgagaagaucaaccagucccucgccuucauccgcaagagcgacgagcugcugcacaacgugaacgcggggaaguccaccaccaacaucaugaucaccacgaucaucaucgugaucaucgucauccuccugagccugaucgccgugggccuccugcuguacugcaaggcccgguccaccccggugacccugagcaaggaccagcucuccgggaucaacaacaucgccuucagcaacugaggacuaguaauaaggaaacuguaugaaugucugugggcaggaagugaagagauccuucuguaaagguuuuuggaauuaugucugcugaauaauaaacuuuuuugaaauaauaaaucugguagaaaaaugagaucuaaaaaaaaaaaaaaaaaaaaaaaaaaaaaaaaaaaaaaaaaaaaaaaaaaaaaaaaaaaaaaaaugcaucccccccccccccccccccccccccccccccaaaggcucuuuucagagccaccagaauu

SEQ ID NO: 4727 - RNA, 1961 nt, Artificial Sequence
  mRNA product Design d-2 comprising derived and/or modified sequence from HRSV(A2)__F_DSCav1_mut4 (opt2)
gggagagcggcucggccauuuugucccagucaguccggaggcugcggcugcagaaguaccgccugcggaguaacugcaaagaagcuuaccauggagcuccucauccucaaggccaacgccaucaccaccauccucaccgccgucaccuucugcuucgccuccggccagaacaucaccgaggaguucuaccaguccaccugcuccgccgucuccaagggcuaccucuccgcccuccgcaccggcugguacaccuccgucaucaccaucgagcucuccaacaucaaggagaacaagugcaacggcaccgacgccaaggucaagcucaucaagcaggagcucgacaaguacaagaacgccgucaccgagcuccagcuccucaugcaguccacccccgccaccggcuccggcuccgccaucugcuccggcgucgccgucugcaagguccuccaccucgagggcgaggucaacaagaucaaguccgcccuccucuccaccaacaaggccgucgucucccucuccaacggcgucuccguccucaccuucaagguccucgaccucaagaacuacaucgacaagcagcuccuccccauccucaacaagcaguccugcuccaucuccaacaucgagaccgucaucgaguuccagcagaagaacaaccgccuccucgagaucacccgcgaguucuccgucaacgccggcgucaccacccccgucuccaccuacaugcucaccaacuccgagcuccucucccucaucaacgacaugcccaucaccaacgaccagaagaagcucauguccaacaacguccagaucguccgccagcaguccuacuccaucaugugcaucaucaaggaggagguccucgccuacgucguccagcucccccucuacggcgucaucgacacccccugcuggaagcuccacaccuccccccucugcaccaccaacaccaaggagggcuccaacaucugccucacccgcaccgaccgcggcugguacugcgacaacgccggcuccgucuccuucuucccccaggccgagaccugcaagguccaguccaaccgcgucuucugcgacaccaugaacucccgcacccuccccuccgaggucaaccucugcaacgucgacaucuucaaccccaaguacgacugcaagaucaugaccuccaagaccgacgucuccuccuccgucaucaccucccucggcgccaucgucuccugcuacggcaagaccaagugcaccgccuccaacaagaaccgcggcaucaucaagaccuucuccaacggcugcgacuacgucuccaacaagggcgucgacaccgucuccgucggcaacacccucuacugcgucaacaagcaggagggcaagucccucuacgucaagggcgagcccaucaucaacuucuacgacccccucgucuuccccuccgacgaguucgacgccuccaucucccaggucaacgagaagaucaaccagucccucgccuucauccgcaaguccgacgagcuccuccacaacgucaacgccggcaaguccaccaccaacaucaugaucaccaccaucaucaucgucaucaucgucauccuccucucccucaucgccgucggccuccuccucuacugcaaggcccgcuccacccccgucacccucuccaaggaccagcucuccggcaucaacaacaucgccuucuccaacugaggacuaguaauaaggaaacuguaugaaugucugugggcaggaagugaagagauccuucuguaaagguuuuuggaauuaugucugcugaauaauaaacuuuuuugaaauaauaaaucugguagaaaaaugagaucuaaaaaaaaaaaaaaaaaaaaaaaaaaaaaaaaaaaaaaaaaaaaaaaaaaaaaaaaaaaaaaaaugcaucccccccccccccccccccccccccccccccaaaggcucuuuucagagccaccagaauu

SEQ ID NO: 4728 - RNA, 1961 nt, Artificial Sequence
  mRNA product Design d-2 comprising derived and/or modified sequence from HRSV(A2)__F_DSCav1_mut4 (opt3)
gggagagcggcucggccauuuugucccagucaguccggaggcugcggcugcagaaguaccgccugcggaguaacugcaaagaagcuuaccauggagcugcucauccuuaaggccaacgcuauuaccacaauacugacugcagugacguucugcuuugccagcggccagaauaucaccgaagaguucuaccaauccacauguucugcggucucaaaaggguauuugagugcuuuaagaacuggaugguacaccagcguuauuacaaucgaacuguccaacauuaaggagaauaaaugcaacgguaccgacgccaaggugaaacuaaucaagcaggaacucgauaaguauaaaaaugcaguaacugagcugcagcuucugaugcagucuacacccgccaccggcucggggucagcuauauguagcggaguggcagucugcaagguguugcaccucgagggcgaaguuaacaaaaucaagagugcccugcuguccacgaauaaagcuguggucucucucagcaacgguguguccguauuaacuuuuaagguucuggaccuuaagaauuacauugauaaacaauugcugccuauccuaaacaagcagucauguaguauuagcaauaucgagaccgugauagaguuccagcagaaaaacaauaggcuccuggaaauuacacgggaguuuucugucaacgccggggugacuaccccaguguccacauauaugcuuaccaauucagaacuguugagccucaucaacgacaugccgauuacgaacgaucaaaagaaacugaugaguaauaacguccagaucguucgccagcagucuuacuccaucaugugcauuauaaaggaggaaguguuagcguauguagugcaacugccccucuacggagucaucgacacuccuuguuggaaacuucauacaagcccacugugcaccacuaauacaaaggagggcucgaacauuuguuugacccgaacggaucguggcugguacugcgacaaugcagggucuguguccuucuuuccccaggccgaaaccuguaagguucagucaaacagaguguucugcgauacaaugaauaguagaacucugccuagcgaggucaaccucugcaauguggacaucuuuaacccaaaauaugauuguaagauaaugaccuccaaaacagacguaucuagcucaguuauuaccagucugggagcuaucguguccugcuacgguaagacuaaauguacagccagcaauaagaacaggggcaucauuaagaccuucucuaaugggugcgauuaugucucaaacaaaggaguggacacugucagugugggcaauacgcuuuacuguguuaacaagcaagaggguaaaagccuguaugugaagggggaacccaucauuaacuuuuacgacccuuugguauucccauccgaugaguuugacgcaucuauaucgcaggucaaugagaaaaucaaccagagccucgcuuucauucggaaguccgaugaacuguuacacaaugugaacgccggaaagucaacaaccaauaucaugaucacuaccauuauaaucguuauuaucgugauucugcuaagucucaucgcggucggccugcuuuuguauugcaaagcccgcucuacaccggugacccugagcaaggaccagcucuccggcauaaacaauaucgcauucucaaacugaggacuaguaauaaggaaacuguaugaaugucugugggcaggaagugaagagauccuucuguaaagguuuuuggaauuaugucugcugaauaauaaacuuuuuugaaauaauaaaucugguagaaaaaugagaucuaaaaaaaaaaaaaaaaaaaaaaaaaaaaaaaaaaaaaaaaaaaaaaaaaaaaaaaaaaaaaaaaugcaucccccccccccccccccccccccccccccccaaaggcucuuuucagagccaccagaauu

SEQ ID NO: 4729 - RNA, 1961 nt, Artificial Sequence
  mRNA product Design d-2 comprising derived and/or modified sequence from HRSV(A2)__F_DSCav1_mut4 (opt4)
gggagagcggcucggccauuuugucccagucaguccggaggcugcggcugcagaaguaccgccugcggaguaacugcaaagaagcuuaccauggagcugcugauccugaaggccaacgccaucaccaccauccugaccgccgugaccuucugcuucgccagcggccagaacaucaccgaggaguucuaccagagcaccugcagcgccgugagcaagggcuaccugagcgcccugagaaccggcugguacaccagcgugaucaccaucgagcugagcaacaucaaggagaacaagugcaacggcaccgacgccaaggugaagcugaucaagcaggagcuggacaaguacaagaacgccgugaccgagcugcagcugcugaugcagagcacccccgccaccggcagcggcagcgccaucugcagcggcguggccgugugcaaggugcugcaccuggagggcgaggugaacaagaucaagagcgcccugcugagcaccaacaaggccguggugagccugagcaacggcgugagcgugcugaccuucaaggugcuggaccugaagaacuacaucgacaagcagcugcugcccauccugaacaagcagagcugcagcaucagcaacaucgagaccgugaucgaguuccagcagaagaacaacagacugcuggagaucaccagagaguucagcgugaacgccggcgugaccacccccgugagcaccuacaugcugaccaacagcgagcugcugagccugaucaacgacaugcccaucaccaacgaccagaagaagcugaugagcaacaacgugcagaucgugagacagcagagcuacagcaucaugugcaucaucaaggaggaggugcuggccuacguggugcagcugccccuguacggcgugaucgacacccccugcuggaagcugcacaccagcccccugugcaccaccaacaccaaggagggcagcaacaucugccugaccagaaccgacagaggcugguacugcgacaacgccggcagcgugagcuucuucccccaggccgagaccugcaaggugcagagcaacagaguguucugcgacaccaugaacagcagaacccugcccagcgaggugaaccugugcaacguggacaucuucaaccccaaguacgacugcaagaucaugaccagcaagaccgacgugagcagcagcgugaucaccagccugggcgccaucgugagcugcuacggcaagaccaagugcaccgccagcaacaagaacagaggcaucaucaagaccuucagcaacggcugcgacuacgugagcaacaagggcguggacaccgugagcgugggcaacacccuguacugcgugaacaagcaggagggcaagagccuguacgugaagggcgagcccaucaucaacuucuacgacccccugguguuccccagcgacgaguucgacgccagcaucagccaggugaacgagaagaucaaccagagccuggccuucaucagaaagagcgacgagcugcugcacaacgugaacgccggcaagagcaccaccaacaucaugaucaccaccaucaucaucgugaucaucgugauccugcugagccugaucgccgugggccugcugcuguacugcaaggccagaagcacccccgugacccugagcaaggaccagcugagcggcaucaacaacaucgccuucagcaacugaggacuaguaauaaggaaacuguaugaaugucugugggcaggaagugaagagauccuucuguaaagguuuuuggaauuaugucugcugaauaauaaacuuuuuugaaauaauaaaucugguagaaaaaugagaucuaaaaaaaaaaaaaaaaaaaaaaaaaaaaaaaaaaaaaaaaaaaaaaaaaaaaaaaaaaaaaaaaugcaucccccccccccccccccccccccccccccccaaaggcucuuuucagagccaccagaauu

SEQ ID NO: 4730 - RNA, 1961 nt, Artificial Sequence
  mRNA product Design d-2 comprising derived and/or modified sequence from HRSV(A2)__F_DSCav1_mut4 (opt5)
gggagagcggcucggccauuuugucccagucaguccggaggcugcggcugcagaaguaccgccugcggaguaacugcaaagaagcuuaccauggagcugcucauccugaaggccaacgcuauuaccacaauccuuacggccgugaccuucugcuuugcgagcggccagaauauuacagaagaguucuaccaauccaccuguucugcugucagcaaaggguaucuguccgcccucagaacaggaugguacaccucuguuaucacaauugaacugagcaacaucaaggagaauaaaugcaacggcaccgacgccaaggugaaacuuaucaagcaggaacuggauaaguauaaaaaugcugugacggagcuccagcugcugaugcaguccacccccgccacagggucuggaagcgcuauuuguuccggcgucgccgugugcaagguucuccaccuggagggggaagugaacaaaaucaagagcgcgcuucugucuaccaauaaagccgucgugucccucagcaacggaguuucugugcugacauuuaagguccuugaccugaagaauuacauugauaaacaacuccugccuauccugaacaagcaguccuguagcauuucuaauaucgagaccgugauugaguuccagcagaaaaacaaucggcuccuggaaaucacgcgcgaguuuuccgugaacgcuggcgucacaaccccgguuagcacauauaugcuuaccaauuccgaacugcucucucugaucaacgacaugcccauuaccaacgaucaaaagaaacuuaugagcaauaacgugcagaucgugagacagcaguccuacagcauuaugugcaucauuaaggaggaaguccuggccuaugugguucaacucccucuguacggcgugaucgacacacccuguuggaaacugcauacgucuccucucugcaccacaaauaccaaggagggguccaacaucugucugacacggaccgaucgcggaugguacugcgacaaugcuggcagcgucucuuucuuuccccaggccgaaacguguaaggugcagagcaacagaguuuucugcgauacaaugaacuccagaacccugccuucugaggugaaucucugcaaugucgacauuuuuaacccgaaauaugauuguaagaucaugaccagcaaaacagacguguccagcucugucauuaccucccugggggcgaucgugagcugcuacggaaagacaaaauguacggccucuaauaagaaccggggcauuaucaagaccuucuccaaugggugcgauuauguuagcaacaaaggaguggacacagucuccgugggcaauacccuuuacuguguuaacaagcaagagggcaaaucucuguaugugaagggggaacccaucauuaacuuuuacgacccucucgucuuccccagcgaugaguuugacgcuuccaucucucaggugaaugagaaaauuaaccagagccuggccuucauccgcaaguccgaugaacugcuccacaaugugaacgcuggaaagagcacaaccaauauuaugaucacgaccauuaucaucguuauuaucgucauucugcuuucucugaucgccgugggccuccugcuguauugcaaagccagauccacaccugugacccuuagcaaggaccagcucucugggauuaacaauaucgcuuucuccaacugaggacuaguaauaaggaaacuguaugaaugucugugggcaggaagugaagagauccuucuguaaagguuuuuggaauuaugucugcugaauaauaaacuuuuuugaaauaauaaaucugguagaaaaaugagaucuaaaaaaaaaaaaaaaaaaaaaaaaaaaaaaaaaaaaaaaaaaaaaaaaaaaaaaaaaaaaaaaaugcaucccccccccccccccccccccccccccccccaaaggcucuuuucagagccaccagaauu

SEQ ID NO: 4731 - RNA, 1961 nt, Artificial Sequence
  mRNA product Design d-2 comprising derived and/or modified sequence from HRSV(A2)__F_DSCav1_mut4 (opt6)
gggagagcggcucggccauuuugucccagucaguccggaggcugcggcugcagaaguaccgccugcggaguaacugcaaagaagcuuaccauggaacuucuaauacucaaagccaacgcaauaacaacaauauuaacagccguaacauuuugcuucgcaucaggucaaaacauaacagaagaguucuaccaauccacaugcucagcaguaucaaaaggauauuuaagugcucuaagaacaggaugguacacauccguaauaacaaucgaacuaucaaacauaaaagaaaauaaauguaauggaacagacgccaaaguaaaauuaaucaaacaagaacuagacaaauacaaaaacgcaguuacugaauuacaauuauuaaugcaaucaacaccggccacaggaucuggaucagcaauaugcucaggaguagcagucugcaaaguauuacaccuagaaggggaaguuaauaaaaucaaaucagcauuacuauccaccaacaaagcgguaguuucacucuccaacggcguaucugucuuaacauucaaaguauuagaccuaaaaaacuacauugacaaacaacuacuaccaauccuaaacaaacaaucauguuccauaagcaauauagaaacaguaauagaauuucaacaaaaaaacaacagacuauuagaaauaacaagagaauuuuccgucaaugcaggaguuacuaccccugucuccaccuauaugcuaaccaauuccgaacucuuaucauuaauaaacgacaugccuaucacaaaugaccaaaaaaaauuaaugagcaacaacguacaaauaguacgacaacaaucauacucaaucaugugcauaauaaaagaagaaguccuagcauacguuguacaacuaccacuauacggagucauagauaccccaugcuggaaacuccauacaagcccacuaugcacuacaaacacaaaagaaggcucuaauauaugucuaacaagaacagaccgaggaugguacugcgauaaugccggcucagucucauucuuuccgcaagccgaaacuuguaaaguacaaaguaacagaguauuuugugacaccaugaacucaagaacccucccaagcgaagucaaucuaugcaacguugauauauucaaucccaaauacgacugcaaaaucaugaccucaaaaacagacgucagcucauccguuauaacaucacuaggagccaucguaucuugcuauggaaaaacaaaaugcacagcaagcaauaaaaacagaggcauaauaaaaacauucucaaauggaugcgacuacguaucaaacaaaggagucgacacaguuuccguaggaaacacuuuauacugcguaaacaaacaagaaggaaaaucauuauacgucaaaggugaaccaauaauaaacuucuacgauccacuuguauucccaucagacgaauuugacgcaucaauuucacaaguaaacgaaaaaauaaaccaaucacucgcauucauaagaaaaucagaugaacuacuacauaacguaaacgcaggaaaauccacaacaaacaucaugauaacaaccaucauaaucguaauaaucguaauacuauuaucccuaauugcaguaggauuacucuuauauugcaaagcaagaucaacaccaguaacccucaguaaagaccaacuauccggaauaaauaacaucgcauucucaaacuaaggacuaguaauaaggaaacuguaugaaugucugugggcaggaagugaagagauccuucuguaaagguuuuuggaauuaugucugcugaauaauaaacuuuuuugaaauaauaaaucugguagaaaaaugagaucuaaaaaaaaaaaaaaaaaaaaaaaaaaaaaaaaaaaaaaaaaaaaaaaaaaaaaaaaaaaaaaaaugcaucccccccccccccccccccccccccccccccaaaggcucuuuucagagccaccagaauu

SEQ ID NO: 4732 - RNA, 1961 nt, Artificial Sequence
  mRNA product Design d-2 comprising derived and/or modified sequence from HRSV(A2)__F_DSCav1_mut4 (opt11)
gggagagcggcucggccauuuugucccagucaguccggaggcugcggcugcagaaguaccgccugcggaguaacugcaaagaagcuuaccauggaacugcucauccucaaagccaacgccaucaccaccauucuuaccgccgucacauucugcuucgccucaggccaaaacaucaccgaagaauuuuaccaauccacuuguucagccgucucaaaaggauaccuaucagcccuccguaccggcugguacaccucggucauaacaauagaacucuccaacauaaaagaaaacaaaugcaacggcaccgacgccaaggucaaacugauaaaacaagaacuugauaaauacaaaaacgccgucacugaacuccaacuccucaugcaauccacucccgcuacuggcucuggcuccgccaucugcucuggcgucgccgucuguaaaguacuccaccucgaaggggaagucaacaaaaucaaaucagcccuccuuagcaccaacaaggccgucgucucccucucaaacggagucagcguccucaccuucaagguccucgaccucaagaacuacaucgacaaacaacuccugcccauccuaaauaaacaauccugcucuaucuccaauaucgaaaccguuauagaguuccaacagaaaaacaaccgacuccucgaaaucacccgcgaguucuccgucaacgcaggcgucaccaccccugugucaaccuacaugcucaccaacagcgaacuacucucacucaucaaugacaugcccaucaccaacgaccaaaagaaacucauguccaacaacguccaaaucguacgucaacaauccuacagcaucaugugcaucauaaaagaagaaguccucgccuacgucguccaacuuccccucuacggcgucauagacacccccugcuggaaacugcauaccucaccccuaugcaccaccaacacuaaagaaggcuccaacaucugccucacccgcacggaccgcggcugguacugcgacaacgccggcuccgucuccuucuucccccaagccgaaacuuguaaaguccaauccaacagagucuucugcgacaccaugaacucuagaacgcugccauccgagguaaaccuaugcaacgucgacaucuucaaucccaaauacgacugcaagaucaugaccucaaaaaccgacguauccuccucaguaaucaccagucucggagcuaucgucuccugcuacggcaaaaccaaaugcacggccucuaacaaaaaccgcggcaucaucaaaaccuucucaaacggaugcgacuacgucagcaacaaaggcguagauaccgucucugucggcaacacacuguacugcguaaacaagcaagaaggaaaaucccucuacguaaaaggcgaacccaucaucaacuucuacgacccccucguuuuccccucagaugaauuugacgccucgauaucacaagucaacgaaaagauaaaucagucccucgccuucauccgaaaauccgacgaacuccuccacaacguuaacgcaggaaaguccaccacaaacaucaugauaacuacaaucauaauagucauuaucgucauacuccucucccuaaucgccguaggccugcuacucuacugcaaagcccgcucaacccccgucacucucucaaaagaccaacucuccggcaucaauaacaucgccuucucaaacuaaggacuaguaauaaggaaacuguaugaaugucugugggcaggaagugaagagauccuucuguaaagguuuuuggaauuaugucugcugaauaauaaacuuuuuugaaauaauaaaucugguagaaaaaugagaucuaaaaaaaaaaaaaaaaaaaaaaaaaaaaaaaaaaaaaaaaaaaaaaaaaaaaaaaaaaaaaaaaugcaucccccccccccccccccccccccccccccccaaaggcucuuuucagagccaccagaauu

SEQ ID NO: 4733 - RNA, 2277 nt, Artificial Sequence
  mRNA product Design d-3 comprising derived and/or modified sequence from HRSV(A2)__F_DSCav1_mut4 (opt1)
gggagagggcgcuuggcuugcaaggacccugagcugcggcauugaagcacacccaacccaacucgacugaagucagccucacugaaccggaucugagaaucuucucucucugggcuugccagggcucuccgaaccuagcuagcauccucuucaauuccaacuagaaagcuuaccauggagcugcucauccugaaggccaacgccaucaccaccauccugacggcggugaccuucugcuucgccagcggccagaacaucaccgaggaguucuaccaguccacgugcagcgccgucuccaagggguaccucagcgcccugcggaccggcugguacaccuccgugaucaccaucgagcugagcaacaucaaggagaacaagugcaacgggaccgacgccaaggugaagcucaucaagcaggagcuggacaaguacaagaacgcggucacggagcugcagcuccugaugcaguccaccccggcaaccggcuccggcuccgccaucugcagcggcgucgccgugugcaaggugcugcaccucgagggggaggucaacaagaucaagagcgcccugcuguccaccaacaaggccguggugagccucuccaacggcgucagcgugcugaccuucaaggugcuggaccucaagaacuacaucgacaagcagcugcugcccauccugaacaagcagagcugcuccaucagcaacaucgagacggugaucgaguuccagcagaagaacaaccggcuccuggagaucacccgcgaguucagcgugaacgccggggucaccacccccguguccacguacaugcugaccaacagcgagcuccugucccugaucaacgacaugccgaucaccaacgaccagaagaagcucaugagcaacaacgugcagaucguccggcagcaguccuacagcaucaugugcaucaucaaggaggaggugcuggcguacgugguccagcugccccucuacggcgugaucgacacccccugcuggaagcugcacacgagcccccugugcaccaccaacaccaaggagggguccaacaucugccucacgcgcaccgaccggggcugguacugcgacaacgccggcagcgucuccuucuucccgcaggccgagaccugcaaggugcagagcaaccgcguguucugcgacaccaugaacucccggacgcugcccagcgagguaaaccucugcaacgucgacaucuucaaccccaaguacgacugcaagaucaugaccuccaagaccgacgugagcuccagcgugaucaccucccugggggccaucgucagcugcuacggcaagacgaagugcaccgccagcaacaagaaccgggggaucaucaagaccuucuccaacggcugcgacuacgugagcaacaagggcguggacaccguguccgucgggaacacccuguacugcgugaacaagcaggagggcaagagccucuacgugaagggggagcccaucaucaacuucuacgacccgcuggucuuccccuccgacgaguucgacgcgagcaucucccaggugaacgagaagaucaaccagagccuggccuucauccgcaaguccgacgagcugcuccacaacgugaacgccggcaagagcacgaccaacaucaugaucaccaccaucaucaucgucaucaucgugauccugcugucccucaucgccguggggcugcugcucuacugcaaggcccggagcacgcccgucacccuguccaaggaccagcugagcggcaucaacaacaucgcguucuccaacugaggacuagugaagggaacacccaaauuuaauucagccuuaagcacaauuaauuaagagugaaacguaauuguacaagcaguuggucacccaccauagggcaugaucaacaccgcaaccuuuccuuuuucccccagugauucugaaaaaccccucuucccuucagcuugcuuagauguuccaaauuuaguaagcuuaaggcggccuacagaagaaaaagaaaaaaaaggccacaaaaguucccucucacuuucaguaaauaaaauaaaagcagcaacagaaauaaagaaauaaaugaaauucaaaaugaaauaaauauuguguugugcagcauuaaaaaaucaauaaaaauuaaaaaugagcaagaucuaaaaaaaaaaaaaaaaaaaaaaaaaaaaaaaaaaaaaaaaaaaaaaaaaaaaaaaaaaaaaaaaugcaucccccccccccccccccccccccccccccccaaaggcucuuuucagagccaccagaauu

SEQ ID NO: 4734 - RNA, 2277 nt, Artificial Sequence
  mRNA product Design d-3 comprising derived and/or modified sequence from HRSV(A2)__F_DSCav1_mut4 (opt1)
gggagagggcgcuuggcuugcaaggacccugagcugcggcauugaagcacacccaacccaacucgacugaagucagccucacugaaccggaucugagaaucuucucucucugggcuugccagggcucuccgaaccuagcuagcauccucuucaauuccaacuagaaagcuuaccauggagcugcucauccugaaggccaacgccaucaccaccauccugacggcggugaccuucugcuucgccagcggccagaacaucaccgaggaguucuaccaguccacgugcagcgccgucuccaagggguaccucagcgcccugcgcaccggcugguacaccuccgugaucaccaucgagcugagcaacaucaaggagaacaagugcaacgggaccgacgccaaggugaagcucaucaagcaggagcuggacaaguacaagaacgcggucacggagcugcagcuccugaugcaguccacccccgccaccggcagcggguccgccaucugcagcggcguggccgugugcaagguccugcaccucgagggcgaggugaacaagaucaaguccgcgcugcugagcaccaacaaggccguggucucccucagcaacgggguguccgugcugacguucaagguccuggaccucaagaacuacaucgacaagcagcugcugccgauccucaacaagcagagcugcuccaucagcaacaucgagaccgugaucgaguuccagcagaagaacaaccggcugcuggagaucacccgcgaguucuccgugaacgccggcgucaccacgcccgugagcaccuacaugcucaccaacagcgagcugcugucccucaucaacgacaugcccaucaccaacgaccagaagaagcugaugagcaacaacgugcagaucguccggcagcaguccuacagcaucaugugcaucaucaaggaggaggugcuggccuacgugguccagcucccccuguacggggugaucgacacgccgugcuggaagcugcacaccagcccccucugcaccaccaacacgaaggagggcuccaacaucugccugacccgcaccgaccgggggugguacugcgacaacgccggcuccgugagcuucuucccccaggcggagaccugcaagguccaguccaaccgcguguucugcgacacgaugaacagccggacccuccccuccgaggucaaccugugcaacguggacaucuucaacccgaaguacgacugcaagaucaugaccagcaagaccgacguguccagcuccgucaucacgagccugggcgccaucguguccugcuacgggaagaccaagugcaccgccagcaacaagaaccggggcaucaucaagaccuucuccaacgggugcgacuacgugagcaacaagggcgucgacacggugagcgugggcaacacccucuacugcgucaacaagcaggaggggaagucccuguacgugaagggcgagcccaucaucaacuucuacgacccccugguguuccccagcgacgaguucgacgccuccaucagccaggucaacgagaagaucaaccagucccucgccuucauccgcaagagcgacgagcugcugcacaacgugaacgcggggaaguccaccaccaacaucaugaucaccacgaucaucaucgugaucaucgucauccuccugagccugaucgccgugggccuccugcuguacugcaaggcccgguccaccccggugacccugagcaaggaccagcucuccgggaucaacaacaucgccuucagcaacugaggacuagugaagggaacacccaaauuuaauucagccuuaagcacaauuaauuaagagugaaacguaauuguacaagcaguuggucacccaccauagggcaugaucaacaccgcaaccuuuccuuuuucccccagugauucugaaaaaccccucuucccuucagcuugcuuagauguuccaaauuuaguaagcuuaaggcggccuacagaagaaaaagaaaaaaaaggccacaaaaguucccucucacuuucaguaaauaaaauaaaagcagcaacagaaauaaagaaauaaaugaaauucaaaaugaaauaaauauuguguugugcagcauuaaaaaaucaauaaaaauuaaaaaugagcaagaucuaaaaaaaaaaaaaaaaaaaaaaaaaaaaaaaaaaaaaaaaaaaaaaaaaaaaaaaaaaaaaaaaugcaucccccccccccccccccccccccccccccccaaaggcucuuuucagagccaccagaauu

SEQ ID NO: 4735 - RNA, 2277 nt, Artificial Sequence
  mRNA product Design d-3 comprising derived and/or modified sequence from HRSV(A2)__F_DSCav1_mut4 (opt2)
gggagagggcgcuuggcuugcaaggacccugagcugcggcauugaagcacacccaacccaacucgacugaagucagccucacugaaccggaucugagaaucuucucucucugggcuugccagggcucuccgaaccuagcuagcauccucuucaauuccaacuagaaagcuuaccauggagcuccucauccucaaggccaacgccaucaccaccauccucaccgccgucaccuucugcuucgccuccggccagaacaucaccgaggaguucuaccaguccaccugcuccgccgucuccaagggcuaccucuccgcccuccgcaccggcugguacaccuccgucaucaccaucgagcucuccaacaucaaggagaacaagugcaacggcaccgacgccaaggucaagcucaucaagcaggagcucgacaaguacaagaacgccgucaccgagcuccagcuccucaugcaguccacccccgccaccggcuccggcuccgccaucugcuccggcgucgccgucugcaagguccuccaccucgagggcgaggucaacaagaucaaguccgcccuccucuccaccaacaaggccgucgucucccucuccaacggcgucuccguccucaccuucaagguccucgaccucaagaacuacaucgacaagcagcuccuccccauccucaacaagcaguccugcuccaucuccaacaucgagaccgucaucgaguuccagcagaagaacaaccgccuccucgagaucacccgcgaguucuccgucaacgccggcgucaccacccccgucuccaccuacaugcucaccaacuccgagcuccucucccucaucaacgacaugcccaucaccaacgaccagaagaagcucauguccaacaacguccagaucguccgccagcaguccuacuccaucaugugcaucaucaaggaggagguccucgccuacgucguccagcucccccucuacggcgucaucgacacccccugcuggaagcuccacaccuccccccucugcaccaccaacaccaaggagggcuccaacaucugccucacccgcaccgaccgcggcugguacugcgacaacgccggcuccgucuccuucuucccccaggccgagaccugcaagguccaguccaaccgcgucuucugcgacaccaugaacucccgcacccuccccuccgaggucaaccucugcaacgucgacaucuucaaccccaaguacgacugcaagaucaugaccuccaagaccgacgucuccuccuccgucaucaccucccucggcgccaucgucuccugcuacggcaagaccaagugcaccgccuccaacaagaaccgcggcaucaucaagaccuucuccaacggcugcgacuacgucuccaacaagggcgucgacaccgucuccgucggcaacacccucuacugcgucaacaagcaggagggcaagucccucuacgucaagggcgagcccaucaucaacuucuacgacccccucgucuuccccuccgacgaguucgacgccuccaucucccaggucaacgagaagaucaaccagucccucgccuucauccgcaaguccgacgagcuccuccacaacgucaacgccggcaaguccaccaccaacaucaugaucaccaccaucaucaucgucaucaucgucauccuccucucccucaucgccgucggccuccuccucuacugcaaggcccgcuccacccccgucacccucuccaaggaccagcucuccggcaucaacaacaucgccuucuccaacugaggacuagugaagggaacacccaaauuuaauucagccuuaagcacaauuaauuaagagugaaacguaauuguacaagcaguuggucacccaccauagggcaugaucaacaccgcaaccuuuccuuuuucccccagugauucugaaaaaccccucuucccuucagcuugcuuagauguuccaaauuuaguaagcuuaaggcggccuacagaagaaaaagaaaaaaaaggccacaaaaguucccucucacuuucaguaaauaaaauaaaagcagcaacagaaauaaagaaauaaaugaaauucaaaaugaaauaaauauuguguugugcagcauuaaaaaaucaauaaaaauuaaaaaugagcaagaucuaaaaaaaaaaaaaaaaaaaaaaaaaaaaaaaaaaaaaaaaaaaaaaaaaaaaaaaaaaaaaaaaugcaucccccccccccccccccccccccccccccccaaaggcucuuuucagagccaccagaauu

SEQ ID NO: 4736 - RNA, 2277 nt, Artificial Sequence
  mRNA product Design d-3 comprising derived and/or modified sequence from HRSV(A2)__F_DSCav1_mut4 (opt3)
gggagagggcgcuuggcuugcaaggacccugagcugcggcauugaagcacacccaacccaacucgacugaagucagccucacugaaccggaucugagaaucuucucucucugggcuugccagggcucuccgaaccuagcuagcauccucuucaauuccaacuagaaagcuuaccauggagcugcucauccuuaaggccaacgcuauuaccacaauacugacugcagugacguucugcuuugccagcggccagaauaucaccgaagaguucuaccaauccacauguucugcggucucaaaaggguauuugagugcuuuaagaacuggaugguacaccagcguuauuacaaucgaacuguccaacauuaaggagaauaaaugcaacgguaccgacgccaaggugaaacuaaucaagcaggaacucgauaaguauaaaaaugcaguaacugagcugcagcuucugaugcagucuacacccgccaccggcucggggucagcuauauguagcggaguggcagucugcaagguguugcaccucgagggcgaaguuaacaaaaucaagagugcccugcuguccacgaauaaagcuguggucucucucagcaacgguguguccguauuaacuuuuaagguucuggaccuuaagaauuacauugauaaacaauugcugccuauccuaaacaagcagucauguaguauuagcaauaucgagaccgugauagaguuccagcagaaaaacaauaggcuccuggaaauuacacgggaguuuucugucaacgccggggugacuaccccaguguccacauauaugcuuaccaauucagaacuguugagccucaucaacgacaugccgauuacgaacgaucaaaagaaacugaugaguaauaacguccagaucguucgccagcagucuuacuccaucaugugcauuauaaaggaggaaguguuagcguauguagugcaacugccccucuacggagucaucgacacuccuuguuggaaacuucauacaagcccacugugcaccacuaauacaaaggagggcucgaacauuuguuugacccgaacggaucguggcugguacugcgacaaugcagggucuguguccuucuuuccccaggccgaaaccuguaagguucagucaaacagaguguucugcgauacaaugaauaguagaacucugccuagcgaggucaaccucugcaauguggacaucuuuaacccaaaauaugauuguaagauaaugaccuccaaaacagacguaucuagcucaguuauuaccagucugggagcuaucguguccugcuacgguaagacuaaauguacagccagcaauaagaacaggggcaucauuaagaccuucucuaaugggugcgauuaugucucaaacaaaggaguggacacugucagugugggcaauacgcuuuacuguguuaacaagcaagaggguaaaagccuguaugugaagggggaacccaucauuaacuuuuacgacccuuugguauucccauccgaugaguuugacgcaucuauaucgcaggucaaugagaaaaucaaccagagccucgcuuucauucggaaguccgaugaacuguuacacaaugugaacgccggaaagucaacaaccaauaucaugaucacuaccauuauaaucguuauuaucgugauucugcuaagucucaucgcggucggccugcuuuuguauugcaaagcccgcucuacaccggugacccugagcaaggaccagcucuccggcauaaacaauaucgcauucucaaacugaggacuagugaagggaacacccaaauuuaauucagccuuaagcacaauuaauuaagagugaaacguaauuguacaagcaguuggucacccaccauagggcaugaucaacaccgcaaccuuuccuuuuucccccagugauucugaaaaaccccucuucccuucagcuugcuuagauguuccaaauuuaguaagcuuaaggcggccuacagaagaaaaagaaaaaaaaggccacaaaaguucccucucacuuucaguaaauaaaauaaaagcagcaacagaaauaaagaaauaaaugaaauucaaaaugaaauaaauauuguguugugcagcauuaaaaaaucaauaaaaauuaaaaaugagcaagaucuaaaaaaaaaaaaaaaaaaaaaaaaaaaaaaaaaaaaaaaaaaaaaaaaaaaaaaaaaaaaaaaaugcaucccccccccccccccccccccccccccccccaaaggcucuuuucagagccaccagaauu

SEQ ID NO: 4737 - RNA, 2277 nt, Artificial Sequence
  mRNA product Design d-3 comprising derived and/or modified sequence from HRSV(A2)__F_DSCav1_mut4 (opt4)
gggagagggcgcuuggcuugcaaggacccugagcugcggcauugaagcacacccaacccaacucgacugaagucagccucacugaaccggaucugagaaucuucucucucugggcuugccagggcucuccgaaccuagcuagcauccucuucaauuccaacuagaaagcuuaccauggagcugcugauccugaaggccaacgccaucaccaccauccugaccgccgugaccuucugcuucgccagcggccagaacaucaccgaggaguucuaccagagcaccugcagcgccgugagcaagggcuaccugagcgcccugagaaccggcugguacaccagcgugaucaccaucgagcugagcaacaucaaggagaacaagugcaacggcaccgacgccaaggugaagcugaucaagcaggagcuggacaaguacaagaacgccgugaccgagcugcagcugcugaugcagagcacccccgccaccggcagcggcagcgccaucugcagcggcguggccgugugcaaggugcugcaccuggagggcgaggugaacaagaucaagagcgcccugcugagcaccaacaaggccguggugagccugagcaacggcgugagcgugcugaccuucaaggugcuggaccugaagaacuacaucgacaagcagcugcugcccauccugaacaagcagagcugcagcaucagcaacaucgagaccgugaucgaguuccagcagaagaacaacagacugcuggagaucaccagagaguucagcgugaacgccggcgugaccacccccgugagcaccuacaugcugaccaacagcgagcugcugagccugaucaacgacaugcccaucaccaacgaccagaagaagcugaugagcaacaacgugcagaucgugagacagcagagcuacagcaucaugugcaucaucaaggaggaggugcuggccuacguggugcagcugccccuguacggcgugaucgacacccccugcuggaagcugcacaccagcccccugugcaccaccaacaccaaggagggcagcaacaucugccugaccagaaccgacagaggcugguacugcgacaacgccggcagcgugagcuucuucccccaggccgagaccugcaaggugcagagcaacagaguguucugcgacaccaugaacagcagaacccugcccagcgaggugaaccugugcaacguggacaucuucaaccccaaguacgacugcaagaucaugaccagcaagaccgacgugagcagcagcgugaucaccagccugggcgccaucgugagcugcuacggcaagaccaagugcaccgccagcaacaagaacagaggcaucaucaagaccuucagcaacggcugcgacuacgugagcaacaagggcguggacaccgugagcgugggcaacacccuguacugcgugaacaagcaggagggcaagagccuguacgugaagggcgagcccaucaucaacuucuacgacccccugguguuccccagcgacgaguucgacgccagcaucagccaggugaacgagaagaucaaccagagccuggccuucaucagaaagagcgacgagcugcugcacaacgugaacgccggcaagagcaccaccaacaucaugaucaccaccaucaucaucgugaucaucgugauccugcugagccugaucgccgugggccugcugcuguacugcaaggccagaagcacccccgugacccugagcaaggaccagcugagcggcaucaacaacaucgccuucagcaacugaggacuagugaagggaacacccaaauuuaauucagccuuaagcacaauuaauuaagagugaaacguaauuguacaagcaguuggucacccaccauagggcaugaucaacaccgcaaccuuuccuuuuucccccagugauucugaaaaaccccucuucccuucagcuugcuuagauguuccaaauuuaguaagcuuaaggcggccuacagaagaaaaagaaaaaaaaggccacaaaaguucccucucacuuucaguaaauaaaauaaaagcagcaacagaaauaaagaaauaaaugaaauucaaaaugaaauaaauauuguguugugcagcauuaaaaaaucaauaaaaauuaaaaaugagcaagaucuaaaaaaaaaaaaaaaaaaaaaaaaaaaaaaaaaaaaaaaaaaaaaaaaaaaaaaaaaaaaaaaaugcaucccccccccccccccccccccccccccccccaaaggcucuuuucagagccaccagaauu

SEQ ID NO: 4738 - RNA, 2277 nt, Artificial Sequence
  mRNA product Design d-3 comprising derived and/or modified sequence from HRSV(A2)__F_DSCav1_mut4 (opt5)
gggagagggcgcuuggcuugcaaggacccugagcugcggcauugaagcacacccaacccaacucgacugaagucagccucacugaaccggaucugagaaucuucucucucugggcuugccagggcucuccgaaccuagcuagcauccucuucaauuccaacuagaaagcuuaccauggagcugcucauccugaaggccaacgcuauuaccacaauccuuacggccgugaccuucugcuuugcgagcggccagaauauuacagaagaguucuaccaauccaccuguucugcugucagcaaaggguaucuguccgcccucagaacaggaugguacaccucuguuaucacaauugaacugagcaacaucaaggagaauaaaugcaacggcaccgacgccaaggugaaacuuaucaagcaggaacuggauaaguauaaaaaugcugugacggagcuccagcugcugaugcaguccacccccgccacagggucuggaagcgcuauuuguuccggcgucgccgugugcaagguucuccaccuggagggggaagugaacaaaaucaagagcgcgcuucugucuaccaauaaagccgucgugucccucagcaacggaguuucugugcugacauuuaagguccuugaccugaagaauuacauugauaaacaacuccugccuauccugaacaagcaguccuguagcauuucuaauaucgagaccgugauugaguuccagcagaaaaacaaucggcuccuggaaaucacgcgcgaguuuuccgugaacgcuggcgucacaaccccgguuagcacauauaugcuuaccaauuccgaacugcucucucugaucaacgacaugcccauuaccaacgaucaaaagaaacuuaugagcaauaacgugcagaucgugagacagcaguccuacagcauuaugugcaucauuaaggaggaaguccuggccuaugugguucaacucccucuguacggcgugaucgacacacccuguuggaaacugcauacgucuccucucugcaccacaaauaccaaggagggguccaacaucugucugacacggaccgaucgcggaugguacugcgacaaugcuggcagcgucucuuucuuuccccaggccgaaacguguaaggugcagagcaacagaguuuucugcgauacaaugaacuccagaacccugccuucugaggugaaucucugcaaugucgacauuuuuaacccgaaauaugauuguaagaucaugaccagcaaaacagacguguccagcucugucauuaccucccugggggcgaucgugagcugcuacggaaagacaaaauguacggccucuaauaagaaccggggcauuaucaagaccuucuccaaugggugcgauuauguuagcaacaaaggaguggacacagucuccgugggcaauacccuuuacuguguuaacaagcaagagggcaaaucucuguaugugaagggggaacccaucauuaacuuuuacgacccucucgucuuccccagcgaugaguuugacgcuuccaucucucaggugaaugagaaaauuaaccagagccuggccuucauccgcaaguccgaugaacugcuccacaaugugaacgcuggaaagagcacaaccaauauuaugaucacgaccauuaucaucguuauuaucgucauucugcuuucucugaucgccgugggccuccugcuguauugcaaagccagauccacaccugugacccuuagcaaggaccagcucucugggauuaacaauaucgcuuucuccaacugaggacuagugaagggaacacccaaauuuaauucagccuuaagcacaauuaauuaagagugaaacguaauuguacaagcaguuggucacccaccauagggcaugaucaacaccgcaaccuuuccuuuuucccccagugauucugaaaaaccccucuucccuucagcuugcuuagauguuccaaauuuaguaagcuuaaggcggccuacagaagaaaaagaaaaaaaaggccacaaaaguucccucucacuuucaguaaauaaaauaaaagcagcaacagaaauaaagaaauaaaugaaauucaaaaugaaauaaauauuguguugugcagcauuaaaaaaucaauaaaaauuaaaaaugagcaagaucuaaaaaaaaaaaaaaaaaaaaaaaaaaaaaaaaaaaaaaaaaaaaaaaaaaaaaaaaaaaaaaaaugcaucccccccccccccccccccccccccccccccaaaggcucuuuucagagccaccagaauu

SEQ ID NO: 4739 - RNA, 2277 nt, Artificial Sequence
  mRNA product Design d-3 comprising derived and/or modified sequence from HRSV(A2)__F_DSCav1_mut4 (opt6)
gggagagggcgcuuggcuugcaaggacccugagcugcggcauugaagcacacccaacccaacucgacugaagucagccucacugaaccggaucugagaaucuucucucucugggcuugccagggcucuccgaaccuagcuagcauccucuucaauuccaacuagaaagcuuaccauggaacuucuaauacucaaagccaacgcaauaacaacaauauuaacagccguaacauuuugcuucgcaucaggucaaaacauaacagaagaguucuaccaauccacaugcucagcaguaucaaaaggauauuuaagugcucuaagaacaggaugguacacauccguaauaacaaucgaacuaucaaacauaaaagaaaauaaauguaauggaacagacgccaaaguaaaauuaaucaaacaagaacuagacaaauacaaaaacgcaguuacugaauuacaauuauuaaugcaaucaacaccggccacaggaucuggaucagcaauaugcucaggaguagcagucugcaaaguauuacaccuagaaggggaaguuaauaaaaucaaaucagcauuacuauccaccaacaaagcgguaguuucacucuccaacggcguaucugucuuaacauucaaaguauuagaccuaaaaaacuacauugacaaacaacuacuaccaauccuaaacaaacaaucauguuccauaagcaauauagaaacaguaauagaauuucaacaaaaaaacaacagacuauuagaaauaacaagagaauuuuccgucaaugcaggaguuacuaccccugucuccaccuauaugcuaaccaauuccgaacucuuaucauuaauaaacgacaugccuaucacaaaugaccaaaaaaaauuaaugagcaacaacguacaaauaguacgacaacaaucauacucaaucaugugcauaauaaaagaagaaguccuagcauacguuguacaacuaccacuauacggagucauagauaccccaugcuggaaacuccauacaagcccacuaugcacuacaaacacaaaagaaggcucuaauauaugucuaacaagaacagaccgaggaugguacugcgauaaugccggcucagucucauucuuuccgcaagccgaaacuuguaaaguacaaaguaacagaguauuuugugacaccaugaacucaagaacccucccaagcgaagucaaucuaugcaacguugauauauucaaucccaaauacgacugcaaaaucaugaccucaaaaacagacgucagcucauccguuauaacaucacuaggagccaucguaucuugcuauggaaaaacaaaaugcacagcaagcaauaaaaacagaggcauaauaaaaacauucucaaauggaugcgacuacguaucaaacaaaggagucgacacaguuuccguaggaaacacuuuauacugcguaaacaaacaagaaggaaaaucauuauacgucaaaggugaaccaauaauaaacuucuacgauccacuuguauucccaucagacgaauuugacgcaucaauuucacaaguaaacgaaaaaauaaaccaaucacucgcauucauaagaaaaucagaugaacuacuacauaacguaaacgcaggaaaauccacaacaaacaucaugauaacaaccaucauaaucguaauaaucguaauacuauuaucccuaauugcaguaggauuacucuuauauugcaaagcaagaucaacaccaguaacccucaguaaagaccaacuauccggaauaaauaacaucgcauucucaaacuaaggacuagugaagggaacacccaaauuuaauucagccuuaagcacaauuaauuaagagugaaacguaauuguacaagcaguuggucacccaccauagggcaugaucaacaccgcaaccuuuccuuuuucccccagugauucugaaaaaccccucuucccuucagcuugcuuagauguuccaaauuuaguaagcuuaaggcggccuacagaagaaaaagaaaaaaaaggccacaaaaguucccucucacuuucaguaaauaaaauaaaagcagcaacagaaauaaagaaauaaaugaaauucaaaaugaaauaaauauuguguugugcagcauuaaaaaaucaauaaaaauuaaaaaugagcaagaucuaaaaaaaaaaaaaaaaaaaaaaaaaaaaaaaaaaaaaaaaaaaaaaaaaaaaaaaaaaaaaaaaugcaucccccccccccccccccccccccccccccccaaaggcucuuuucagagccaccagaauu

SEQ ID NO: 4740 - RNA, 2277 nt, Artificial Sequence
  mRNA product Design d-3 comprising derived and/or modified sequence from HRSV(A2)__F_DSCav1_mut4 (opt11)
gggagagggcgcuuggcuugcaaggacccugagcugcggcauugaagcacacccaacccaacucgacugaagucagccucacugaaccggaucugagaaucuucucucucugggcuugccagggcucuccgaaccuagcuagcauccucuucaauuccaacuagaaagcuuaccauggaacugcucauccucaaagccaacgccaucaccaccauucuuaccgccgucacauucugcuucgccucaggccaaaacaucaccgaagaauuuuaccaauccacuuguucagccgucucaaaaggauaccuaucagcccuccguaccggcugguacaccucggucauaacaauagaacucuccaacauaaaagaaaacaaaugcaacggcaccgacgccaaggucaaacugauaaaacaagaacuugauaaauacaaaaacgccgucacugaacuccaacuccucaugcaauccacucccgcuacuggcucuggcuccgccaucugcucuggcgucgccgucuguaaaguacuccaccucgaaggggaagucaacaaaaucaaaucagcccuccuuagcaccaacaaggccgucgucucccucucaaacggagucagcguccucaccuucaagguccucgaccucaagaacuacaucgacaaacaacuccugcccauccuaaauaaacaauccugcucuaucuccaauaucgaaaccguuauagaguuccaacagaaaaacaaccgacuccucgaaaucacccgcgaguucuccgucaacgcaggcgucaccaccccugugucaaccuacaugcucaccaacagcgaacuacucucacucaucaaugacaugcccaucaccaacgaccaaaagaaacucauguccaacaacguccaaaucguacgucaacaauccuacagcaucaugugcaucauaaaagaagaaguccucgccuacgucguccaacuuccccucuacggcgucauagacacccccugcuggaaacugcauaccucaccccuaugcaccaccaacacuaaagaaggcuccaacaucugccucacccgcacggaccgcggcugguacugcgacaacgccggcuccgucuccuucuucccccaagccgaaacuuguaaaguccaauccaacagagucuucugcgacaccaugaacucuagaacgcugccauccgagguaaaccuaugcaacgucgacaucuucaaucccaaauacgacugcaagaucaugaccucaaaaaccgacguauccuccucaguaaucaccagucucggagcuaucgucuccugcuacggcaaaaccaaaugcacggccucuaacaaaaaccgcggcaucaucaaaaccuucucaaacggaugcgacuacgucagcaacaaaggcguagauaccgucucugucggcaacacacuguacugcguaaacaagcaagaaggaaaaucccucuacguaaaaggcgaacccaucaucaacuucuacgacccccucguuuuccccucagaugaauuugacgccucgauaucacaagucaacgaaaagauaaaucagucccucgccuucauccgaaaauccgacgaacuccuccacaacguuaacgcaggaaaguccaccacaaacaucaugauaacuacaaucauaauagucauuaucgucauacuccucucccuaaucgccguaggccugcuacucuacugcaaagcccgcucaacccccgucacucucucaaaagaccaacucuccggcaucaauaacaucgccuucucaaacuaaggacuagugaagggaacacccaaauuuaauucagccuuaagcacaauuaauuaagagugaaacguaauuguacaagcaguuggucacccaccauagggcaugaucaacaccgcaaccuuuccuuuuucccccagugauucugaaaaaccccucuucccuucagcuugcuuagauguuccaaauuuaguaagcuuaaggcggccuacagaagaaaaagaaaaaaaaggccacaaaaguucccucucacuuucaguaaauaaaauaaaagcagcaacagaaauaaagaaauaaaugaaauucaaaaugaaauaaauauuguguugugcagcauuaaaaaaucaauaaaaauuaaaaaugagcaagaucuaaaaaaaaaaaaaaaaaaaaaaaaaaaaaaaaaaaaaaaaaaaaaaaaaaaaaaaaaaaaaaaaugcaucccccccccccccccccccccccccccccccaaaggcucuuuucagagccaccagaauu

SEQ ID NO: 4741 - RNA, 1960 nt, Artificial Sequence
  mRNA product Design d-4 comprising derived and/or modified sequence from HRSV(A2)__F_DSCav1_mut4 (opt1)
gggagagucccgcagucggcguccagcggcucugcuuguucgugugugugucguugcaggccuuauucaagcuuaccauggagcugcucauccugaaggccaacgccaucaccaccauccugacggcggugaccuucugcuucgccagcggccagaacaucaccgaggaguucuaccaguccacgugcagcgccgucuccaagggguaccucagcgcccugcggaccggcugguacaccuccgugaucaccaucgagcugagcaacaucaaggagaacaagugcaacgggaccgacgccaaggugaagcucaucaagcaggagcuggacaaguacaagaacgcggucacggagcugcagcuccugaugcaguccaccccggcaaccggcuccggcuccgccaucugcagcggcgucgccgugugcaaggugcugcaccucgagggggaggucaacaagaucaagagcgcccugcuguccaccaacaaggccguggugagccucuccaacggcgucagcgugcugaccuucaaggugcuggaccucaagaacuacaucgacaagcagcugcugcccauccugaacaagcagagcugcuccaucagcaacaucgagacggugaucgaguuccagcagaagaacaaccggcuccuggagaucacccgcgaguucagcgugaacgccggggucaccacccccguguccacguacaugcugaccaacagcgagcuccugucccugaucaacgacaugccgaucaccaacgaccagaagaagcucaugagcaacaacgugcagaucguccggcagcaguccuacagcaucaugugcaucaucaaggaggaggugcuggcguacgugguccagcugccccucuacggcgugaucgacacccccugcuggaagcugcacacgagcccccugugcaccaccaacaccaaggagggguccaacaucugccucacgcgcaccgaccggggcugguacugcgacaacgccggcagcgucuccuucuucccgcaggccgagaccugcaaggugcagagcaaccgcguguucugcgacaccaugaacucccggacgcugcccagcgagguaaaccucugcaacgucgacaucuucaaccccaaguacgacugcaagaucaugaccuccaagaccgacgugagcuccagcgugaucaccucccugggggccaucgucagcugcuacggcaagacgaagugcaccgccagcaacaagaaccgggggaucaucaagaccuucuccaacggcugcgacuacgugagcaacaagggcguggacaccguguccgucgggaacacccuguacugcgugaacaagcaggagggcaagagccucuacgugaagggggagcccaucaucaacuucuacgacccgcuggucuuccccuccgacgaguucgacgcgagcaucucccaggugaacgagaagaucaaccagagccuggccuucauccgcaaguccgacgagcugcuccacaacgugaacgccggcaagagcacgaccaacaucaugaucaccaccaucaucaucgucaucaucgugauccugcugucccucaucgccguggggcugcugcucuacugcaaggcccggagcacgcccgucacccuguccaaggaccagcugagcggcaucaacaacaucgcguucuccaacugaggacuaguggaagcauuuuccuggcugauuaaaagaaauuacucagcuauggucaucuguuccuguuagaaggcuaugcagcauauuauauacuaugcgcauguuaugaaaugcauaauaaaaaauuuuaaaaaaucuaaaagaucuaaaaaaaaaaaaaaaaaaaaaaaaaaaaaaaaaaaaaaaaaaaaaaaaaaaaaaaaaaaaaaaaugcaucccccccccccccccccccccccccccccccaaaggcucuuuucagagccaccagaauu

SEQ ID NO: 4742 - RNA, 1960 nt, Artificial Sequence
  mRNA product Design d-4 comprising derived and/or modified sequence from HRSV(A2)__F_DSCav1_mut4 (opt1)
gggagagucccgcagucggcguccagcggcucugcuuguucgugugugugucguugcaggccuuauucaagcuuaccauggagcugcucauccugaaggccaacgccaucaccaccauccugacggcggugaccuucugcuucgccagcggccagaacaucaccgaggaguucuaccaguccacgugcagcgccgucuccaagggguaccucagcgcccugcgcaccggcugguacaccuccgugaucaccaucgagcugagcaacaucaaggagaacaagugcaacgggaccgacgccaaggugaagcucaucaagcaggagcuggacaaguacaagaacgcggucacggagcugcagcuccugaugcaguccacccccgccaccggcagcggguccgccaucugcagcggcguggccgugugcaagguccugcaccucgagggcgaggugaacaagaucaaguccgcgcugcugagcaccaacaaggccguggucucccucagcaacgggguguccgugcugacguucaagguccuggaccucaagaacuacaucgacaagcagcugcugccgauccucaacaagcagagcugcuccaucagcaacaucgagaccgugaucgaguuccagcagaagaacaaccggcugcuggagaucacccgcgaguucuccgugaacgccggcgucaccacgcccgugagcaccuacaugcucaccaacagcgagcugcugucccucaucaacgacaugcccaucaccaacgaccagaagaagcugaugagcaacaacgugcagaucguccggcagcaguccuacagcaucaugugcaucaucaaggaggaggugcuggccuacgugguccagcucccccuguacggggugaucgacacgccgugcuggaagcugcacaccagcccccucugcaccaccaacacgaaggagggcuccaacaucugccugacccgcaccgaccgggggugguacugcgacaacgccggcuccgugagcuucuucccccaggcggagaccugcaagguccaguccaaccgcguguucugcgacacgaugaacagccggacccuccccuccgaggucaaccugugcaacguggacaucuucaacccgaaguacgacugcaagaucaugaccagcaagaccgacguguccagcuccgucaucacgagccugggcgccaucguguccugcuacgggaagaccaagugcaccgccagcaacaagaaccggggcaucaucaagaccuucuccaacgggugcgacuacgugagcaacaagggcgucgacacggugagcgugggcaacacccucuacugcgucaacaagcaggaggggaagucccuguacgugaagggcgagcccaucaucaacuucuacgacccccugguguuccccagcgacgaguucgacgccuccaucagccaggucaacgagaagaucaaccagucccucgccuucauccgcaagagcgacgagcugcugcacaacgugaacgcggggaaguccaccaccaacaucaugaucaccacgaucaucaucgugaucaucgucauccuccugagccugaucgccgugggccuccugcuguacugcaaggcccgguccaccccggugacccugagcaaggaccagcucuccgggaucaacaacaucgccuucagcaacugaggacuaguggaagcauuuuccuggcugauuaaaagaaauuacucagcuauggucaucuguuccuguuagaaggcuaugcagcauauuauauacuaugcgcauguuaugaaaugcauaauaaaaaauuuuaaaaaaucuaaaagaucuaaaaaaaaaaaaaaaaaaaaaaaaaaaaaaaaaaaaaaaaaaaaaaaaaaaaaaaaaaaaaaaaugcaucccccccccccccccccccccccccccccccaaaggcucuuuucagagccaccagaauu

SEQ ID NO: 4743 - RNA, 1960 nt, Artificial Sequence
  mRNA product Design d-4 comprising derived and/or modified sequence from HRSV(A2)__F_DSCav1_mut4 (opt2)
gggagagucccgcagucggcguccagcggcucugcuuguucgugugugugucguugcaggccuuauucaagcuuaccauggagcuccucauccucaaggccaacgccaucaccaccauccucaccgccgucaccuucugcuucgccuccggccagaacaucaccgaggaguucuaccaguccaccugcuccgccgucuccaagggcuaccucuccgcccuccgcaccggcugguacaccuccgucaucaccaucgagcucuccaacaucaaggagaacaagugcaacggcaccgacgccaaggucaagcucaucaagcaggagcucgacaaguacaagaacgccgucaccgagcuccagcuccucaugcaguccacccccgccaccggcuccggcuccgccaucugcuccggcgucgccgucugcaagguccuccaccucgagggcgaggucaacaagaucaaguccgcccuccucuccaccaacaaggccgucgucucccucuccaacggcgucuccguccucaccuucaagguccucgaccucaagaacuacaucgacaagcagcuccuccccauccucaacaagcaguccugcuccaucuccaacaucgagaccgucaucgaguuccagcagaagaacaaccgccuccucgagaucacccgcgaguucuccgucaacgccggcgucaccacccccgucuccaccuacaugcucaccaacuccgagcuccucucccucaucaacgacaugcccaucaccaacgaccagaagaagcucauguccaacaacguccagaucguccgccagcaguccuacuccaucaugugcaucaucaaggaggagguccucgccuacgucguccagcucccccucuacggcgucaucgacacccccugcuggaagcuccacaccuccccccucugcaccaccaacaccaaggagggcuccaacaucugccucacccgcaccgaccgcggcugguacugcgacaacgccggcuccgucuccuucuucccccaggccgagaccugcaagguccaguccaaccgcgucuucugcgacaccaugaacucccgcacccuccccuccgaggucaaccucugcaacgucgacaucuucaaccccaaguacgacugcaagaucaugaccuccaagaccgacgucuccuccuccgucaucaccucccucggcgccaucgucuccugcuacggcaagaccaagugcaccgccuccaacaagaaccgcggcaucaucaagaccuucuccaacggcugcgacuacgucuccaacaagggcgucgacaccgucuccgucggcaacacccucuacugcgucaacaagcaggagggcaagucccucuacgucaagggcgagcccaucaucaacuucuacgacccccucgucuuccccuccgacgaguucgacgccuccaucucccaggucaacgagaagaucaaccagucccucgccuucauccgcaaguccgacgagcuccuccacaacgucaacgccggcaaguccaccaccaacaucaugaucaccaccaucaucaucgucaucaucgucauccuccucucccucaucgccgucggccuccuccucuacugcaaggcccgcuccacccccgucacccucuccaaggaccagcucuccggcaucaacaacaucgccuucuccaacugaggacuaguggaagcauuuuccuggcugauuaaaagaaauuacucagcuauggucaucuguuccuguuagaaggcuaugcagcauauuauauacuaugcgcauguuaugaaaugcauaauaaaaaauuuuaaaaaaucuaaaagaucuaaaaaaaaaaaaaaaaaaaaaaaaaaaaaaaaaaaaaaaaaaaaaaaaaaaaaaaaaaaaaaaaugcaucccccccccccccccccccccccccccccccaaaggcucuuuucagagccaccagaauu

SEQ ID NO: 4744 - RNA, 1960 nt, Artificial Sequence
  mRNA product Design d-4 comprising derived and/or modified sequence from HRSV(A2)__F_DSCav1_mut4 (opt3)
gggagagucccgcagucggcguccagcggcucugcuuguucgugugugugucguugcaggccuuauucaagcuuaccauggagcugcucauccuuaaggccaacgcuauuaccacaauacugacugcagugacguucugcuuugccagcggccagaauaucaccgaagaguucuaccaauccacauguucugcggucucaaaaggguauuugagugcuuuaagaacuggaugguacaccagcguuauuacaaucgaacuguccaacauuaaggagaauaaaugcaacgguaccgacgccaaggugaaacuaaucaagcaggaacucgauaaguauaaaaaugcaguaacugagcugcagcuucugaugcagucuacacccgccaccggcucggggucagcuauauguagcggaguggcagucugcaagguguugcaccucgagggcgaaguuaacaaaaucaagagugcccugcuguccacgaauaaagcuguggucucucucagcaacgguguguccguauuaacuuuuaagguucuggaccuuaagaauuacauugauaaacaauugcugccuauccuaaacaagcagucauguaguauuagcaauaucgagaccgugauagaguuccagcagaaaaacaauaggcuccuggaaauuacacgggaguuuucugucaacgccggggugacuaccccaguguccacauauaugcuuaccaauucagaacuguugagccucaucaacgacaugccgauuacgaacgaucaaaagaaacugaugaguaauaacguccagaucguucgccagcagucuuacuccaucaugugcauuauaaaggaggaaguguuagcguauguagugcaacugccccucuacggagucaucgacacuccuuguuggaaacuucauacaagcccacugugcaccacuaauacaaaggagggcucgaacauuuguuugacccgaacggaucguggcugguacugcgacaaugcagggucuguguccuucuuuccccaggccgaaaccuguaagguucagucaaacagaguguucugcgauacaaugaauaguagaacucugccuagcgaggucaaccucugcaauguggacaucuuuaacccaaaauaugauuguaagauaaugaccuccaaaacagacguaucuagcucaguuauuaccagucugggagcuaucguguccugcuacgguaagacuaaauguacagccagcaauaagaacaggggcaucauuaagaccuucucuaaugggugcgauuaugucucaaacaaaggaguggacacugucagugugggcaauacgcuuuacuguguuaacaagcaagaggguaaaagccuguaugugaagggggaacccaucauuaacuuuuacgacccuuugguauucccauccgaugaguuugacgcaucuauaucgcaggucaaugagaaaaucaaccagagccucgcuuucauucggaaguccgaugaacuguuacacaaugugaacgccggaaagucaacaaccaauaucaugaucacuaccauuauaaucguuauuaucgugauucugcuaagucucaucgcggucggccugcuuuuguauugcaaagcccgcucuacaccggugacccugagcaaggaccagcucuccggcauaaacaauaucgcauucucaaacugaggacuaguggaagcauuuuccuggcugauuaaaagaaauuacucagcuauggucaucuguuccuguuagaaggcuaugcagcauauuauauacuaugcgcauguuaugaaaugcauaauaaaaaauuuuaaaaaaucuaaaagaucuaaaaaaaaaaaaaaaaaaaaaaaaaaaaaaaaaaaaaaaaaaaaaaaaaaaaaaaaaaaaaaaaugcaucccccccccccccccccccccccccccccccaaaggcucuuuucagagccaccagaauu

SEQ ID NO: 4745 - RNA, 1960 nt, Artificial Sequence
  mRNA product Design d-4 comprising derived and/or modified sequence from HRSV(A2)__F_DSCav1_mut4 (opt4)
gggagagucccgcagucggcguccagcggcucugcuuguucgugugugugucguugcaggccuuauucaagcuuaccauggagcugcugauccugaaggccaacgccaucaccaccauccugaccgccgugaccuucugcuucgccagcggccagaacaucaccgaggaguucuaccagagcaccugcagcgccgugagcaagggcuaccugagcgcccugagaaccggcugguacaccagcgugaucaccaucgagcugagcaacaucaaggagaacaagugcaacggcaccgacgccaaggugaagcugaucaagcaggagcuggacaaguacaagaacgccgugaccgagcugcagcugcugaugcagagcacccccgccaccggcagcggcagcgccaucugcagcggcguggccgugugcaaggugcugcaccuggagggcgaggugaacaagaucaagagcgcccugcugagcaccaacaaggccguggugagccugagcaacggcgugagcgugcugaccuucaaggugcuggaccugaagaacuacaucgacaagcagcugcugcccauccugaacaagcagagcugcagcaucagcaacaucgagaccgugaucgaguuccagcagaagaacaacagacugcuggagaucaccagagaguucagcgugaacgccggcgugaccacccccgugagcaccuacaugcugaccaacagcgagcugcugagccugaucaacgacaugcccaucaccaacgaccagaagaagcugaugagcaacaacgugcagaucgugagacagcagagcuacagcaucaugugcaucaucaaggaggaggugcuggccuacguggugcagcugccccuguacggcgugaucgacacccccugcuggaagcugcacaccagcccccugugcaccaccaacaccaaggagggcagcaacaucugccugaccagaaccgacagaggcugguacugcgacaacgccggcagcgugagcuucuucccccaggccgagaccugcaaggugcagagcaacagaguguucugcgacaccaugaacagcagaacccugcccagcgaggugaaccugugcaacguggacaucuucaaccccaaguacgacugcaagaucaugaccagcaagaccgacgugagcagcagcgugaucaccagccugggcgccaucgugagcugcuacggcaagaccaagugcaccgccagcaacaagaacagaggcaucaucaagaccuucagcaacggcugcgacuacgugagcaacaagggcguggacaccgugagcgugggcaacacccuguacugcgugaacaagcaggagggcaagagccuguacgugaagggcgagcccaucaucaacuucuacgacccccugguguuccccagcgacgaguucgacgccagcaucagccaggugaacgagaagaucaaccagagccuggccuucaucagaaagagcgacgagcugcugcacaacgugaacgccggcaagagcaccaccaacaucaugaucaccaccaucaucaucgugaucaucgugauccugcugagccugaucgccgugggccugcugcuguacugcaaggccagaagcacccccgugacccugagcaaggaccagcugagcggcaucaacaacaucgccuucagcaacugaggacuaguggaagcauuuuccuggcugauuaaaagaaauuacucagcuauggucaucuguuccuguuagaaggcuaugcagcauauuauauacuaugcgcauguuaugaaaugcauaauaaaaaauuuuaaaaaaucuaaaagaucuaaaaaaaaaaaaaaaaaaaaaaaaaaaaaaaaaaaaaaaaaaaaaaaaaaaaaaaaaaaaaaaaugcaucccccccccccccccccccccccccccccccaaaggcucuuuucagagccaccagaauu

SEQ ID NO: 4746 - RNA, 1960 nt, Artificial Sequence
  mRNA product Design d-4 comprising derived and/or modified sequence from HRSV(A2)__F_DSCav1_mut4 (opt5)
gggagagucccgcagucggcguccagcggcucugcuuguucgugugugugucguugcaggccuuauucaagcuuaccauggagcugcucauccugaaggccaacgcuauuaccacaauccuuacggccgugaccuucugcuuugcgagcggccagaauauuacagaagaguucuaccaauccaccuguucugcugucagcaaaggguaucuguccgcccucagaacaggaugguacaccucuguuaucacaauugaacugagcaacaucaaggagaauaaaugcaacggcaccgacgccaaggugaaacuuaucaagcaggaacuggauaaguauaaaaaugcugugacggagcuccagcugcugaugcaguccacccccgccacagggucuggaagcgcuauuuguuccggcgucgccgugugcaagguucuccaccuggagggggaagugaacaaaaucaagagcgcgcuucugucuaccaauaaagccgucgugucccucagcaacggaguuucugugcugacauuuaagguccuugaccugaagaauuacauugauaaacaacuccugccuauccugaacaagcaguccuguagcauuucuaauaucgagaccgugauugaguuccagcagaaaaacaaucggcuccuggaaaucacgcgcgaguuuuccgugaacgcuggcgucacaaccccgguuagcacauauaugcuuaccaauuccgaacugcucucucugaucaacgacaugcccauuaccaacgaucaaaagaaacuuaugagcaauaacgugcagaucgugagacagcaguccuacagcauuaugugcaucauuaaggaggaaguccuggccuaugugguucaacucccucuguacggcgugaucgacacacccuguuggaaacugcauacgucuccucucugcaccacaaauaccaaggagggguccaacaucugucugacacggaccgaucgcggaugguacugcgacaaugcuggcagcgucucuuucuuuccccaggccgaaacguguaaggugcagagcaacagaguuuucugcgauacaaugaacuccagaacccugccuucugaggugaaucucugcaaugucgacauuuuuaacccgaaauaugauuguaagaucaugaccagcaaaacagacguguccagcucugucauuaccucccugggggcgaucgugagcugcuacggaaagacaaaauguacggccucuaauaagaaccggggcauuaucaagaccuucuccaaugggugcgauuauguuagcaacaaaggaguggacacagucuccgugggcaauacccuuuacuguguuaacaagcaagagggcaaaucucuguaugugaagggggaacccaucauuaacuuuuacgacccucucgucuuccccagcgaugaguuugacgcuuccaucucucaggugaaugagaaaauuaaccagagccuggccuucauccgcaaguccgaugaacugcuccacaaugugaacgcuggaaagagcacaaccaauauuaugaucacgaccauuaucaucguuauuaucgucauucugcuuucucugaucgccgugggccuccugcuguauugcaaagccagauccacaccugugacccuuagcaaggaccagcucucugggauuaacaauaucgcuuucuccaacugaggacuaguggaagcauuuuccuggcugauuaaaagaaauuacucagcuauggucaucuguuccuguuagaaggcuaugcagcauauuauauacuaugcgcauguuaugaaaugcauaauaaaaaauuuuaaaaaaucuaaaagaucuaaaaaaaaaaaaaaaaaaaaaaaaaaaaaaaaaaaaaaaaaaaaaaaaaaaaaaaaaaaaaaaaugcaucccccccccccccccccccccccccccccccaaaggcucuuuucagagccaccagaauu

SEQ ID NO: 4747 - RNA, 1960 nt, Artificial Sequence
  mRNA product Design d-4 comprising derived and/or modified sequence from HRSV(A2)__F_DSCav1_mut4 (opt6)
gggagagucccgcagucggcguccagcggcucugcuuguucgugugugugucguugcaggccuuauucaagcuuaccauggaacuucuaauacucaaagccaacgcaauaacaacaauauuaacagccguaacauuuugcuucgcaucaggucaaaacauaacagaagaguucuaccaauccacaugcucagcaguaucaaaaggauauuuaagugcucuaagaacaggaugguacacauccguaauaacaaucgaacuaucaaacauaaaagaaaauaaauguaauggaacagacgccaaaguaaaauuaaucaaacaagaacuagacaaauacaaaaacgcaguuacugaauuacaauuauuaaugcaaucaacaccggccacaggaucuggaucagcaauaugcucaggaguagcagucugcaaaguauuacaccuagaaggggaaguuaauaaaaucaaaucagcauuacuauccaccaacaaagcgguaguuucacucuccaacggcguaucugucuuaacauucaaaguauuagaccuaaaaaacuacauugacaaacaacuacuaccaauccuaaacaaacaaucauguuccauaagcaauauagaaacaguaauagaauuucaacaaaaaaacaacagacuauuagaaauaacaagagaauuuuccgucaaugcaggaguuacuaccccugucuccaccuauaugcuaaccaauuccgaacucuuaucauuaauaaacgacaugccuaucacaaaugaccaaaaaaaauuaaugagcaacaacguacaaauaguacgacaacaaucauacucaaucaugugcauaauaaaagaagaaguccuagcauacguuguacaacuaccacuauacggagucauagauaccccaugcuggaaacuccauacaagcccacuaugcacuacaaacacaaaagaaggcucuaauauaugucuaacaagaacagaccgaggaugguacugcgauaaugccggcucagucucauucuuuccgcaagccgaaacuuguaaaguacaaaguaacagaguauuuugugacaccaugaacucaagaacccucccaagcgaagucaaucuaugcaacguugauauauucaaucccaaauacgacugcaaaaucaugaccucaaaaacagacgucagcucauccguuauaacaucacuaggagccaucguaucuugcuauggaaaaacaaaaugcacagcaagcaauaaaaacagaggcauaauaaaaacauucucaaauggaugcgacuacguaucaaacaaaggagucgacacaguuuccguaggaaacacuuuauacugcguaaacaaacaagaaggaaaaucauuauacgucaaaggugaaccaauaauaaacuucuacgauccacuuguauucccaucagacgaauuugacgcaucaauuucacaaguaaacgaaaaaauaaaccaaucacucgcauucauaagaaaaucagaugaacuacuacauaacguaaacgcaggaaaauccacaacaaacaucaugauaacaaccaucauaaucguaauaaucguaauacuauuaucccuaauugcaguaggauuacucuuauauugcaaagcaagaucaacaccaguaacccucaguaaagaccaacuauccggaauaaauaacaucgcauucucaaacuaaggacuaguggaagcauuuuccuggcugauuaaaagaaauuacucagcuauggucaucuguuccuguuagaaggcuaugcagcauauuauauacuaugcgcauguuaugaaaugcauaauaaaaaauuuuaaaaaaucuaaaagaucuaaaaaaaaaaaaaaaaaaaaaaaaaaaaaaaaaaaaaaaaaaaaaaaaaaaaaaaaaaaaaaaaugcaucccccccccccccccccccccccccccccccaaaggcucuuuucagagccaccagaauu

SEQ ID NO: 4748 - RNA, 1960 nt, Artificial Sequence
  mRNA product Design d-4 comprising derived and/or modified sequence from HRSV(A2)__F_DSCav1_mut4 (opt11)
gggagagucccgcagucggcguccagcggcucugcuuguucgugugugugucguugcaggccuuauucaagcuuaccauggaacugcucauccucaaagccaacgccaucaccaccauucuuaccgccgucacauucugcuucgccucaggccaaaacaucaccgaagaauuuuaccaauccacuuguucagccgucucaaaaggauaccuaucagcccuccguaccggcugguacaccucggucauaacaauagaacucuccaacauaaaagaaaacaaaugcaacggcaccgacgccaaggucaaacugauaaaacaagaacuugauaaauacaaaaacgccgucacugaacuccaacuccucaugcaauccacucccgcuacuggcucuggcuccgccaucugcucuggcgucgccgucuguaaaguacuccaccucgaaggggaagucaacaaaaucaaaucagcccuccuuagcaccaacaaggccgucgucucccucucaaacggagucagcguccucaccuucaagguccucgaccucaagaacuacaucgacaaacaacuccugcccauccuaaauaaacaauccugcucuaucuccaauaucgaaaccguuauagaguuccaacagaaaaacaaccgacuccucgaaaucacccgcgaguucuccgucaacgcaggcgucaccaccccugugucaaccuacaugcucaccaacagcgaacuacucucacucaucaaugacaugcccaucaccaacgaccaaaagaaacucauguccaacaacguccaaaucguacgucaacaauccuacagcaucaugugcaucauaaaagaagaaguccucgccuacgucguccaacuuccccucuacggcgucauagacacccccugcuggaaacugcauaccucaccccuaugcaccaccaacacuaaagaaggcuccaacaucugccucacccgcacggaccgcggcugguacugcgacaacgccggcuccgucuccuucuucccccaagccgaaacuuguaaaguccaauccaacagagucuucugcgacaccaugaacucuagaacgcugccauccgagguaaaccuaugcaacgucgacaucuucaaucccaaauacgacugcaagaucaugaccucaaaaaccgacguauccuccucaguaaucaccagucucggagcuaucgucuccugcuacggcaaaaccaaaugcacggccucuaacaaaaaccgcggcaucaucaaaaccuucucaaacggaugcgacuacgucagcaacaaaggcguagauaccgucucugucggcaacacacuguacugcguaaacaagcaagaaggaaaaucccucuacguaaaaggcgaacccaucaucaacuucuacgacccccucguuuuccccucagaugaauuugacgccucgauaucacaagucaacgaaaagauaaaucagucccucgccuucauccgaaaauccgacgaacuccuccacaacguuaacgcaggaaaguccaccacaaacaucaugauaacuacaaucauaauagucauuaucgucauacuccucucccuaaucgccguaggccugcuacucuacugcaaagcccgcucaacccccgucacucucucaaaagaccaacucuccggcaucaauaacaucgccuucucaaacuaaggacuaguggaagcauuuuccuggcugauuaaaagaaauuacucagcuauggucaucuguuccuguuagaaggcuaugcagcauauuauauacuaugcgcauguuaugaaaugcauaauaaaaaauuuuaaaaaaucuaaaagaucuaaaaaaaaaaaaaaaaaaaaaaaaaaaaaaaaaaaaaaaaaaaaaaaaaaaaaaaaaaaaaaaaugcaucccccccccccccccccccccccccccccccaaaggcucuuuucagagccaccagaauu

SEQ ID NO: 4749 - RNA, 2057 nt, Artificial Sequence
  mRNA product Design d-5 comprising derived and/or modified sequence from HRSV(A2)__F_DSCav1_mut4 (opt1)
gggagagggcgcuuggcuugcaaggacccugagcugcggcauugaagcacacccaacccaacucgacugaagucagccucacugaaccggaucugagaaucuucucucucugggcuugccagggcucuccgaaccuagcuagcauccucuucaauuccaacuagaaagcuuaccauggagcugcucauccugaaggccaacgccaucaccaccauccugacggcggugaccuucugcuucgccagcggccagaacaucaccgaggaguucuaccaguccacgugcagcgccgucuccaagggguaccucagcgcccugcggaccggcugguacaccuccgugaucaccaucgagcugagcaacaucaaggagaacaagugcaacgggaccgacgccaaggugaagcucaucaagcaggagcuggacaaguacaagaacgcggucacggagcugcagcuccugaugcaguccaccccggcaaccggcuccggcuccgccaucugcagcggcgucgccgugugcaaggugcugcaccucgagggggaggucaacaagaucaagagcgcccugcuguccaccaacaaggccguggugagccucuccaacggcgucagcgugcugaccuucaaggugcuggaccucaagaacuacaucgacaagcagcugcugcccauccugaacaagcagagcugcuccaucagcaacaucgagacggugaucgaguuccagcagaagaacaaccggcuccuggagaucacccgcgaguucagcgugaacgccggggucaccacccccguguccacguacaugcugaccaacagcgagcuccugucccugaucaacgacaugccgaucaccaacgaccagaagaagcucaugagcaacaacgugcagaucguccggcagcaguccuacagcaucaugugcaucaucaaggaggaggugcuggcguacgugguccagcugccccucuacggcgugaucgacacccccugcuggaagcugcacacgagcccccugugcaccaccaacaccaaggagggguccaacaucugccucacgcgcaccgaccggggcugguacugcgacaacgccggcagcgucuccuucuucccgcaggccgagaccugcaaggugcagagcaaccgcguguucugcgacaccaugaacucccggacgcugcccagcgagguaaaccucugcaacgucgacaucuucaaccccaaguacgacugcaagaucaugaccuccaagaccgacgugagcuccagcgugaucaccucccugggggccaucgucagcugcuacggcaagacgaagugcaccgccagcaacaagaaccgggggaucaucaagaccuucuccaacggcugcgacuacgugagcaacaagggcguggacaccguguccgucgggaacacccuguacugcgugaacaagcaggagggcaagagccucuacgugaagggggagcccaucaucaacuucuacgacccgcuggucuuccccuccgacgaguucgacgcgagcaucucccaggugaacgagaagaucaaccagagccuggccuucauccgcaaguccgacgagcugcuccacaacgugaacgccggcaagagcacgaccaacaucaugaucaccaccaucaucaucgucaucaucgugauccugcugucccucaucgccguggggcugcugcucuacugcaaggcccggagcacgcccgucacccuguccaaggaccagcugagcggcaucaacaacaucgcguucuccaacugaggacuaguggaagcauuuuccuggcugauuaaaagaaauuacucagcuauggucaucuguuccuguuagaaggcuaugcagcauauuauauacuaugcgcauguuaugaaaugcauaauaaaaaauuuuaaaaaaucuaaaagaucuaaaaaaaaaaaaaaaaaaaaaaaaaaaaaaaaaaaaaaaaaaaaaaaaaaaaaaaaaaaaaaaaugcaucccccccccccccccccccccccccccccccaaaggcucuuuucagagccaccagaauu

SEQ ID NO: 4750 - RNA, 2057 nt, Artificial Sequence
  mRNA product Design d-5 comprising derived and/or modified sequence from HRSV(A2)__F_DSCav1_mut4 (opt1)
gggagagggcgcuuggcuugcaaggacccugagcugcggcauugaagcacacccaacccaacucgacugaagucagccucacugaaccggaucugagaaucuucucucucugggcuugccagggcucuccgaaccuagcuagcauccucuucaauuccaacuagaaagcuuaccauggagcugcucauccugaaggccaacgccaucaccaccauccugacggcggugaccuucugcuucgccagcggccagaacaucaccgaggaguucuaccaguccacgugcagcgccgucuccaagggguaccucagcgcccugcgcaccggcugguacaccuccgugaucaccaucgagcugagcaacaucaaggagaacaagugcaacgggaccgacgccaaggugaagcucaucaagcaggagcuggacaaguacaagaacgcggucacggagcugcagcuccugaugcaguccacccccgccaccggcagcggguccgccaucugcagcggcguggccgugugcaagguccugcaccucgagggcgaggugaacaagaucaaguccgcgcugcugagcaccaacaaggccguggucucccucagcaacgggguguccgugcugacguucaagguccuggaccucaagaacuacaucgacaagcagcugcugccgauccucaacaagcagagcugcuccaucagcaacaucgagaccgugaucgaguuccagcagaagaacaaccggcugcuggagaucacccgcgaguucuccgugaacgccggcgucaccacgcccgugagcaccuacaugcucaccaacagcgagcugcugucccucaucaacgacaugcccaucaccaacgaccagaagaagcugaugagcaacaacgugcagaucguccggcagcaguccuacagcaucaugugcaucaucaaggaggaggugcuggccuacgugguccagcucccccuguacggggugaucgacacgccgugcuggaagcugcacaccagcccccucugcaccaccaacacgaaggagggcuccaacaucugccugacccgcaccgaccgggggugguacugcgacaacgccggcuccgugagcuucuucccccaggcggagaccugcaagguccaguccaaccgcguguucugcgacacgaugaacagccggacccuccccuccgaggucaaccugugcaacguggacaucuucaacccgaaguacgacugcaagaucaugaccagcaagaccgacguguccagcuccgucaucacgagccugggcgccaucguguccugcuacgggaagaccaagugcaccgccagcaacaagaaccggggcaucaucaagaccuucuccaacgggugcgacuacgugagcaacaagggcgucgacacggugagcgugggcaacacccucuacugcgucaacaagcaggaggggaagucccuguacgugaagggcgagcccaucaucaacuucuacgacccccugguguuccccagcgacgaguucgacgccuccaucagccaggucaacgagaagaucaaccagucccucgccuucauccgcaagagcgacgagcugcugcacaacgugaacgcggggaaguccaccaccaacaucaugaucaccacgaucaucaucgugaucaucgucauccuccugagccugaucgccgugggccuccugcuguacugcaaggcccgguccaccccggugacccugagcaaggaccagcucuccgggaucaacaacaucgccuucagcaacugaggacuaguggaagcauuuuccuggcugauuaaaagaaauuacucagcuauggucaucuguuccuguuagaaggcuaugcagcauauuauauacuaugcgcauguuaugaaaugcauaauaaaaaauuuuaaaaaaucuaaaagaucuaaaaaaaaaaaaaaaaaaaaaaaaaaaaaaaaaaaaaaaaaaaaaaaaaaaaaaaaaaaaaaaaugcaucccccccccccccccccccccccccccccccaaaggcucuuuucagagccaccagaauu

SEQ ID NO: 4751 - RNA, 2057 nt, Artificial Sequence
  mRNA product Design d-5 comprising derived and/or modified sequence from HRSV(A2)__F_DSCav1_mut4 (opt2)
gggagagggcgcuuggcuugcaaggacccugagcugcggcauugaagcacacccaacccaacucgacugaagucagccucacugaaccggaucugagaaucuucucucucugggcuugccagggcucuccgaaccuagcuagcauccucuucaauuccaacuagaaagcuuaccauggagcuccucauccucaaggccaacgccaucaccaccauccucaccgccgucaccuucugcuucgccuccggccagaacaucaccgaggaguucuaccaguccaccugcuccgccgucuccaagggcuaccucuccgcccuccgcaccggcugguacaccuccgucaucaccaucgagcucuccaacaucaaggagaacaagugcaacggcaccgacgccaaggucaagcucaucaagcaggagcucgacaaguacaagaacgccgucaccgagcuccagcuccucaugcaguccacccccgccaccggcuccggcuccgccaucugcuccggcgucgccgucugcaagguccuccaccucgagggcgaggucaacaagaucaaguccgcccuccucuccaccaacaaggccgucgucucccucuccaacggcgucuccguccucaccuucaagguccucgaccucaagaacuacaucgacaagcagcuccuccccauccucaacaagcaguccugcuccaucuccaacaucgagaccgucaucgaguuccagcagaagaacaaccgccuccucgagaucacccgcgaguucuccgucaacgccggcgucaccacccccgucuccaccuacaugcucaccaacuccgagcuccucucccucaucaacgacaugcccaucaccaacgaccagaagaagcucauguccaacaacguccagaucguccgccagcaguccuacuccaucaugugcaucaucaaggaggagguccucgccuacgucguccagcucccccucuacggcgucaucgacacccccugcuggaagcuccacaccuccccccucugcaccaccaacaccaaggagggcuccaacaucugccucacccgcaccgaccgcggcugguacugcgacaacgccggcuccgucuccuucuucccccaggccgagaccugcaagguccaguccaaccgcgucuucugcgacaccaugaacucccgcacccuccccuccgaggucaaccucugcaacgucgacaucuucaaccccaaguacgacugcaagaucaugaccuccaagaccgacgucuccuccuccgucaucaccucccucggcgccaucgucuccugcuacggcaagaccaagugcaccgccuccaacaagaaccgcggcaucaucaagaccuucuccaacggcugcgacuacgucuccaacaagggcgucgacaccgucuccgucggcaacacccucuacugcgucaacaagcaggagggcaagucccucuacgucaagggcgagcccaucaucaacuucuacgacccccucgucuuccccuccgacgaguucgacgccuccaucucccaggucaacgagaagaucaaccagucccucgccuucauccgcaaguccgacgagcuccuccacaacgucaacgccggcaaguccaccaccaacaucaugaucaccaccaucaucaucgucaucaucgucauccuccucucccucaucgccgucggccuccuccucuacugcaaggcccgcuccacccccgucacccucuccaaggaccagcucuccggcaucaacaacaucgccuucuccaacugaggacuaguggaagcauuuuccuggcugauuaaaagaaauuacucagcuauggucaucuguuccuguuagaaggcuaugcagcauauuauauacuaugcgcauguuaugaaaugcauaauaaaaaauuuuaaaaaaucuaaaagaucuaaaaaaaaaaaaaaaaaaaaaaaaaaaaaaaaaaaaaaaaaaaaaaaaaaaaaaaaaaaaaaaaugcaucccccccccccccccccccccccccccccccaaaggcucuuuucagagccaccagaauu

SEQ ID NO: 4752 - RNA, 2057 nt, Artificial Sequence
  mRNA product Design d-5 comprising derived and/or modified sequence from HRSV(A2)__F_DSCav1_mut4 (opt3)
gggagagggcgcuuggcuugcaaggacccugagcugcggcauugaagcacacccaacccaacucgacugaagucagccucacugaaccggaucugagaaucuucucucucugggcuugccagggcucuccgaaccuagcuagcauccucuucaauuccaacuagaaagcuuaccauggagcugcucauccuuaaggccaacgcuauuaccacaauacugacugcagugacguucugcuuugccagcggccagaauaucaccgaagaguucuaccaauccacauguucugcggucucaaaaggguauuugagugcuuuaagaacuggaugguacaccagcguuauuacaaucgaacuguccaacauuaaggagaauaaaugcaacgguaccgacgccaaggugaaacuaaucaagcaggaacucgauaaguauaaaaaugcaguaacugagcugcagcuucugaugcagucuacacccgccaccggcucggggucagcuauauguagcggaguggcagucugcaagguguugcaccucgagggcgaaguuaacaaaaucaagagugcccugcuguccacgaauaaagcuguggucucucucagcaacgguguguccguauuaacuuuuaagguucuggaccuuaagaauuacauugauaaacaauugcugccuauccuaaacaagcagucauguaguauuagcaauaucgagaccgugauagaguuccagcagaaaaacaauaggcuccuggaaauuacacgggaguuuucugucaacgccggggugacuaccccaguguccacauauaugcuuaccaauucagaacuguugagccucaucaacgacaugccgauuacgaacgaucaaaagaaacugaugaguaauaacguccagaucguucgccagcagucuuacuccaucaugugcauuauaaaggaggaaguguuagcguauguagugcaacugccccucuacggagucaucgacacuccuuguuggaaacuucauacaagcccacugugcaccacuaauacaaaggagggcucgaacauuuguuugacccgaacggaucguggcugguacugcgacaaugcagggucuguguccuucuuuccccaggccgaaaccuguaagguucagucaaacagaguguucugcgauacaaugaauaguagaacucugccuagcgaggucaaccucugcaauguggacaucuuuaacccaaaauaugauuguaagauaaugaccuccaaaacagacguaucuagcucaguuauuaccagucugggagcuaucguguccugcuacgguaagacuaaauguacagccagcaauaagaacaggggcaucauuaagaccuucucuaaugggugcgauuaugucucaaacaaaggaguggacacugucagugugggcaauacgcuuuacuguguuaacaagcaagaggguaaaagccuguaugugaagggggaacccaucauuaacuuuuacgacccuuugguauucccauccgaugaguuugacgcaucuauaucgcaggucaaugagaaaaucaaccagagccucgcuuucauucggaaguccgaugaacuguuacacaaugugaacgccggaaagucaacaaccaauaucaugaucacuaccauuauaaucguuauuaucgugauucugcuaagucucaucgcggucggccugcuuuuguauugcaaagcccgcucuacaccggugacccugagcaaggaccagcucuccggcauaaacaauaucgcauucucaaacugaggacuaguggaagcauuuuccuggcugauuaaaagaaauuacucagcuauggucaucuguuccuguuagaaggcuaugcagcauauuauauacuaugcgcauguuaugaaaugcauaauaaaaaauuuuaaaaaaucuaaaagaucuaaaaaaaaaaaaaaaaaaaaaaaaaaaaaaaaaaaaaaaaaaaaaaaaaaaaaaaaaaaaaaaaugcaucccccccccccccccccccccccccccccccaaaggcucuuuucagagccaccagaauu

SEQ ID NO: 4753 - RNA, 2057 nt, Artificial Sequence
  mRNA product Design d-5 comprising derived and/or modified sequence from HRSV(A2)__F_DSCav1_mut4 (opt4)
gggagagggcgcuuggcuugcaaggacccugagcugcggcauugaagcacacccaacccaacucgacugaagucagccucacugaaccggaucugagaaucuucucucucugggcuugccagggcucuccgaaccuagcuagcauccucuucaauuccaacuagaaagcuuaccauggagcugcugauccugaaggccaacgccaucaccaccauccugaccgccgugaccuucugcuucgccagcggccagaacaucaccgaggaguucuaccagagcaccugcagcgccgugagcaagggcuaccugagcgcccugagaaccggcugguacaccagcgugaucaccaucgagcugagcaacaucaaggagaacaagugcaacggcaccgacgccaaggugaagcugaucaagcaggagcuggacaaguacaagaacgccgugaccgagcugcagcugcugaugcagagcacccccgccaccggcagcggcagcgccaucugcagcggcguggccgugugcaaggugcugcaccuggagggcgaggugaacaagaucaagagcgcccugcugagcaccaacaaggccguggugagccugagcaacggcgugagcgugcugaccuucaaggugcuggaccugaagaacuacaucgacaagcagcugcugcccauccugaacaagcagagcugcagcaucagcaacaucgagaccgugaucgaguuccagcagaagaacaacagacugcuggagaucaccagagaguucagcgugaacgccggcgugaccacccccgugagcaccuacaugcugaccaacagcgagcugcugagccugaucaacgacaugcccaucaccaacgaccagaagaagcugaugagcaacaacgugcagaucgugagacagcagagcuacagcaucaugugcaucaucaaggaggaggugcuggccuacguggugcagcugccccuguacggcgugaucgacacccccugcuggaagcugcacaccagcccccugugcaccaccaacaccaaggagggcagcaacaucugccugaccagaaccgacagaggcugguacugcgacaacgccggcagcgugagcuucuucccccaggccgagaccugcaaggugcagagcaacagaguguucugcgacaccaugaacagcagaacccugcccagcgaggugaaccugugcaacguggacaucuucaaccccaaguacgacugcaagaucaugaccagcaagaccgacgugagcagcagcgugaucaccagccugggcgccaucgugagcugcuacggcaagaccaagugcaccgccagcaacaagaacagaggcaucaucaagaccuucagcaacggcugcgacuacgugagcaacaagggcguggacaccgugagcgugggcaacacccuguacugcgugaacaagcaggagggcaagagccuguacgugaagggcgagcccaucaucaacuucuacgacccccugguguuccccagcgacgaguucgacgccagcaucagccaggugaacgagaagaucaaccagagccuggccuucaucagaaagagcgacgagcugcugcacaacgugaacgccggcaagagcaccaccaacaucaugaucaccaccaucaucaucgugaucaucgugauccugcugagccugaucgccgugggccugcugcuguacugcaaggccagaagcacccccgugacccugagcaaggaccagcugagcggcaucaacaacaucgccuucagcaacugaggacuaguggaagcauuuuccuggcugauuaaaagaaauuacucagcuauggucaucuguuccuguuagaaggcuaugcagcauauuauauacuaugcgcauguuaugaaaugcauaauaaaaaauuuuaaaaaaucuaaaagaucuaaaaaaaaaaaaaaaaaaaaaaaaaaaaaaaaaaaaaaaaaaaaaaaaaaaaaaaaaaaaaaaaugcaucccccccccccccccccccccccccccccccaaaggcucuuuucagagccaccagaauu

SEQ ID NO: 4754 - RNA, 2057 nt, Artificial Sequence
  mRNA product Design d-5 comprising derived and/or modified sequence from HRSV(A2)__F_DSCav1_mut4 (opt5)
gggagagggcgcuuggcuugcaaggacccugagcugcggcauugaagcacacccaacccaacucgacugaagucagccucacugaaccggaucugagaaucuucucucucugggcuugccagggcucuccgaaccuagcuagcauccucuucaauuccaacuagaaagcuuaccauggagcugcucauccugaaggccaacgcuauuaccacaauccuuacggccgugaccuucugcuuugcgagcggccagaauauuacagaagaguucuaccaauccaccuguucugcugucagcaaaggguaucuguccgcccucagaacaggaugguacaccucuguuaucacaauugaacugagcaacaucaaggagaauaaaugcaacggcaccgacgccaaggugaaacuuaucaagcaggaacuggauaaguauaaaaaugcugugacggagcuccagcugcugaugcaguccacccccgccacagggucuggaagcgcuauuuguuccggcgucgccgugugcaagguucuccaccuggagggggaagugaacaaaaucaagagcgcgcuucugucuaccaauaaagccgucgugucccucagcaacggaguuucugugcugacauuuaagguccuugaccugaagaauuacauugauaaacaacuccugccuauccugaacaagcaguccuguagcauuucuaauaucgagaccgugauugaguuccagcagaaaaacaaucggcuccuggaaaucacgcgcgaguuuuccgugaacgcuggcgucacaaccccgguuagcacauauaugcuuaccaauuccgaacugcucucucugaucaacgacaugcccauuaccaacgaucaaaagaaacuuaugagcaauaacgugcagaucgugagacagcaguccuacagcauuaugugcaucauuaaggaggaaguccuggccuaugugguucaacucccucuguacggcgugaucgacacacccuguuggaaacugcauacgucuccucucugcaccacaaauaccaaggagggguccaacaucugucugacacggaccgaucgcggaugguacugcgacaaugcuggcagcgucucuuucuuuccccaggccgaaacguguaaggugcagagcaacagaguuuucugcgauacaaugaacuccagaacccugccuucugaggugaaucucugcaaugucgacauuuuuaacccgaaauaugauuguaagaucaugaccagcaaaacagacguguccagcucugucauuaccucccugggggcgaucgugagcugcuacggaaagacaaaauguacggccucuaauaagaaccggggcauuaucaagaccuucuccaaugggugcgauuauguuagcaacaaaggaguggacacagucuccgugggcaauacccuuuacuguguuaacaagcaagagggcaaaucucuguaugugaagggggaacccaucauuaacuuuuacgacccucucgucuuccccagcgaugaguuugacgcuuccaucucucaggugaaugagaaaauuaaccagagccuggccuucauccgcaaguccgaugaacugcuccacaaugugaacgcuggaaagagcacaaccaauauuaugaucacgaccauuaucaucguuauuaucgucauucugcuuucucugaucgccgugggccuccugcuguauugcaaagccagauccacaccugugacccuuagcaaggaccagcucucugggauuaacaauaucgcuuucuccaacugaggacuaguggaagcauuuuccuggcugauuaaaagaaauuacucagcuauggucaucuguuccuguuagaaggcuaugcagcauauuauauacuaugcgcauguuaugaaaugcauaauaaaaaauuuuaaaaaaucuaaaagaucuaaaaaaaaaaaaaaaaaaaaaaaaaaaaaaaaaaaaaaaaaaaaaaaaaaaaaaaaaaaaaaaaugcaucccccccccccccccccccccccccccccccaaaggcucuuuucagagccaccagaauu

SEQ ID NO: 4755 - RNA, 2057 nt, Artificial Sequence
  mRNA product Design d-5 comprising derived and/or modified sequence from HRSV(A2)__F_DSCav1_mut4 (opt6)
gggagagggcgcuuggcuugcaaggacccugagcugcggcauugaagcacacccaacccaacucgacugaagucagccucacugaaccggaucugagaaucuucucucucugggcuugccagggcucuccgaaccuagcuagcauccucuucaauuccaacuagaaagcuuaccauggaacuucuaauacucaaagccaacgcaauaacaacaauauuaacagccguaacauuuugcuucgcaucaggucaaaacauaacagaagaguucuaccaauccacaugcucagcaguaucaaaaggauauuuaagugcucuaagaacaggaugguacacauccguaauaacaaucgaacuaucaaacauaaaagaaaauaaauguaauggaacagacgccaaaguaaaauuaaucaaacaagaacuagacaaauacaaaaacgcaguuacugaauuacaauuauuaaugcaaucaacaccggccacaggaucuggaucagcaauaugcucaggaguagcagucugcaaaguauuacaccuagaaggggaaguuaauaaaaucaaaucagcauuacuauccaccaacaaagcgguaguuucacucuccaacggcguaucugucuuaacauucaaaguauuagaccuaaaaaacuacauugacaaacaacuacuaccaauccuaaacaaacaaucauguuccauaagcaauauagaaacaguaauagaauuucaacaaaaaaacaacagacuauuagaaauaacaagagaauuuuccgucaaugcaggaguuacuaccccugucuccaccuauaugcuaaccaauuccgaacucuuaucauuaauaaacgacaugccuaucacaaaugaccaaaaaaaauuaaugagcaacaacguacaaauaguacgacaacaaucauacucaaucaugugcauaauaaaagaagaaguccuagcauacguuguacaacuaccacuauacggagucauagauaccccaugcuggaaacuccauacaagcccacuaugcacuacaaacacaaaagaaggcucuaauauaugucuaacaagaacagaccgaggaugguacugcgauaaugccggcucagucucauucuuuccgcaagccgaaacuuguaaaguacaaaguaacagaguauuuugugacaccaugaacucaagaacccucccaagcgaagucaaucuaugcaacguugauauauucaaucccaaauacgacugcaaaaucaugaccucaaaaacagacgucagcucauccguuauaacaucacuaggagccaucguaucuugcuauggaaaaacaaaaugcacagcaagcaauaaaaacagaggcauaauaaaaacauucucaaauggaugcgacuacguaucaaacaaaggagucgacacaguuuccguaggaaacacuuuauacugcguaaacaaacaagaaggaaaaucauuauacgucaaaggugaaccaauaauaaacuucuacgauccacuuguauucccaucagacgaauuugacgcaucaauuucacaaguaaacgaaaaaauaaaccaaucacucgcauucauaagaaaaucagaugaacuacuacauaacguaaacgcaggaaaauccacaacaaacaucaugauaacaaccaucauaaucguaauaaucguaauacuauuaucccuaauugcaguaggauuacucuuauauugcaaagcaagaucaacaccaguaacccucaguaaagaccaacuauccggaauaaauaacaucgcauucucaaacuaaggacuaguggaagcauuuuccuggcugauuaaaagaaauuacucagcuauggucaucuguuccuguuagaaggcuaugcagcauauuauauacuaugcgcauguuaugaaaugcauaauaaaaaauuuuaaaaaaucuaaaagaucuaaaaaaaaaaaaaaaaaaaaaaaaaaaaaaaaaaaaaaaaaaaaaaaaaaaaaaaaaaaaaaaaugcaucccccccccccccccccccccccccccccccaaaggcucuuuucagagccaccagaauu

SEQ ID NO: 4756 - RNA, 2057 nt, Artificial Sequence
  mRNA product Design d-5 comprising derived and/or modified sequence from HRSV(A2)__F_DSCav1_mut4 (opt11)
gggagagggcgcuuggcuugcaaggacccugagcugcggcauugaagcacacccaacccaacucgacugaagucagccucacugaaccggaucugagaaucuucucucucugggcuugccagggcucuccgaaccuagcuagcauccucuucaauuccaacuagaaagcuuaccauggaacugcucauccucaaagccaacgccaucaccaccauucuuaccgccgucacauucugcuucgccucaggccaaaacaucaccgaagaauuuuaccaauccacuuguucagccgucucaaaaggauaccuaucagcccuccguaccggcugguacaccucggucauaacaauagaacucuccaacauaaaagaaaacaaaugcaacggcaccgacgccaaggucaaacugauaaaacaagaacuugauaaauacaaaaacgccgucacugaacuccaacuccucaugcaauccacucccgcuacuggcucuggcuccgccaucugcucuggcgucgccgucuguaaaguacuccaccucgaaggggaagucaacaaaaucaaaucagcccuccuuagcaccaacaaggccgucgucucccucucaaacggagucagcguccucaccuucaagguccucgaccucaagaacuacaucgacaaacaacuccugcccauccuaaauaaacaauccugcucuaucuccaauaucgaaaccguuauagaguuccaacagaaaaacaaccgacuccucgaaaucacccgcgaguucuccgucaacgcaggcgucaccaccccugugucaaccuacaugcucaccaacagcgaacuacucucacucaucaaugacaugcccaucaccaacgaccaaaagaaacucauguccaacaacguccaaaucguacgucaacaauccuacagcaucaugugcaucauaaaagaagaaguccucgccuacgucguccaacuuccccucuacggcgucauagacacccccugcuggaaacugcauaccucaccccuaugcaccaccaacacuaaagaaggcuccaacaucugccucacccgcacggaccgcggcugguacugcgacaacgccggcuccgucuccuucuucccccaagccgaaacuuguaaaguccaauccaacagagucuucugcgacaccaugaacucuagaacgcugccauccgagguaaaccuaugcaacgucgacaucuucaaucccaaauacgacugcaagaucaugaccucaaaaaccgacguauccuccucaguaaucaccagucucggagcuaucgucuccugcuacggcaaaaccaaaugcacggccucuaacaaaaaccgcggcaucaucaaaaccuucucaaacggaugcgacuacgucagcaacaaaggcguagauaccgucucugucggcaacacacuguacugcguaaacaagcaagaaggaaaaucccucuacguaaaaggcgaacccaucaucaacuucuacgacccccucguuuuccccucagaugaauuugacgccucgauaucacaagucaacgaaaagauaaaucagucccucgccuucauccgaaaauccgacgaacuccuccacaacguuaacgcaggaaaguccaccacaaacaucaugauaacuacaaucauaauagucauuaucgucauacuccucucccuaaucgccguaggccugcuacucuacugcaaagcccgcucaacccccgucacucucucaaaagaccaacucuccggcaucaauaacaucgccuucucaaacuaaggacuaguggaagcauuuuccuggcugauuaaaagaaauuacucagcuauggucaucuguuccuguuagaaggcuaugcagcauauuauauacuaugcgcauguuaugaaaugcauaauaaaaaauuuuaaaaaaucuaaaagaucuaaaaaaaaaaaaaaaaaaaaaaaaaaaaaaaaaaaaaaaaaaaaaaaaaaaaaaaaaaaaaaaaugcaucccccccccccccccccccccccccccccccaaaggcucuuuucagagccaccagaauu

SEQ ID NO: 4757 - RNA, 1937 nt, Artificial Sequence
  mRNA product Design e-1 comprising derived and/or modified sequence from HRSV(A2)__F_DSCav1_mut4 (opt1)
gggagaauauaagcguuggcggagcgucgguuguagcacucugcgcgcccgcucuucugcugcuguuugucuacuuccuccugcuuccccgccgccgccgccgccaucaagcuuaccauggagcugcucauccugaaggccaacgccaucaccaccauccugacggcggugaccuucugcuucgccagcggccagaacaucaccgaggaguucuaccaguccacgugcagcgccgucuccaagggguaccucagcgcccugcggaccggcugguacaccuccgugaucaccaucgagcugagcaacaucaaggagaacaagugcaacgggaccgacgccaaggugaagcucaucaagcaggagcuggacaaguacaagaacgcggucacggagcugcagcuccugaugcaguccaccccggcaaccggcuccggcuccgccaucugcagcggcgucgccgugugcaaggugcugcaccucgagggggaggucaacaagaucaagagcgcccugcuguccaccaacaaggccguggugagccucuccaacggcgucagcgugcugaccuucaaggugcuggaccucaagaacuacaucgacaagcagcugcugcccauccugaacaagcagagcugcuccaucagcaacaucgagacggugaucgaguuccagcagaagaacaaccggcuccuggagaucacccgcgaguucagcgugaacgccggggucaccacccccguguccacguacaugcugaccaacagcgagcuccugucccugaucaacgacaugccgaucaccaacgaccagaagaagcucaugagcaacaacgugcagaucguccggcagcaguccuacagcaucaugugcaucaucaaggaggaggugcuggcguacgugguccagcugccccucuacggcgugaucgacacccccugcuggaagcugcacacgagcccccugugcaccaccaacaccaaggagggguccaacaucugccucacgcgcaccgaccggggcugguacugcgacaacgccggcagcgucuccuucuucccgcaggccgagaccugcaaggugcagagcaaccgcguguucugcgacaccaugaacucccggacgcugcccagcgagguaaaccucugcaacgucgacaucuucaaccccaaguacgacugcaagaucaugaccuccaagaccgacgugagcuccagcgugaucaccucccugggggccaucgucagcugcuacggcaagacgaagugcaccgccagcaacaagaaccgggggaucaucaagaccuucuccaacggcugcgacuacgugagcaacaagggcguggacaccguguccgucgggaacacccuguacugcgugaacaagcaggagggcaagagccucuacgugaagggggagcccaucaucaacuucuacgacccgcuggucuuccccuccgacgaguucgacgcgagcaucucccaggugaacgagaagaucaaccagagccuggccuucauccgcaaguccgacgagcugcuccacaacgugaacgccggcaagagcacgaccaacaucaugaucaccaccaucaucaucgucaucaucgugauccugcugucccucaucgccguggggcugcugcucuacugcaaggcccggagcacgcccgucacccuguccaaggaccagcugagcggcaucaacaacaucgcguucuccaacugaggacuaguguccaccugucccuccugggcugcuggauugucucguuuuccugccaaauaaacaggaucagcgcuuuacagaucuaaaaaaaaaaaaaaaaaaaaaaaaaaaaaaaaaaaaaaaaaaaaaaaaaaaaaaaaaaaaaaaaugcaucccccccccccccccccccccccccccccccaaaggcucuuuucagagccaccagaauu

SEQ ID NO: 4758 - RNA, 1937 nt, Artificial Sequence
  mRNA product Design e-1 comprising derived and/or modified sequence from HRSV(A2)__F_DSCav1_mut4 (opt1)
gggagaauauaagcguuggcggagcgucgguuguagcacucugcgcgcccgcucuucugcugcuguuugucuacuuccuccugcuuccccgccgccgccgccgccaucaagcuuaccauggagcugcucauccugaaggccaacgccaucaccaccauccugacggcggugaccuucugcuucgccagcggccagaacaucaccgaggaguucuaccaguccacgugcagcgccgucuccaagggguaccucagcgcccugcgcaccggcugguacaccuccgugaucaccaucgagcugagcaacaucaaggagaacaagugcaacgggaccgacgccaaggugaagcucaucaagcaggagcuggacaaguacaagaacgcggucacggagcugcagcuccugaugcaguccacccccgccaccggcagcggguccgccaucugcagcggcguggccgugugcaagguccugcaccucgagggcgaggugaacaagaucaaguccgcgcugcugagcaccaacaaggccguggucucccucagcaacgggguguccgugcugacguucaagguccuggaccucaagaacuacaucgacaagcagcugcugccgauccucaacaagcagagcugcuccaucagcaacaucgagaccgugaucgaguuccagcagaagaacaaccggcugcuggagaucacccgcgaguucuccgugaacgccggcgucaccacgcccgugagcaccuacaugcucaccaacagcgagcugcugucccucaucaacgacaugcccaucaccaacgaccagaagaagcugaugagcaacaacgugcagaucguccggcagcaguccuacagcaucaugugcaucaucaaggaggaggugcuggccuacgugguccagcucccccuguacggggugaucgacacgccgugcuggaagcugcacaccagcccccucugcaccaccaacacgaaggagggcuccaacaucugccugacccgcaccgaccgggggugguacugcgacaacgccggcuccgugagcuucuucccccaggcggagaccugcaagguccaguccaaccgcguguucugcgacacgaugaacagccggacccuccccuccgaggucaaccugugcaacguggacaucuucaacccgaaguacgacugcaagaucaugaccagcaagaccgacguguccagcuccgucaucacgagccugggcgccaucguguccugcuacgggaagaccaagugcaccgccagcaacaagaaccggggcaucaucaagaccuucuccaacgggugcgacuacgugagcaacaagggcgucgacacggugagcgugggcaacacccucuacugcgucaacaagcaggaggggaagucccuguacgugaagggcgagcccaucaucaacuucuacgacccccugguguuccccagcgacgaguucgacgccuccaucagccaggucaacgagaagaucaaccagucccucgccuucauccgcaagagcgacgagcugcugcacaacgugaacgcggggaaguccaccaccaacaucaugaucaccacgaucaucaucgugaucaucgucauccuccugagccugaucgccgugggccuccugcuguacugcaaggcccgguccaccccggugacccugagcaaggaccagcucuccgggaucaacaacaucgccuucagcaacugaggacuaguguccaccugucccuccugggcugcuggauugucucguuuuccugccaaauaaacaggaucagcgcuuuacagaucuaaaaaaaaaaaaaaaaaaaaaaaaaaaaaaaaaaaaaaaaaaaaaaaaaaaaaaaaaaaaaaaaugcaucccccccccccccccccccccccccccccccaaaggcucuuuucagagccaccagaauu

SEQ ID NO: 4759 - RNA, 1937 nt, Artificial Sequence
  mRNA product Design e-1 comprising derived and/or modified sequence from HRSV(A2)__F_DSCav1_mut4 (opt2)
gggagaauauaagcguuggcggagcgucgguuguagcacucugcgcgcccgcucuucugcugcuguuugucuacuuccuccugcuuccccgccgccgccgccgccaucaagcuuaccauggagcuccucauccucaaggccaacgccaucaccaccauccucaccgccgucaccuucugcuucgccuccggccagaacaucaccgaggaguucuaccaguccaccugcuccgccgucuccaagggcuaccucuccgcccuccgcaccggcugguacaccuccgucaucaccaucgagcucuccaacaucaaggagaacaagugcaacggcaccgacgccaaggucaagcucaucaagcaggagcucgacaaguacaagaacgccgucaccgagcuccagcuccucaugcaguccacccccgccaccggcuccggcuccgccaucugcuccggcgucgccgucugcaagguccuccaccucgagggcgaggucaacaagaucaaguccgcccuccucuccaccaacaaggccgucgucucccucuccaacggcgucuccguccucaccuucaagguccucgaccucaagaacuacaucgacaagcagcuccuccccauccucaacaagcaguccugcuccaucuccaacaucgagaccgucaucgaguuccagcagaagaacaaccgccuccucgagaucacccgcgaguucuccgucaacgccggcgucaccacccccgucuccaccuacaugcucaccaacuccgagcuccucucccucaucaacgacaugcccaucaccaacgaccagaagaagcucauguccaacaacguccagaucguccgccagcaguccuacuccaucaugugcaucaucaaggaggagguccucgccuacgucguccagcucccccucuacggcgucaucgacacccccugcuggaagcuccacaccuccccccucugcaccaccaacaccaaggagggcuccaacaucugccucacccgcaccgaccgcggcugguacugcgacaacgccggcuccgucuccuucuucccccaggccgagaccugcaagguccaguccaaccgcgucuucugcgacaccaugaacucccgcacccuccccuccgaggucaaccucugcaacgucgacaucuucaaccccaaguacgacugcaagaucaugaccuccaagaccgacgucuccuccuccgucaucaccucccucggcgccaucgucuccugcuacggcaagaccaagugcaccgccuccaacaagaaccgcggcaucaucaagaccuucuccaacggcugcgacuacgucuccaacaagggcgucgacaccgucuccgucggcaacacccucuacugcgucaacaagcaggagggcaagucccucuacgucaagggcgagcccaucaucaacuucuacgacccccucgucuuccccuccgacgaguucgacgccuccaucucccaggucaacgagaagaucaaccagucccucgccuucauccgcaaguccgacgagcuccuccacaacgucaacgccggcaaguccaccaccaacaucaugaucaccaccaucaucaucgucaucaucgucauccuccucucccucaucgccgucggccuccuccucuacugcaaggcccgcuccacccccgucacccucuccaaggaccagcucuccggcaucaacaacaucgccuucuccaacugaggacuaguguccaccugucccuccugggcugcuggauugucucguuuuccugccaaauaaacaggaucagcgcuuuacagaucuaaaaaaaaaaaaaaaaaaaaaaaaaaaaaaaaaaaaaaaaaaaaaaaaaaaaaaaaaaaaaaaaugcaucccccccccccccccccccccccccccccccaaaggcucuuuucagagccaccagaauu

SEQ ID NO: 4760 - RNA, 1937 nt, Artificial Sequence
  mRNA product Design e-1 comprising derived and/or modified sequence from HRSV(A2)__F_DSCav1_mut4 (opt3)
gggagaauauaagcguuggcggagcgucgguuguagcacucugcgcgcccgcucuucugcugcuguuugucuacuuccuccugcuuccccgccgccgccgccgccaucaagcuuaccauggagcugcucauccuuaaggccaacgcuauuaccacaauacugacugcagugacguucugcuuugccagcggccagaauaucaccgaagaguucuaccaauccacauguucugcggucucaaaaggguauuugagugcuuuaagaacuggaugguacaccagcguuauuacaaucgaacuguccaacauuaaggagaauaaaugcaacgguaccgacgccaaggugaaacuaaucaagcaggaacucgauaaguauaaaaaugcaguaacugagcugcagcuucugaugcagucuacacccgccaccggcucggggucagcuauauguagcggaguggcagucugcaagguguugcaccucgagggcgaaguuaacaaaaucaagagugcccugcuguccacgaauaaagcuguggucucucucagcaacgguguguccguauuaacuuuuaagguucuggaccuuaagaauuacauugauaaacaauugcugccuauccuaaacaagcagucauguaguauuagcaauaucgagaccgugauagaguuccagcagaaaaacaauaggcuccuggaaauuacacgggaguuuucugucaacgccggggugacuaccccaguguccacauauaugcuuaccaauucagaacuguugagccucaucaacgacaugccgauuacgaacgaucaaaagaaacugaugaguaauaacguccagaucguucgccagcagucuuacuccaucaugugcauuauaaaggaggaaguguuagcguauguagugcaacugccccucuacggagucaucgacacuccuuguuggaaacuucauacaagcccacugugcaccacuaauacaaaggagggcucgaacauuuguuugacccgaacggaucguggcugguacugcgacaaugcagggucuguguccuucuuuccccaggccgaaaccuguaagguucagucaaacagaguguucugcgauacaaugaauaguagaacucugccuagcgaggucaaccucugcaauguggacaucuuuaacccaaaauaugauuguaagauaaugaccuccaaaacagacguaucuagcucaguuauuaccagucugggagcuaucguguccugcuacgguaagacuaaauguacagccagcaauaagaacaggggcaucauuaagaccuucucuaaugggugcgauuaugucucaaacaaaggaguggacacugucagugugggcaauacgcuuuacuguguuaacaagcaagaggguaaaagccuguaugugaagggggaacccaucauuaacuuuuacgacccuuugguauucccauccgaugaguuugacgcaucuauaucgcaggucaaugagaaaaucaaccagagccucgcuuucauucggaaguccgaugaacuguuacacaaugugaacgccggaaagucaacaaccaauaucaugaucacuaccauuauaaucguuauuaucgugauucugcuaagucucaucgcggucggccugcuuuuguauugcaaagcccgcucuacaccggugacccugagcaaggaccagcucuccggcauaaacaauaucgcauucucaaacugaggacuaguguccaccugucccuccugggcugcuggauugucucguuuuccugccaaauaaacaggaucagcgcuuuacagaucuaaaaaaaaaaaaaaaaaaaaaaaaaaaaaaaaaaaaaaaaaaaaaaaaaaaaaaaaaaaaaaaaugcaucccccccccccccccccccccccccccccccaaaggcucuuuucagagccaccagaauu

SEQ ID NO: 4761 - RNA, 1937 nt, Artificial Sequence
  mRNA product Design e-1 comprising derived and/or modified sequence from HRSV(A2)__F_DSCav1_mut4 (opt4)
gggagaauauaagcguuggcggagcgucgguuguagcacucugcgcgcccgcucuucugcugcuguuugucuacuuccuccugcuuccccgccgccgccgccgccaucaagcuuaccauggagcugcugauccugaaggccaacgccaucaccaccauccugaccgccgugaccuucugcuucgccagcggccagaacaucaccgaggaguucuaccagagcaccugcagcgccgugagcaagggcuaccugagcgcccugagaaccggcugguacaccagcgugaucaccaucgagcugagcaacaucaaggagaacaagugcaacggcaccgacgccaaggugaagcugaucaagcaggagcuggacaaguacaagaacgccgugaccgagcugcagcugcugaugcagagcacccccgccaccggcagcggcagcgccaucugcagcggcguggccgugugcaaggugcugcaccuggagggcgaggugaacaagaucaagagcgcccugcugagcaccaacaaggccguggugagccugagcaacggcgugagcgugcugaccuucaaggugcuggaccugaagaacuacaucgacaagcagcugcugcccauccugaacaagcagagcugcagcaucagcaacaucgagaccgugaucgaguuccagcagaagaacaacagacugcuggagaucaccagagaguucagcgugaacgccggcgugaccacccccgugagcaccuacaugcugaccaacagcgagcugcugagccugaucaacgacaugcccaucaccaacgaccagaagaagcugaugagcaacaacgugcagaucgugagacagcagagcuacagcaucaugugcaucaucaaggaggaggugcuggccuacguggugcagcugccccuguacggcgugaucgacacccccugcuggaagcugcacaccagcccccugugcaccaccaacaccaaggagggcagcaacaucugccugaccagaaccgacagaggcugguacugcgacaacgccggcagcgugagcuucuucccccaggccgagaccugcaaggugcagagcaacagaguguucugcgacaccaugaacagcagaacccugcccagcgaggugaaccugugcaacguggacaucuucaaccccaaguacgacugcaagaucaugaccagcaagaccgacgugagcagcagcgugaucaccagccugggcgccaucgugagcugcuacggcaagaccaagugcaccgccagcaacaagaacagaggcaucaucaagaccuucagcaacggcugcgacuacgugagcaacaagggcguggacaccgugagcgugggcaacacccuguacugcgugaacaagcaggagggcaagagccuguacgugaagggcgagcccaucaucaacuucuacgacccccugguguuccccagcgacgaguucgacgccagcaucagccaggugaacgagaagaucaaccagagccuggccuucaucagaaagagcgacgagcugcugcacaacgugaacgccggcaagagcaccaccaacaucaugaucaccaccaucaucaucgugaucaucgugauccugcugagccugaucgccgugggccugcugcuguacugcaaggccagaagcacccccgugacccugagcaaggaccagcugagcggcaucaacaacaucgccuucagcaacugaggacuaguguccaccugucccuccugggcugcuggauugucucguuuuccugccaaauaaacaggaucagcgcuuuacagaucuaaaaaaaaaaaaaaaaaaaaaaaaaaaaaaaaaaaaaaaaaaaaaaaaaaaaaaaaaaaaaaaaugcaucccccccccccccccccccccccccccccccaaaggcucuuuucagagccaccagaauu

SEQ ID NO: 4762 - RNA, 1937 nt, Artificial Sequence
  mRNA product Design e-1 comprising derived and/or modified sequence from HRSV(A2)__F_DSCav1_mut4 (opt5)
gggagaauauaagcguuggcggagcgucgguuguagcacucugcgcgcccgcucuucugcugcuguuugucuacuuccuccugcuuccccgccgccgccgccgccaucaagcuuaccauggagcugcucauccugaaggccaacgcuauuaccacaauccuuacggccgugaccuucugcuuugcgagcggccagaauauuacagaagaguucuaccaauccaccuguucugcugucagcaaaggguaucuguccgcccucagaacaggaugguacaccucuguuaucacaauugaacugagcaacaucaaggagaauaaaugcaacggcaccgacgccaaggugaaacuuaucaagcaggaacuggauaaguauaaaaaugcugugacggagcuccagcugcugaugcaguccacccccgccacagggucuggaagcgcuauuuguuccggcgucgccgugugcaagguucuccaccuggagggggaagugaacaaaaucaagagcgcgcuucugucuaccaauaaagccgucgugucccucagcaacggaguuucugugcugacauuuaagguccuugaccugaagaauuacauugauaaacaacuccugccuauccugaacaagcaguccuguagcauuucuaauaucgagaccgugauugaguuccagcagaaaaacaaucggcuccuggaaaucacgcgcgaguuuuccgugaacgcuggcgucacaaccccgguuagcacauauaugcuuaccaauuccgaacugcucucucugaucaacgacaugcccauuaccaacgaucaaaagaaacuuaugagcaauaacgugcagaucgugagacagcaguccuacagcauuaugugcaucauuaaggaggaaguccuggccuaugugguucaacucccucuguacggcgugaucgacacacccuguuggaaacugcauacgucuccucucugcaccacaaauaccaaggagggguccaacaucugucugacacggaccgaucgcggaugguacugcgacaaugcuggcagcgucucuuucuuuccccaggccgaaacguguaaggugcagagcaacagaguuuucugcgauacaaugaacuccagaacccugccuucugaggugaaucucugcaaugucgacauuuuuaacccgaaauaugauuguaagaucaugaccagcaaaacagacguguccagcucugucauuaccucccugggggcgaucgugagcugcuacggaaagacaaaauguacggccucuaauaagaaccggggcauuaucaagaccuucuccaaugggugcgauuauguuagcaacaaaggaguggacacagucuccgugggcaauacccuuuacuguguuaacaagcaagagggcaaaucucuguaugugaagggggaacccaucauuaacuuuuacgacccucucgucuuccccagcgaugaguuugacgcuuccaucucucaggugaaugagaaaauuaaccagagccuggccuucauccgcaaguccgaugaacugcuccacaaugugaacgcuggaaagagcacaaccaauauuaugaucacgaccauuaucaucguuauuaucgucauucugcuuucucugaucgccgugggccuccugcuguauugcaaagccagauccacaccugugacccuuagcaaggaccagcucucugggauuaacaauaucgcuuucuccaacugaggacuaguguccaccugucccuccugggcugcuggauugucucguuuuccugccaaauaaacaggaucagcgcuuuacagaucuaaaaaaaaaaaaaaaaaaaaaaaaaaaaaaaaaaaaaaaaaaaaaaaaaaaaaaaaaaaaaaaaugcaucccccccccccccccccccccccccccccccaaaggcucuuuucagagccaccagaauu

SEQ ID NO: 4763 - RNA, 1937 nt, Artificial Sequence
  mRNA product Design e-1 comprising derived and/or modified sequence from HRSV(A2)__F_DSCav1_mut4 (opt6)
gggagaauauaagcguuggcggagcgucgguuguagcacucugcgcgcccgcucuucugcugcuguuugucuacuuccuccugcuuccccgccgccgccgccgccaucaagcuuaccauggaacuucuaauacucaaagccaacgcaauaacaacaauauuaacagccguaacauuuugcuucgcaucaggucaaaacauaacagaagaguucuaccaauccacaugcucagcaguaucaaaaggauauuuaagugcucuaagaacaggaugguacacauccguaauaacaaucgaacuaucaaacauaaaagaaaauaaauguaauggaacagacgccaaaguaaaauuaaucaaacaagaacuagacaaauacaaaaacgcaguuacugaauuacaauuauuaaugcaaucaacaccggccacaggaucuggaucagcaauaugcucaggaguagcagucugcaaaguauuacaccuagaaggggaaguuaauaaaaucaaaucagcauuacuauccaccaacaaagcgguaguuucacucuccaacggcguaucugucuuaacauucaaaguauuagaccuaaaaaacuacauugacaaacaacuacuaccaauccuaaacaaacaaucauguuccauaagcaauauagaaacaguaauagaauuucaacaaaaaaacaacagacuauuagaaauaacaagagaauuuuccgucaaugcaggaguuacuaccccugucuccaccuauaugcuaaccaauuccgaacucuuaucauuaauaaacgacaugccuaucacaaaugaccaaaaaaaauuaaugagcaacaacguacaaauaguacgacaacaaucauacucaaucaugugcauaauaaaagaagaaguccuagcauacguuguacaacuaccacuauacggagucauagauaccccaugcuggaaacuccauacaagcccacuaugcacuacaaacacaaaagaaggcucuaauauaugucuaacaagaacagaccgaggaugguacugcgauaaugccggcucagucucauucuuuccgcaagccgaaacuuguaaaguacaaaguaacagaguauuuugugacaccaugaacucaagaacccucccaagcgaagucaaucuaugcaacguugauauauucaaucccaaauacgacugcaaaaucaugaccucaaaaacagacgucagcucauccguuauaacaucacuaggagccaucguaucuugcuauggaaaaacaaaaugcacagcaagcaauaaaaacagaggcauaauaaaaacauucucaaauggaugcgacuacguaucaaacaaaggagucgacacaguuuccguaggaaacacuuuauacugcguaaacaaacaagaaggaaaaucauuauacgucaaaggugaaccaauaauaaacuucuacgauccacuuguauucccaucagacgaauuugacgcaucaauuucacaaguaaacgaaaaaauaaaccaaucacucgcauucauaagaaaaucagaugaacuacuacauaacguaaacgcaggaaaauccacaacaaacaucaugauaacaaccaucauaaucguaauaaucguaauacuauuaucccuaauugcaguaggauuacucuuauauugcaaagcaagaucaacaccaguaacccucaguaaagaccaacuauccggaauaaauaacaucgcauucucaaacuaaggacuaguguccaccugucccuccugggcugcuggauugucucguuuuccugccaaauaaacaggaucagcgcuuuacagaucuaaaaaaaaaaaaaaaaaaaaaaaaaaaaaaaaaaaaaaaaaaaaaaaaaaaaaaaaaaaaaaaaugcaucccccccccccccccccccccccccccccccaaaggcucuuuucagagccaccagaauu

SEQ ID NO: 4764 - RNA, 1937 nt, Artificial Sequence
  mRNA product Design e-1 comprising derived and/or modified sequence from HRSV(A2)__F_DSCav1_mut4 (opt11)
gggagaauauaagcguuggcggagcgucgguuguagcacucugcgcgcccgcucuucugcugcuguuugucuacuuccuccugcuuccccgccgccgccgccgccaucaagcuuaccauggaacugcucauccucaaagccaacgccaucaccaccauucuuaccgccgucacauucugcuucgccucaggccaaaacaucaccgaagaauuuuaccaauccacuuguucagccgucucaaaaggauaccuaucagcccuccguaccggcugguacaccucggucauaacaauagaacucuccaacauaaaagaaaacaaaugcaacggcaccgacgccaaggucaaacugauaaaacaagaacuugauaaauacaaaaacgccgucacugaacuccaacuccucaugcaauccacucccgcuacuggcucuggcuccgccaucugcucuggcgucgccgucuguaaaguacuccaccucgaaggggaagucaacaaaaucaaaucagcccuccuuagcaccaacaaggccgucgucucccucucaaacggagucagcguccucaccuucaagguccucgaccucaagaacuacaucgacaaacaacuccugcccauccuaaauaaacaauccugcucuaucuccaauaucgaaaccguuauagaguuccaacagaaaaacaaccgacuccucgaaaucacccgcgaguucuccgucaacgcaggcgucaccaccccugugucaaccuacaugcucaccaacagcgaacuacucucacucaucaaugacaugcccaucaccaacgaccaaaagaaacucauguccaacaacguccaaaucguacgucaacaauccuacagcaucaugugcaucauaaaagaagaaguccucgccuacgucguccaacuuccccucuacggcgucauagacacccccugcuggaaacugcauaccucaccccuaugcaccaccaacacuaaagaaggcuccaacaucugccucacccgcacggaccgcggcugguacugcgacaacgccggcuccgucuccuucuucccccaagccgaaacuuguaaaguccaauccaacagagucuucugcgacaccaugaacucuagaacgcugccauccgagguaaaccuaugcaacgucgacaucuucaaucccaaauacgacugcaagaucaugaccucaaaaaccgacguauccuccucaguaaucaccagucucggagcuaucgucuccugcuacggcaaaaccaaaugcacggccucuaacaaaaaccgcggcaucaucaaaaccuucucaaacggaugcgacuacgucagcaacaaaggcguagauaccgucucugucggcaacacacuguacugcguaaacaagcaagaaggaaaaucccucuacguaaaaggcgaacccaucaucaacuucuacgacccccucguuuuccccucagaugaauuugacgccucgauaucacaagucaacgaaaagauaaaucagucccucgccuucauccgaaaauccgacgaacuccuccacaacguuaacgcaggaaaguccaccacaaacaucaugauaacuacaaucauaauagucauuaucgucauacuccucucccuaaucgccguaggccugcuacucuacugcaaagcccgcucaacccccgucacucucucaaaagaccaacucuccggcaucaauaacaucgccuucucaaacuaaggacuaguguccaccugucccuccugggcugcuggauugucucguuuuccugccaaauaaacaggaucagcgcuuuacagaucuaaaaaaaaaaaaaaaaaaaaaaaaaaaaaaaaaaaaaaaaaaaaaaaaaaaaaaaaaaaaaaaaugcaucccccccccccccccccccccccccccccccaaaggcucuuuucagagccaccagaauu

SEQ ID NO: 4765 - RNA, 1919 nt, Artificial Sequence
  mRNA product Design e-2 comprising derived and/or modified sequence from HRSV(A2)__F_DSCav1_mut4 (opt1)
gggagacccgugacccggaaguuguacggcuacgcgacuuucccucccacaaacccucgcgcccuuccuuuccuacuugggcccggcagaaagcuuaccauggagcugcucauccugaaggccaacgccaucaccaccauccugacggcggugaccuucugcuucgccagcggccagaacaucaccgaggaguucuaccaguccacgugcagcgccgucuccaagggguaccucagcgcccugcggaccggcugguacaccuccgugaucaccaucgagcugagcaacaucaaggagaacaagugcaacgggaccgacgccaaggugaagcucaucaagcaggagcuggacaaguacaagaacgcggucacggagcugcagcuccugaugcaguccaccccggcaaccggcuccggcuccgccaucugcagcggcgucgccgugugcaaggugcugcaccucgagggggaggucaacaagaucaagagcgcccugcuguccaccaacaaggccguggugagccucuccaacggcgucagcgugcugaccuucaaggugcuggaccucaagaacuacaucgacaagcagcugcugcccauccugaacaagcagagcugcuccaucagcaacaucgagacggugaucgaguuccagcagaagaacaaccggcuccuggagaucacccgcgaguucagcgugaacgccggggucaccacccccguguccacguacaugcugaccaacagcgagcuccugucccugaucaacgacaugccgaucaccaacgaccagaagaagcucaugagcaacaacgugcagaucguccggcagcaguccuacagcaucaugugcaucaucaaggaggaggugcuggcguacgugguccagcugccccucuacggcgugaucgacacccccugcuggaagcugcacacgagcccccugugcaccaccaacaccaaggagggguccaacaucugccucacgcgcaccgaccggggcugguacugcgacaacgccggcagcgucuccuucuucccgcaggccgagaccugcaaggugcagagcaaccgcguguucugcgacaccaugaacucccggacgcugcccagcgagguaaaccucugcaacgucgacaucuucaaccccaaguacgacugcaagaucaugaccuccaagaccgacgugagcuccagcgugaucaccucccugggggccaucgucagcugcuacggcaagacgaagugcaccgccagcaacaagaaccgggggaucaucaagaccuucuccaacggcugcgacuacgugagcaacaagggcguggacaccguguccgucgggaacacccuguacugcgugaacaagcaggagggcaagagccucuacgugaagggggagcccaucaucaacuucuacgacccgcuggucuuccccuccgacgaguucgacgcgagcaucucccaggugaacgagaagaucaaccagagccuggccuucauccgcaaguccgacgagcugcuccacaacgugaacgccggcaagagcacgaccaacaucaugaucaccaccaucaucaucgucaucaucgugauccugcugucccucaucgccguggggcugcugcucuacugcaaggcccggagcacgcccgucacccuguccaaggaccagcugagcggcaucaacaacaucgcguucuccaacugaggacuaguguccaccugucccuccugggcugcuggauugucucguuuuccugccaaauaaacaggaucagcgcuuuacagaucuaaaaaaaaaaaaaaaaaaaaaaaaaaaaaaaaaaaaaaaaaaaaaaaaaaaaaaaaaaaaaaaaugcaucccccccccccccccccccccccccccccccaaaggcucuuuucagagccaccagaauu

SEQ ID NO: 4766 - RNA, 1919 nt, Artificial Sequence
  mRNA product Design e-2 comprising derived and/or modified sequence from HRSV(A2)__F_DSCav1_mut4 (opt1)
gggagacccgugacccggaaguuguacggcuacgcgacuuucccucccacaaacccucgcgcccuuccuuuccuacuugggcccggcagaaagcuuaccauggagcugcucauccugaaggccaacgccaucaccaccauccugacggcggugaccuucugcuucgccagcggccagaacaucaccgaggaguucuaccaguccacgugcagcgccgucuccaagggguaccucagcgcccugcgcaccggcugguacaccuccgugaucaccaucgagcugagcaacaucaaggagaacaagugcaacgggaccgacgccaaggugaagcucaucaagcaggagcuggacaaguacaagaacgcggucacggagcugcagcuccugaugcaguccacccccgccaccggcagcggguccgccaucugcagcggcguggccgugugcaagguccugcaccucgagggcgaggugaacaagaucaaguccgcgcugcugagcaccaacaaggccguggucucccucagcaacgggguguccgugcugacguucaagguccuggaccucaagaacuacaucgacaagcagcugcugccgauccucaacaagcagagcugcuccaucagcaacaucgagaccgugaucgaguuccagcagaagaacaaccggcugcuggagaucacccgcgaguucuccgugaacgccggcgucaccacgcccgugagcaccuacaugcucaccaacagcgagcugcugucccucaucaacgacaugcccaucaccaacgaccagaagaagcugaugagcaacaacgugcagaucguccggcagcaguccuacagcaucaugugcaucaucaaggaggaggugcuggccuacgugguccagcucccccuguacggggugaucgacacgccgugcuggaagcugcacaccagcccccucugcaccaccaacacgaaggagggcuccaacaucugccugacccgcaccgaccgggggugguacugcgacaacgccggcuccgugagcuucuucccccaggcggagaccugcaagguccaguccaaccgcguguucugcgacacgaugaacagccggacccuccccuccgaggucaaccugugcaacguggacaucuucaacccgaaguacgacugcaagaucaugaccagcaagaccgacguguccagcuccgucaucacgagccugggcgccaucguguccugcuacgggaagaccaagugcaccgccagcaacaagaaccggggcaucaucaagaccuucuccaacgggugcgacuacgugagcaacaagggcgucgacacggugagcgugggcaacacccucuacugcgucaacaagcaggaggggaagucccuguacgugaagggcgagcccaucaucaacuucuacgacccccugguguuccccagcgacgaguucgacgccuccaucagccaggucaacgagaagaucaaccagucccucgccuucauccgcaagagcgacgagcugcugcacaacgugaacgcggggaaguccaccaccaacaucaugaucaccacgaucaucaucgugaucaucgucauccuccugagccugaucgccgugggccuccugcuguacugcaaggcccgguccaccccggugacccugagcaaggaccagcucuccgggaucaacaacaucgccuucagcaacugaggacuaguguccaccugucccuccugggcugcuggauugucucguuuuccugccaaauaaacaggaucagcgcuuuacagaucuaaaaaaaaaaaaaaaaaaaaaaaaaaaaaaaaaaaaaaaaaaaaaaaaaaaaaaaaaaaaaaaaugcaucccccccccccccccccccccccccccccccaaaggcucuuuucagagccaccagaauu

SEQ ID NO: 4767 - RNA, 1919 nt, Artificial Sequence
  mRNA product Design e-2 comprising derived and/or modified sequence from HRSV(A2)__F_DSCav1_mut4 (opt2)
gggagacccgugacccggaaguuguacggcuacgcgacuuucccucccacaaacccucgcgcccuuccuuuccuacuugggcccggcagaaagcuuaccauggagcuccucauccucaaggccaacgccaucaccaccauccucaccgccgucaccuucugcuucgccuccggccagaacaucaccgaggaguucuaccaguccaccugcuccgccgucuccaagggcuaccucuccgcccuccgcaccggcugguacaccuccgucaucaccaucgagcucuccaacaucaaggagaacaagugcaacggcaccgacgccaaggucaagcucaucaagcaggagcucgacaaguacaagaacgccgucaccgagcuccagcuccucaugcaguccacccccgccaccggcuccggcuccgccaucugcuccggcgucgccgucugcaagguccuccaccucgagggcgaggucaacaagaucaaguccgcccuccucuccaccaacaaggccgucgucucccucuccaacggcgucuccguccucaccuucaagguccucgaccucaagaacuacaucgacaagcagcuccuccccauccucaacaagcaguccugcuccaucuccaacaucgagaccgucaucgaguuccagcagaagaacaaccgccuccucgagaucacccgcgaguucuccgucaacgccggcgucaccacccccgucuccaccuacaugcucaccaacuccgagcuccucucccucaucaacgacaugcccaucaccaacgaccagaagaagcucauguccaacaacguccagaucguccgccagcaguccuacuccaucaugugcaucaucaaggaggagguccucgccuacgucguccagcucccccucuacggcgucaucgacacccccugcuggaagcuccacaccuccccccucugcaccaccaacaccaaggagggcuccaacaucugccucacccgcaccgaccgcggcugguacugcgacaacgccggcuccgucuccuucuucccccaggccgagaccugcaagguccaguccaaccgcgucuucugcgacaccaugaacucccgcacccuccccuccgaggucaaccucugcaacgucgacaucuucaaccccaaguacgacugcaagaucaugaccuccaagaccgacgucuccuccuccgucaucaccucccucggcgccaucgucuccugcuacggcaagaccaagugcaccgccuccaacaagaaccgcggcaucaucaagaccuucuccaacggcugcgacuacgucuccaacaagggcgucgacaccgucuccgucggcaacacccucuacugcgucaacaagcaggagggcaagucccucuacgucaagggcgagcccaucaucaacuucuacgacccccucgucuuccccuccgacgaguucgacgccuccaucucccaggucaacgagaagaucaaccagucccucgccuucauccgcaaguccgacgagcuccuccacaacgucaacgccggcaaguccaccaccaacaucaugaucaccaccaucaucaucgucaucaucgucauccuccucucccucaucgccgucggccuccuccucuacugcaaggcccgcuccacccccgucacccucuccaaggaccagcucuccggcaucaacaacaucgccuucuccaacugaggacuaguguccaccugucccuccugggcugcuggauugucucguuuuccugccaaauaaacaggaucagcgcuuuacagaucuaaaaaaaaaaaaaaaaaaaaaaaaaaaaaaaaaaaaaaaaaaaaaaaaaaaaaaaaaaaaaaaaugcaucccccccccccccccccccccccccccccccaaaggcucuuuucagagccaccagaauu

SEQ ID NO: 4768 - RNA, 1919 nt, Artificial Sequence
  mRNA product Design e-2 comprising derived and/or modified sequence from HRSV(A2)__F_DSCav1_mut4 (opt3)
gggagacccgugacccggaaguuguacggcuacgcgacuuucccucccacaaacccucgcgcccuuccuuuccuacuugggcccggcagaaagcuuaccauggagcugcucauccuuaaggccaacgcuauuaccacaauacugacugcagugacguucugcuuugccagcggccagaauaucaccgaagaguucuaccaauccacauguucugcggucucaaaaggguauuugagugcuuuaagaacuggaugguacaccagcguuauuacaaucgaacuguccaacauuaaggagaauaaaugcaacgguaccgacgccaaggugaaacuaaucaagcaggaacucgauaaguauaaaaaugcaguaacugagcugcagcuucugaugcagucuacacccgccaccggcucggggucagcuauauguagcggaguggcagucugcaagguguugcaccucgagggcgaaguuaacaaaaucaagagugcccugcuguccacgaauaaagcuguggucucucucagcaacgguguguccguauuaacuuuuaagguucuggaccuuaagaauuacauugauaaacaauugcugccuauccuaaacaagcagucauguaguauuagcaauaucgagaccgugauagaguuccagcagaaaaacaauaggcuccuggaaauuacacgggaguuuucugucaacgccggggugacuaccccaguguccacauauaugcuuaccaauucagaacuguugagccucaucaacgacaugccgauuacgaacgaucaaaagaaacugaugaguaauaacguccagaucguucgccagcagucuuacuccaucaugugcauuauaaaggaggaaguguuagcguauguagugcaacugccccucuacggagucaucgacacuccuuguuggaaacuucauacaagcccacugugcaccacuaauacaaaggagggcucgaacauuuguuugacccgaacggaucguggcugguacugcgacaaugcagggucuguguccuucuuuccccaggccgaaaccuguaagguucagucaaacagaguguucugcgauacaaugaauaguagaacucugccuagcgaggucaaccucugcaauguggacaucuuuaacccaaaauaugauuguaagauaaugaccuccaaaacagacguaucuagcucaguuauuaccagucugggagcuaucguguccugcuacgguaagacuaaauguacagccagcaauaagaacaggggcaucauuaagaccuucucuaaugggugcgauuaugucucaaacaaaggaguggacacugucagugugggcaauacgcuuuacuguguuaacaagcaagaggguaaaagccuguaugugaagggggaacccaucauuaacuuuuacgacccuuugguauucccauccgaugaguuugacgcaucuauaucgcaggucaaugagaaaaucaaccagagccucgcuuucauucggaaguccgaugaacuguuacacaaugugaacgccggaaagucaacaaccaauaucaugaucacuaccauuauaaucguuauuaucgugauucugcuaagucucaucgcggucggccugcuuuuguauugcaaagcccgcucuacaccggugacccugagcaaggaccagcucuccggcauaaacaauaucgcauucucaaacugaggacuaguguccaccugucccuccugggcugcuggauugucucguuuuccugccaaauaaacaggaucagcgcuuuacagaucuaaaaaaaaaaaaaaaaaaaaaaaaaaaaaaaaaaaaaaaaaaaaaaaaaaaaaaaaaaaaaaaaugcaucccccccccccccccccccccccccccccccaaaggcucuuuucagagccaccagaauu

SEQ ID NO: 4769 - RNA, 1919 nt, Artificial Sequence
  mRNA product Design e-2 comprising derived and/or modified sequence from HRSV(A2)__F_DSCav1_mut4 (opt4)
gggagacccgugacccggaaguuguacggcuacgcgacuuucccucccacaaacccucgcgcccuuccuuuccuacuugggcccggcagaaagcuuaccauggagcugcugauccugaaggccaacgccaucaccaccauccugaccgccgugaccuucugcuucgccagcggccagaacaucaccgaggaguucuaccagagcaccugcagcgccgugagcaagggcuaccugagcgcccugagaaccggcugguacaccagcgugaucaccaucgagcugagcaacaucaaggagaacaagugcaacggcaccgacgccaaggugaagcugaucaagcaggagcuggacaaguacaagaacgccgugaccgagcugcagcugcugaugcagagcacccccgccaccggcagcggcagcgccaucugcagcggcguggccgugugcaaggugcugcaccuggagggcgaggugaacaagaucaagagcgcccugcugagcaccaacaaggccguggugagccugagcaacggcgugagcgugcugaccuucaaggugcuggaccugaagaacuacaucgacaagcagcugcugcccauccugaacaagcagagcugcagcaucagcaacaucgagaccgugaucgaguuccagcagaagaacaacagacugcuggagaucaccagagaguucagcgugaacgccggcgugaccacccccgugagcaccuacaugcugaccaacagcgagcugcugagccugaucaacgacaugcccaucaccaacgaccagaagaagcugaugagcaacaacgugcagaucgugagacagcagagcuacagcaucaugugcaucaucaaggaggaggugcuggccuacguggugcagcugccccuguacggcgugaucgacacccccugcuggaagcugcacaccagcccccugugcaccaccaacaccaaggagggcagcaacaucugccugaccagaaccgacagaggcugguacugcgacaacgccggcagcgugagcuucuucccccaggccgagaccugcaaggugcagagcaacagaguguucugcgacaccaugaacagcagaacccugcccagcgaggugaaccugugcaacguggacaucuucaaccccaaguacgacugcaagaucaugaccagcaagaccgacgugagcagcagcgugaucaccagccugggcgccaucgugagcugcuacggcaagaccaagugcaccgccagcaacaagaacagaggcaucaucaagaccuucagcaacggcugcgacuacgugagcaacaagggcguggacaccgugagcgugggcaacacccuguacugcgugaacaagcaggagggcaagagccuguacgugaagggcgagcccaucaucaacuucuacgacccccugguguuccccagcgacgaguucgacgccagcaucagccaggugaacgagaagaucaaccagagccuggccuucaucagaaagagcgacgagcugcugcacaacgugaacgccggcaagagcaccaccaacaucaugaucaccaccaucaucaucgugaucaucgugauccugcugagccugaucgccgugggccugcugcuguacugcaaggccagaagcacccccgugacccugagcaaggaccagcugagcggcaucaacaacaucgccuucagcaacugaggacuaguguccaccugucccuccugggcugcuggauugucucguuuuccugccaaauaaacaggaucagcgcuuuacagaucuaaaaaaaaaaaaaaaaaaaaaaaaaaaaaaaaaaaaaaaaaaaaaaaaaaaaaaaaaaaaaaaaugcaucccccccccccccccccccccccccccccccaaaggcucuuuucagagccaccagaauu

SEQ ID NO: 4770 - RNA, 1919 nt, Artificial Sequence
  mRNA product Design e-2 comprising derived and/or modified sequence from HRSV(A2)__F_DSCav1_mut4 (opt5)
gggagacccgugacccggaaguuguacggcuacgcgacuuucccucccacaaacccucgcgcccuuccuuuccuacuugggcccggcagaaagcuuaccauggagcugcucauccugaaggccaacgcuauuaccacaauccuuacggccgugaccuucugcuuugcgagcggccagaauauuacagaagaguucuaccaauccaccuguucugcugucagcaaaggguaucuguccgcccucagaacaggaugguacaccucuguuaucacaauugaacugagcaacaucaaggagaauaaaugcaacggcaccgacgccaaggugaaacuuaucaagcaggaacuggauaaguauaaaaaugcugugacggagcuccagcugcugaugcaguccacccccgccacagggucuggaagcgcuauuuguuccggcgucgccgugugcaagguucuccaccuggagggggaagugaacaaaaucaagagcgcgcuucugucuaccaauaaagccgucgugucccucagcaacggaguuucugugcugacauuuaagguccuugaccugaagaauuacauugauaaacaacuccugccuauccugaacaagcaguccuguagcauuucuaauaucgagaccgugauugaguuccagcagaaaaacaaucggcuccuggaaaucacgcgcgaguuuuccgugaacgcuggcgucacaaccccgguuagcacauauaugcuuaccaauuccgaacugcucucucugaucaacgacaugcccauuaccaacgaucaaaagaaacuuaugagcaauaacgugcagaucgugagacagcaguccuacagcauuaugugcaucauuaaggaggaaguccuggccuaugugguucaacucccucuguacggcgugaucgacacacccuguuggaaacugcauacgucuccucucugcaccacaaauaccaaggagggguccaacaucugucugacacggaccgaucgcggaugguacugcgacaaugcuggcagcgucucuuucuuuccccaggccgaaacguguaaggugcagagcaacagaguuuucugcgauacaaugaacuccagaacccugccuucugaggugaaucucugcaaugucgacauuuuuaacccgaaauaugauuguaagaucaugaccagcaaaacagacguguccagcucugucauuaccucccugggggcgaucgugagcugcuacggaaagacaaaauguacggccucuaauaagaaccggggcauuaucaagaccuucuccaaugggugcgauuauguuagcaacaaaggaguggacacagucuccgugggcaauacccuuuacuguguuaacaagcaagagggcaaaucucuguaugugaagggggaacccaucauuaacuuuuacgacccucucgucuuccccagcgaugaguuugacgcuuccaucucucaggugaaugagaaaauuaaccagagccuggccuucauccgcaaguccgaugaacugcuccacaaugugaacgcuggaaagagcacaaccaauauuaugaucacgaccauuaucaucguuauuaucgucauucugcuuucucugaucgccgugggccuccugcuguauugcaaagccagauccacaccugugacccuuagcaaggaccagcucucugggauuaacaauaucgcuuucuccaacugaggacuaguguccaccugucccuccugggcugcuggauugucucguuuuccugccaaauaaacaggaucagcgcuuuacagaucuaaaaaaaaaaaaaaaaaaaaaaaaaaaaaaaaaaaaaaaaaaaaaaaaaaaaaaaaaaaaaaaaugcaucccccccccccccccccccccccccccccccaaaggcucuuuucagagccaccagaauu

SEQ ID NO: 4771 - RNA, 1919 nt, Artificial Sequence
  mRNA product Design e-2 comprising derived and/or modified sequence from HRSV(A2)__F_DSCav1_mut4 (opt6)
gggagacccgugacccggaaguuguacggcuacgcgacuuucccucccacaaacccucgcgcccuuccuuuccuacuugggcccggcagaaagcuuaccauggaacuucuaauacucaaagccaacgcaauaacaacaauauuaacagccguaacauuuugcuucgcaucaggucaaaacauaacagaagaguucuaccaauccacaugcucagcaguaucaaaaggauauuuaagugcucuaagaacaggaugguacacauccguaauaacaaucgaacuaucaaacauaaaagaaaauaaauguaauggaacagacgccaaaguaaaauuaaucaaacaagaacuagacaaauacaaaaacgcaguuacugaauuacaauuauuaaugcaaucaacaccggccacaggaucuggaucagcaauaugcucaggaguagcagucugcaaaguauuacaccuagaaggggaaguuaauaaaaucaaaucagcauuacuauccaccaacaaagcgguaguuucacucuccaacggcguaucugucuuaacauucaaaguauuagaccuaaaaaacuacauugacaaacaacuacuaccaauccuaaacaaacaaucauguuccauaagcaauauagaaacaguaauagaauuucaacaaaaaaacaacagacuauuagaaauaacaagagaauuuuccgucaaugcaggaguuacuaccccugucuccaccuauaugcuaaccaauuccgaacucuuaucauuaauaaacgacaugccuaucacaaaugaccaaaaaaaauuaaugagcaacaacguacaaauaguacgacaacaaucauacucaaucaugugcauaauaaaagaagaaguccuagcauacguuguacaacuaccacuauacggagucauagauaccccaugcuggaaacuccauacaagcccacuaugcacuacaaacacaaaagaaggcucuaauauaugucuaacaagaacagaccgaggaugguacugcgauaaugccggcucagucucauucuuuccgcaagccgaaacuuguaaaguacaaaguaacagaguauuuugugacaccaugaacucaagaacccucccaagcgaagucaaucuaugcaacguugauauauucaaucccaaauacgacugcaaaaucaugaccucaaaaacagacgucagcucauccguuauaacaucacuaggagccaucguaucuugcuauggaaaaacaaaaugcacagcaagcaauaaaaacagaggcauaauaaaaacauucucaaauggaugcgacuacguaucaaacaaaggagucgacacaguuuccguaggaaacacuuuauacugcguaaacaaacaagaaggaaaaucauuauacgucaaaggugaaccaauaauaaacuucuacgauccacuuguauucccaucagacgaauuugacgcaucaauuucacaaguaaacgaaaaaauaaaccaaucacucgcauucauaagaaaaucagaugaacuacuacauaacguaaacgcaggaaaauccacaacaaacaucaugauaacaaccaucauaaucguaauaaucguaauacuauuaucccuaauugcaguaggauuacucuuauauugcaaagcaagaucaacaccaguaacccucaguaaagaccaacuauccggaauaaauaacaucgcauucucaaacuaaggacuaguguccaccugucccuccugggcugcuggauugucucguuuuccugccaaauaaacaggaucagcgcuuuacagaucuaaaaaaaaaaaaaaaaaaaaaaaaaaaaaaaaaaaaaaaaaaaaaaaaaaaaaaaaaaaaaaaaugcaucccccccccccccccccccccccccccccccaaaggcucuuuucagagccaccagaauu

SEQ ID NO: 4772 - RNA, 1919 nt, Artificial Sequence
  mRNA product Design e-2 comprising derived and/or modified sequence from HRSV(A2)__F_DSCav1_mut4 (opt11)
gggagacccgugacccggaaguuguacggcuacgcgacuuucccucccacaaacccucgcgcccuuccuuuccuacuugggcccggcagaaagcuuaccauggaacugcucauccucaaagccaacgccaucaccaccauucuuaccgccgucacauucugcuucgccucaggccaaaacaucaccgaagaauuuuaccaauccacuuguucagccgucucaaaaggauaccuaucagcccuccguaccggcugguacaccucggucauaacaauagaacucuccaacauaaaagaaaacaaaugcaacggcaccgacgccaaggucaaacugauaaaacaagaacuugauaaauacaaaaacgccgucacugaacuccaacuccucaugcaauccacucccgcuacuggcucuggcuccgccaucugcucuggcgucgccgucuguaaaguacuccaccucgaaggggaagucaacaaaaucaaaucagcccuccuuagcaccaacaaggccgucgucucccucucaaacggagucagcguccucaccuucaagguccucgaccucaagaacuacaucgacaaacaacuccugcccauccuaaauaaacaauccugcucuaucuccaauaucgaaaccguuauagaguuccaacagaaaaacaaccgacuccucgaaaucacccgcgaguucuccgucaacgcaggcgucaccaccccugugucaaccuacaugcucaccaacagcgaacuacucucacucaucaaugacaugcccaucaccaacgaccaaaagaaacucauguccaacaacguccaaaucguacgucaacaauccuacagcaucaugugcaucauaaaagaagaaguccucgccuacgucguccaacuuccccucuacggcgucauagacacccccugcuggaaacugcauaccucaccccuaugcaccaccaacacuaaagaaggcuccaacaucugccucacccgcacggaccgcggcugguacugcgacaacgccggcuccgucuccuucuucccccaagccgaaacuuguaaaguccaauccaacagagucuucugcgacaccaugaacucuagaacgcugccauccgagguaaaccuaugcaacgucgacaucuucaaucccaaauacgacugcaagaucaugaccucaaaaaccgacguauccuccucaguaaucaccagucucggagcuaucgucuccugcuacggcaaaaccaaaugcacggccucuaacaaaaaccgcggcaucaucaaaaccuucucaaacggaugcgacuacgucagcaacaaaggcguagauaccgucucugucggcaacacacuguacugcguaaacaagcaagaaggaaaaucccucuacguaaaaggcgaacccaucaucaacuucuacgacccccucguuuuccccucagaugaauuugacgccucgauaucacaagucaacgaaaagauaaaucagucccucgccuucauccgaaaauccgacgaacuccuccacaacguuaacgcaggaaaguccaccacaaacaucaugauaacuacaaucauaauagucauuaucgucauacuccucucccuaaucgccguaggccugcuacucuacugcaaagcccgcucaacccccgucacucucucaaaagaccaacucuccggcaucaauaacaucgccuucucaaacuaaggacuaguguccaccugucccuccugggcugcuggauugucucguuuuccugccaaauaaacaggaucagcgcuuuacagaucuaaaaaaaaaaaaaaaaaaaaaaaaaaaaaaaaaaaaaaaaaaaaaaaaaaaaaaaaaaaaaaaaugcaucccccccccccccccccccccccccccccccaaaggcucuuuucagagccaccagaauu

SEQ ID NO: 4773 - RNA, 1889 nt, Artificial Sequence
  mRNA product Design e-3 comprising derived and/or modified sequence from HRSV(A2)__F_DSCav1_mut4 (opt1)
gggagacuuucccauucuguagcagaauuugguguugccuguggucuuggucccgcggagaagcuuaccauggagcugcucauccugaaggccaacgccaucaccaccauccugacggcggugaccuucugcuucgccagcggccagaacaucaccgaggaguucuaccaguccacgugcagcgccgucuccaagggguaccucagcgcccugcggaccggcugguacaccuccgugaucaccaucgagcugagcaacaucaaggagaacaagugcaacgggaccgacgccaaggugaagcucaucaagcaggagcuggacaaguacaagaacgcggucacggagcugcagcuccugaugcaguccaccccggcaaccggcuccggcuccgccaucugcagcggcgucgccgugugcaaggugcugcaccucgagggggaggucaacaagaucaagagcgcccugcuguccaccaacaaggccguggugagccucuccaacggcgucagcgugcugaccuucaaggugcuggaccucaagaacuacaucgacaagcagcugcugcccauccugaacaagcagagcugcuccaucagcaacaucgagacggugaucgaguuccagcagaagaacaaccggcuccuggagaucacccgcgaguucagcgugaacgccggggucaccacccccguguccacguacaugcugaccaacagcgagcuccugucccugaucaacgacaugccgaucaccaacgaccagaagaagcucaugagcaacaacgugcagaucguccggcagcaguccuacagcaucaugugcaucaucaaggaggaggugcuggcguacgugguccagcugccccucuacggcgugaucgacacccccugcuggaagcugcacacgagcccccugugcaccaccaacaccaaggagggguccaacaucugccucacgcgcaccgaccggggcugguacugcgacaacgccggcagcgucuccuucuucccgcaggccgagaccugcaaggugcagagcaaccgcguguucugcgacaccaugaacucccggacgcugcccagcgagguaaaccucugcaacgucgacaucuucaaccccaaguacgacugcaagaucaugaccuccaagaccgacgugagcuccagcgugaucaccucccugggggccaucgucagcugcuacggcaagacgaagugcaccgccagcaacaagaaccgggggaucaucaagaccuucuccaacggcugcgacuacgugagcaacaagggcguggacaccguguccgucgggaacacccuguacugcgugaacaagcaggagggcaagagccucuacgugaagggggagcccaucaucaacuucuacgacccgcuggucuuccccuccgacgaguucgacgcgagcaucucccaggugaacgagaagaucaaccagagccuggccuucauccgcaaguccgacgagcugcuccacaacgugaacgccggcaagagcacgaccaacaucaugaucaccaccaucaucaucgucaucaucgugauccugcugucccucaucgccguggggcugcugcucuacugcaaggcccggagcacgcccgucacccuguccaaggaccagcugagcggcaucaacaacaucgcguucuccaacugaggacuaguguccaccugucccuccugggcugcuggauugucucguuuuccugccaaauaaacaggaucagcgcuuuacagaucuaaaaaaaaaaaaaaaaaaaaaaaaaaaaaaaaaaaaaaaaaaaaaaaaaaaaaaaaaaaaaaaaugcaucccccccccccccccccccccccccccccccaaaggcucuuuucagagccaccagaauu

SEQ ID NO: 4774 - RNA, 1889 nt, Artificial Sequence
  mRNA product Design e-3 comprising derived and/or modified sequence from HRSV(A2)__F_DSCav1_mut4 (opt1)
gggagacuuucccauucuguagcagaauuugguguugccuguggucuuggucccgcggagaagcuuaccauggagcugcucauccugaaggccaacgccaucaccaccauccugacggcggugaccuucugcuucgccagcggccagaacaucaccgaggaguucuaccaguccacgugcagcgccgucuccaagggguaccucagcgcccugcgcaccggcugguacaccuccgugaucaccaucgagcugagcaacaucaaggagaacaagugcaacgggaccgacgccaaggugaagcucaucaagcaggagcuggacaaguacaagaacgcggucacggagcugcagcuccugaugcaguccacccccgccaccggcagcggguccgccaucugcagcggcguggccgugugcaagguccugcaccucgagggcgaggugaacaagaucaaguccgcgcugcugagcaccaacaaggccguggucucccucagcaacgggguguccgugcugacguucaagguccuggaccucaagaacuacaucgacaagcagcugcugccgauccucaacaagcagagcugcuccaucagcaacaucgagaccgugaucgaguuccagcagaagaacaaccggcugcuggagaucacccgcgaguucuccgugaacgccggcgucaccacgcccgugagcaccuacaugcucaccaacagcgagcugcugucccucaucaacgacaugcccaucaccaacgaccagaagaagcugaugagcaacaacgugcagaucguccggcagcaguccuacagcaucaugugcaucaucaaggaggaggugcuggccuacgugguccagcucccccuguacggggugaucgacacgccgugcuggaagcugcacaccagcccccucugcaccaccaacacgaaggagggcuccaacaucugccugacccgcaccgaccgggggugguacugcgacaacgccggcuccgugagcuucuucccccaggcggagaccugcaagguccaguccaaccgcguguucugcgacacgaugaacagccggacccuccccuccgaggucaaccugugcaacguggacaucuucaacccgaaguacgacugcaagaucaugaccagcaagaccgacguguccagcuccgucaucacgagccugggcgccaucguguccugcuacgggaagaccaagugcaccgccagcaacaagaaccggggcaucaucaagaccuucuccaacgggugcgacuacgugagcaacaagggcgucgacacggugagcgugggcaacacccucuacugcgucaacaagcaggaggggaagucccuguacgugaagggcgagcccaucaucaacuucuacgacccccugguguuccccagcgacgaguucgacgccuccaucagccaggucaacgagaagaucaaccagucccucgccuucauccgcaagagcgacgagcugcugcacaacgugaacgcggggaaguccaccaccaacaucaugaucaccacgaucaucaucgugaucaucgucauccuccugagccugaucgccgugggccuccugcuguacugcaaggcccgguccaccccggugacccugagcaaggaccagcucuccgggaucaacaacaucgccuucagcaacugaggacuaguguccaccugucccuccugggcugcuggauugucucguuuuccugccaaauaaacaggaucagcgcuuuacagaucuaaaaaaaaaaaaaaaaaaaaaaaaaaaaaaaaaaaaaaaaaaaaaaaaaaaaaaaaaaaaaaaaugcaucccccccccccccccccccccccccccccccaaaggcucuuuucagagccaccagaauu

SEQ ID NO: 4775 - RNA, 1889 nt, Artificial Sequence
  mRNA product Design e-3 comprising derived and/or modified sequence from HRSV(A2)__F_DSCav1_mut4 (opt2)
gggagacuuucccauucuguagcagaauuugguguugccuguggucuuggucccgcggagaagcuuaccauggagcuccucauccucaaggccaacgccaucaccaccauccucaccgccgucaccuucugcuucgccuccggccagaacaucaccgaggaguucuaccaguccaccugcuccgccgucuccaagggcuaccucuccgcccuccgcaccggcugguacaccuccgucaucaccaucgagcucuccaacaucaaggagaacaagugcaacggcaccgacgccaaggucaagcucaucaagcaggagcucgacaaguacaagaacgccgucaccgagcuccagcuccucaugcaguccacccccgccaccggcuccggcuccgccaucugcuccggcgucgccgucugcaagguccuccaccucgagggcgaggucaacaagaucaaguccgcccuccucuccaccaacaaggccgucgucucccucuccaacggcgucuccguccucaccuucaagguccucgaccucaagaacuacaucgacaagcagcuccuccccauccucaacaagcaguccugcuccaucuccaacaucgagaccgucaucgaguuccagcagaagaacaaccgccuccucgagaucacccgcgaguucuccgucaacgccggcgucaccacccccgucuccaccuacaugcucaccaacuccgagcuccucucccucaucaacgacaugcccaucaccaacgaccagaagaagcucauguccaacaacguccagaucguccgccagcaguccuacuccaucaugugcaucaucaaggaggagguccucgccuacgucguccagcucccccucuacggcgucaucgacacccccugcuggaagcuccacaccuccccccucugcaccaccaacaccaaggagggcuccaacaucugccucacccgcaccgaccgcggcugguacugcgacaacgccggcuccgucuccuucuucccccaggccgagaccugcaagguccaguccaaccgcgucuucugcgacaccaugaacucccgcacccuccccuccgaggucaaccucugcaacgucgacaucuucaaccccaaguacgacugcaagaucaugaccuccaagaccgacgucuccuccuccgucaucaccucccucggcgccaucgucuccugcuacggcaagaccaagugcaccgccuccaacaagaaccgcggcaucaucaagaccuucuccaacggcugcgacuacgucuccaacaagggcgucgacaccgucuccgucggcaacacccucuacugcgucaacaagcaggagggcaagucccucuacgucaagggcgagcccaucaucaacuucuacgacccccucgucuuccccuccgacgaguucgacgccuccaucucccaggucaacgagaagaucaaccagucccucgccuucauccgcaaguccgacgagcuccuccacaacgucaacgccggcaaguccaccaccaacaucaugaucaccaccaucaucaucgucaucaucgucauccuccucucccucaucgccgucggccuccuccucuacugcaaggcccgcuccacccccgucacccucuccaaggaccagcucuccggcaucaacaacaucgccuucuccaacugaggacuaguguccaccugucccuccugggcugcuggauugucucguuuuccugccaaauaaacaggaucagcgcuuuacagaucuaaaaaaaaaaaaaaaaaaaaaaaaaaaaaaaaaaaaaaaaaaaaaaaaaaaaaaaaaaaaaaaaugcaucccccccccccccccccccccccccccccccaaaggcucuuuucagagccaccagaauu

SEQ ID NO: 4776 - RNA, 1889 nt, Artificial Sequence
  mRNA product Design e-3 comprising derived and/or modified sequence from HRSV(A2)__F_DSCav1_mut4 (opt3)
gggagacuuucccauucuguagcagaauuugguguugccuguggucuuggucccgcggagaagcuuaccauggagcugcucauccuuaaggccaacgcuauuaccacaauacugacugcagugacguucugcuuugccagcggccagaauaucaccgaagaguucuaccaauccacauguucugcggucucaaaaggguauuugagugcuuuaagaacuggaugguacaccagcguuauuacaaucgaacuguccaacauuaaggagaauaaaugcaacgguaccgacgccaaggugaaacuaaucaagcaggaacucgauaaguauaaaaaugcaguaacugagcugcagcuucugaugcagucuacacccgccaccggcucggggucagcuauauguagcggaguggcagucugcaagguguugcaccucgagggcgaaguuaacaaaaucaagagugcccugcuguccacgaauaaagcuguggucucucucagcaacgguguguccguauuaacuuuuaagguucuggaccuuaagaauuacauugauaaacaauugcugccuauccuaaacaagcagucauguaguauuagcaauaucgagaccgugauagaguuccagcagaaaaacaauaggcuccuggaaauuacacgggaguuuucugucaacgccggggugacuaccccaguguccacauauaugcuuaccaauucagaacuguugagccucaucaacgacaugccgauuacgaacgaucaaaagaaacugaugaguaauaacguccagaucguucgccagcagucuuacuccaucaugugcauuauaaaggaggaaguguuagcguauguagugcaacugccccucuacggagucaucgacacuccuuguuggaaacuucauacaagcccacugugcaccacuaauacaaaggagggcucgaacauuuguuugacccgaacggaucguggcugguacugcgacaaugcagggucuguguccuucuuuccccaggccgaaaccuguaagguucagucaaacagaguguucugcgauacaaugaauaguagaacucugccuagcgaggucaaccucugcaauguggacaucuuuaacccaaaauaugauuguaagauaaugaccuccaaaacagacguaucuagcucaguuauuaccagucugggagcuaucguguccugcuacgguaagacuaaauguacagccagcaauaagaacaggggcaucauuaagaccuucucuaaugggugcgauuaugucucaaacaaaggaguggacacugucagugugggcaauacgcuuuacuguguuaacaagcaagaggguaaaagccuguaugugaagggggaacccaucauuaacuuuuacgacccuuugguauucccauccgaugaguuugacgcaucuauaucgcaggucaaugagaaaaucaaccagagccucgcuuucauucggaaguccgaugaacuguuacacaaugugaacgccggaaagucaacaaccaauaucaugaucacuaccauuauaaucguuauuaucgugauucugcuaagucucaucgcggucggccugcuuuuguauugcaaagcccgcucuacaccggugacccugagcaaggaccagcucuccggcauaaacaauaucgcauucucaaacugaggacuaguguccaccugucccuccugggcugcuggauugucucguuuuccugccaaauaaacaggaucagcgcuuuacagaucuaaaaaaaaaaaaaaaaaaaaaaaaaaaaaaaaaaaaaaaaaaaaaaaaaaaaaaaaaaaaaaaaugcaucccccccccccccccccccccccccccccccaaaggcucuuuucagagccaccagaauu

SEQ ID NO: 4777 - RNA, 1889 nt, Artificial Sequence
  mRNA product Design e-3 comprising derived and/or modified sequence from HRSV(A2)__F_DSCav1_mut4 (opt4)
gggagacuuucccauucuguagcagaauuugguguugccuguggucuuggucccgcggagaagcuuaccauggagcugcugauccugaaggccaacgccaucaccaccauccugaccgccgugaccuucugcuucgccagcggccagaacaucaccgaggaguucuaccagagcaccugcagcgccgugagcaagggcuaccugagcgcccugagaaccggcugguacaccagcgugaucaccaucgagcugagcaacaucaaggagaacaagugcaacggcaccgacgccaaggugaagcugaucaagcaggagcuggacaaguacaagaacgccgugaccgagcugcagcugcugaugcagagcacccccgccaccggcagcggcagcgccaucugcagcggcguggccgugugcaaggugcugcaccuggagggcgaggugaacaagaucaagagcgcccugcugagcaccaacaaggccguggugagccugagcaacggcgugagcgugcugaccuucaaggugcuggaccugaagaacuacaucgacaagcagcugcugcccauccugaacaagcagagcugcagcaucagcaacaucgagaccgugaucgaguuccagcagaagaacaacagacugcuggagaucaccagagaguucagcgugaacgccggcgugaccacccccgugagcaccuacaugcugaccaacagcgagcugcugagccugaucaacgacaugcccaucaccaacgaccagaagaagcugaugagcaacaacgugcagaucgugagacagcagagcuacagcaucaugugcaucaucaaggaggaggugcuggccuacguggugcagcugccccuguacggcgugaucgacacccccugcuggaagcugcacaccagcccccugugcaccaccaacaccaaggagggcagcaacaucugccugaccagaaccgacagaggcugguacugcgacaacgccggcagcgugagcuucuucccccaggccgagaccugcaaggugcagagcaacagaguguucugcgacaccaugaacagcagaacccugcccagcgaggugaaccugugcaacguggacaucuucaaccccaaguacgacugcaagaucaugaccagcaagaccgacgugagcagcagcgugaucaccagccugggcgccaucgugagcugcuacggcaagaccaagugcaccgccagcaacaagaacagaggcaucaucaagaccuucagcaacggcugcgacuacgugagcaacaagggcguggacaccgugagcgugggcaacacccuguacugcgugaacaagcaggagggcaagagccuguacgugaagggcgagcccaucaucaacuucuacgacccccugguguuccccagcgacgaguucgacgccagcaucagccaggugaacgagaagaucaaccagagccuggccuucaucagaaagagcgacgagcugcugcacaacgugaacgccggcaagagcaccaccaacaucaugaucaccaccaucaucaucgugaucaucgugauccugcugagccugaucgccgugggccugcugcuguacugcaaggccagaagcacccccgugacccugagcaaggaccagcugagcggcaucaacaacaucgccuucagcaacugaggacuaguguccaccugucccuccugggcugcuggauugucucguuuuccugccaaauaaacaggaucagcgcuuuacagaucuaaaaaaaaaaaaaaaaaaaaaaaaaaaaaaaaaaaaaaaaaaaaaaaaaaaaaaaaaaaaaaaaugcaucccccccccccccccccccccccccccccccaaaggcucuuuucagagccaccagaauu

SEQ ID NO: 4778 - RNA, 1889 nt, Artificial Sequence
  mRNA product Design e-3 comprising derived and/or modified sequence from HRSV(A2)__F_DSCav1_mut4 (opt5)
gggagacuuucccauucuguagcagaauuugguguugccuguggucuuggucccgcggagaagcuuaccauggagcugcucauccugaaggccaacgcuauuaccacaauccuuacggccgugaccuucugcuuugcgagcggccagaauauuacagaagaguucuaccaauccaccuguucugcugucagcaaaggguaucuguccgcccucagaacaggaugguacaccucuguuaucacaauugaacugagcaacaucaaggagaauaaaugcaacggcaccgacgccaaggugaaacuuaucaagcaggaacuggauaaguauaaaaaugcugugacggagcuccagcugcugaugcaguccacccccgccacagggucuggaagcgcuauuuguuccggcgucgccgugugcaagguucuccaccuggagggggaagugaacaaaaucaagagcgcgcuucugucuaccaauaaagccgucgugucccucagcaacggaguuucugugcugacauuuaagguccuugaccugaagaauuacauugauaaacaacuccugccuauccugaacaagcaguccuguagcauuucuaauaucgagaccgugauugaguuccagcagaaaaacaaucggcuccuggaaaucacgcgcgaguuuuccgugaacgcuggcgucacaaccccgguuagcacauauaugcuuaccaauuccgaacugcucucucugaucaacgacaugcccauuaccaacgaucaaaagaaacuuaugagcaauaacgugcagaucgugagacagcaguccuacagcauuaugugcaucauuaaggaggaaguccuggccuaugugguucaacucccucuguacggcgugaucgacacacccuguuggaaacugcauacgucuccucucugcaccacaaauaccaaggagggguccaacaucugucugacacggaccgaucgcggaugguacugcgacaaugcuggcagcgucucuuucuuuccccaggccgaaacguguaaggugcagagcaacagaguuuucugcgauacaaugaacuccagaacccugccuucugaggugaaucucugcaaugucgacauuuuuaacccgaaauaugauuguaagaucaugaccagcaaaacagacguguccagcucugucauuaccucccugggggcgaucgugagcugcuacggaaagacaaaauguacggccucuaauaagaaccggggcauuaucaagaccuucuccaaugggugcgauuauguuagcaacaaaggaguggacacagucuccgugggcaauacccuuuacuguguuaacaagcaagagggcaaaucucuguaugugaagggggaacccaucauuaacuuuuacgacccucucgucuuccccagcgaugaguuugacgcuuccaucucucaggugaaugagaaaauuaaccagagccuggccuucauccgcaaguccgaugaacugcuccacaaugugaacgcuggaaagagcacaaccaauauuaugaucacgaccauuaucaucguuauuaucgucauucugcuuucucugaucgccgugggccuccugcuguauugcaaagccagauccacaccugugacccuuagcaaggaccagcucucugggauuaacaauaucgcuuucuccaacugaggacuaguguccaccugucccuccugggcugcuggauugucucguuuuccugccaaauaaacaggaucagcgcuuuacagaucuaaaaaaaaaaaaaaaaaaaaaaaaaaaaaaaaaaaaaaaaaaaaaaaaaaaaaaaaaaaaaaaaugcaucccccccccccccccccccccccccccccccaaaggcucuuuucagagccaccagaauu

SEQ ID NO: 4779 - RNA, 1889 nt, Artificial Sequence
  mRNA product Design e-3 comprising derived and/or modified sequence from HRSV(A2)__F_DSCav1_mut4 (opt6)
gggagacuuucccauucuguagcagaauuugguguugccuguggucuuggucccgcggagaagcuuaccauggaacuucuaauacucaaagccaacgcaauaacaacaauauuaacagccguaacauuuugcuucgcaucaggucaaaacauaacagaagaguucuaccaauccacaugcucagcaguaucaaaaggauauuuaagugcucuaagaacaggaugguacacauccguaauaacaaucgaacuaucaaacauaaaagaaaauaaauguaauggaacagacgccaaaguaaaauuaaucaaacaagaacuagacaaauacaaaaacgcaguuacugaauuacaauuauuaaugcaaucaacaccggccacaggaucuggaucagcaauaugcucaggaguagcagucugcaaaguauuacaccuagaaggggaaguuaauaaaaucaaaucagcauuacuauccaccaacaaagcgguaguuucacucuccaacggcguaucugucuuaacauucaaaguauuagaccuaaaaaacuacauugacaaacaacuacuaccaauccuaaacaaacaaucauguuccauaagcaauauagaaacaguaauagaauuucaacaaaaaaacaacagacuauuagaaauaacaagagaauuuuccgucaaugcaggaguuacuaccccugucuccaccuauaugcuaaccaauuccgaacucuuaucauuaauaaacgacaugccuaucacaaaugaccaaaaaaaauuaaugagcaacaacguacaaauaguacgacaacaaucauacucaaucaugugcauaauaaaagaagaaguccuagcauacguuguacaacuaccacuauacggagucauagauaccccaugcuggaaacuccauacaagcccacuaugcacuacaaacacaaaagaaggcucuaauauaugucuaacaagaacagaccgaggaugguacugcgauaaugccggcucagucucauucuuuccgcaagccgaaacuuguaaaguacaaaguaacagaguauuuugugacaccaugaacucaagaacccucccaagcgaagucaaucuaugcaacguugauauauucaaucccaaauacgacugcaaaaucaugaccucaaaaacagacgucagcucauccguuauaacaucacuaggagccaucguaucuugcuauggaaaaacaaaaugcacagcaagcaauaaaaacagaggcauaauaaaaacauucucaaauggaugcgacuacguaucaaacaaaggagucgacacaguuuccguaggaaacacuuuauacugcguaaacaaacaagaaggaaaaucauuauacgucaaaggugaaccaauaauaaacuucuacgauccacuuguauucccaucagacgaauuugacgcaucaauuucacaaguaaacgaaaaaauaaaccaaucacucgcauucauaagaaaaucagaugaacuacuacauaacguaaacgcaggaaaauccacaacaaacaucaugauaacaaccaucauaaucguaauaaucguaauacuauuaucccuaauugcaguaggauuacucuuauauugcaaagcaagaucaacaccaguaacccucaguaaagaccaacuauccggaauaaauaacaucgcauucucaaacuaaggacuaguguccaccugucccuccugggcugcuggauugucucguuuuccugccaaauaaacaggaucagcgcuuuacagaucuaaaaaaaaaaaaaaaaaaaaaaaaaaaaaaaaaaaaaaaaaaaaaaaaaaaaaaaaaaaaaaaaugcaucccccccccccccccccccccccccccccccaaaggcucuuuucagagccaccagaauu

SEQ ID NO: 4780 - RNA, 1889 nt, Artificial Sequence
  mRNA product Design e-3 comprising derived and/or modified sequence from HRSV(A2)__F_DSCav1_mut4 (opt11)
gggagacuuucccauucuguagcagaauuugguguugccuguggucuuggucccgcggagaagcuuaccauggaacugcucauccucaaagccaacgccaucaccaccauucuuaccgccgucacauucugcuucgccucaggccaaaacaucaccgaagaauuuuaccaauccacuuguucagccgucucaaaaggauaccuaucagcccuccguaccggcugguacaccucggucauaacaauagaacucuccaacauaaaagaaaacaaaugcaacggcaccgacgccaaggucaaacugauaaaacaagaacuugauaaauacaaaaacgccgucacugaacuccaacuccucaugcaauccacucccgcuacuggcucuggcuccgccaucugcucuggcgucgccgucuguaaaguacuccaccucgaaggggaagucaacaaaaucaaaucagcccuccuuagcaccaacaaggccgucgucucccucucaaacggagucagcguccucaccuucaagguccucgaccucaagaacuacaucgacaaacaacuccugcccauccuaaauaaacaauccugcucuaucuccaauaucgaaaccguuauagaguuccaacagaaaaacaaccgacuccucgaaaucacccgcgaguucuccgucaacgcaggcgucaccaccccugugucaaccuacaugcucaccaacagcgaacuacucucacucaucaaugacaugcccaucaccaacgaccaaaagaaacucauguccaacaacguccaaaucguacgucaacaauccuacagcaucaugugcaucauaaaagaagaaguccucgccuacgucguccaacuuccccucuacggcgucauagacacccccugcuggaaacugcauaccucaccccuaugcaccaccaacacuaaagaaggcuccaacaucugccucacccgcacggaccgcggcugguacugcgacaacgccggcuccgucuccuucuucccccaagccgaaacuuguaaaguccaauccaacagagucuucugcgacaccaugaacucuagaacgcugccauccgagguaaaccuaugcaacgucgacaucuucaaucccaaauacgacugcaagaucaugaccucaaaaaccgacguauccuccucaguaaucaccagucucggagcuaucgucuccugcuacggcaaaaccaaaugcacggccucuaacaaaaaccgcggcaucaucaaaaccuucucaaacggaugcgacuacgucagcaacaaaggcguagauaccgucucugucggcaacacacuguacugcguaaacaagcaagaaggaaaaucccucuacguaaaaggcgaacccaucaucaacuucuacgacccccucguuuuccccucagaugaauuugacgccucgauaucacaagucaacgaaaagauaaaucagucccucgccuucauccgaaaauccgacgaacuccuccacaacguuaacgcaggaaaguccaccacaaacaucaugauaacuacaaucauaauagucauuaucgucauacuccucucccuaaucgccguaggccugcuacucuacugcaaagcccgcucaacccccgucacucucucaaaagaccaacucuccggcaucaauaacaucgccuucucaaacuaaggacuaguguccaccugucccuccugggcugcuggauugucucguuuuccugccaaauaaacaggaucagcgcuuuacagaucuaaaaaaaaaaaaaaaaaaaaaaaaaaaaaaaaaaaaaaaaaaaaaaaaaaaaaaaaaaaaaaaaugcaucccccccccccccccccccccccccccccccaaaggcucuuuucagagccaccagaauu

SEQ ID NO: 4781 - RNA, 1943 nt, Artificial Sequence
  mRNA product Design e-4 comprising derived and/or modified sequence from HRSV(A2)__F_DSCav1_mut4 (opt1)
gggagacuccugucgggcggaaguaggaggaguagaguuuaaaaacaguacucuuuuuccgguucgggacguaguugaagcaacgacaagccggauaaccgcucuugagacaggaagcuuaccauggagcugcucauccugaaggccaacgccaucaccaccauccugacggcggugaccuucugcuucgccagcggccagaacaucaccgaggaguucuaccaguccacgugcagcgccgucuccaagggguaccucagcgcccugcggaccggcugguacaccuccgugaucaccaucgagcugagcaacaucaaggagaacaagugcaacgggaccgacgccaaggugaagcucaucaagcaggagcuggacaaguacaagaacgcggucacggagcugcagcuccugaugcaguccaccccggcaaccggcuccggcuccgccaucugcagcggcgucgccgugugcaaggugcugcaccucgagggggaggucaacaagaucaagagcgcccugcuguccaccaacaaggccguggugagccucuccaacggcgucagcgugcugaccuucaaggugcuggaccucaagaacuacaucgacaagcagcugcugcccauccugaacaagcagagcugcuccaucagcaacaucgagacggugaucgaguuccagcagaagaacaaccggcuccuggagaucacccgcgaguucagcgugaacgccggggucaccacccccguguccacguacaugcugaccaacagcgagcuccugucccugaucaacgacaugccgaucaccaacgaccagaagaagcucaugagcaacaacgugcagaucguccggcagcaguccuacagcaucaugugcaucaucaaggaggaggugcuggcguacgugguccagcugccccucuacggcgugaucgacacccccugcuggaagcugcacacgagcccccugugcaccaccaacaccaaggagggguccaacaucugccucacgcgcaccgaccggggcugguacugcgacaacgccggcagcgucuccuucuucccgcaggccgagaccugcaaggugcagagcaaccgcguguucugcgacaccaugaacucccggacgcugcccagcgagguaaaccucugcaacgucgacaucuucaaccccaaguacgacugcaagaucaugaccuccaagaccgacgugagcuccagcgugaucaccucccugggggccaucgucagcugcuacggcaagacgaagugcaccgccagcaacaagaaccgggggaucaucaagaccuucuccaacggcugcgacuacgugagcaacaagggcguggacaccguguccgucgggaacacccuguacugcgugaacaagcaggagggcaagagccucuacgugaagggggagcccaucaucaacuucuacgacccgcuggucuuccccuccgacgaguucgacgcgagcaucucccaggugaacgagaagaucaaccagagccuggccuucauccgcaaguccgacgagcugcuccacaacgugaacgccggcaagagcacgaccaacaucaugaucaccaccaucaucaucgucaucaucgugauccugcugucccucaucgccguggggcugcugcucuacugcaaggcccggagcacgcccgucacccuguccaaggaccagcugagcggcaucaacaacaucgcguucuccaacugaggacuaguguccaccugucccuccugggcugcuggauugucucguuuuccugccaaauaaacaggaucagcgcuuuacagaucuaaaaaaaaaaaaaaaaaaaaaaaaaaaaaaaaaaaaaaaaaaaaaaaaaaaaaaaaaaaaaaaaugcaucccccccccccccccccccccccccccccccaaaggcucuuuucagagccaccagaauu

SEQ ID NO: 4782 - RNA, 1943 nt, Artificial Sequence
  mRNA product Design e-4 comprising derived and/or modified sequence from HRSV(A2)__F_DSCav1_mut4 (opt1)
gggagacuccugucgggcggaaguaggaggaguagaguuuaaaaacaguacucuuuuuccgguucgggacguaguugaagcaacgacaagccggauaaccgcucuugagacaggaagcuuaccauggagcugcucauccugaaggccaacgccaucaccaccauccugacggcggugaccuucugcuucgccagcggccagaacaucaccgaggaguucuaccaguccacgugcagcgccgucuccaagggguaccucagcgcccugcgcaccggcugguacaccuccgugaucaccaucgagcugagcaacaucaaggagaacaagugcaacgggaccgacgccaaggugaagcucaucaagcaggagcuggacaaguacaagaacgcggucacggagcugcagcuccugaugcaguccacccccgccaccggcagcggguccgccaucugcagcggcguggccgugugcaagguccugcaccucgagggcgaggugaacaagaucaaguccgcgcugcugagcaccaacaaggccguggucucccucagcaacgggguguccgugcugacguucaagguccuggaccucaagaacuacaucgacaagcagcugcugccgauccucaacaagcagagcugcuccaucagcaacaucgagaccgugaucgaguuccagcagaagaacaaccggcugcuggagaucacccgcgaguucuccgugaacgccggcgucaccacgcccgugagcaccuacaugcucaccaacagcgagcugcugucccucaucaacgacaugcccaucaccaacgaccagaagaagcugaugagcaacaacgugcagaucguccggcagcaguccuacagcaucaugugcaucaucaaggaggaggugcuggccuacgugguccagcucccccuguacggggugaucgacacgccgugcuggaagcugcacaccagcccccucugcaccaccaacacgaaggagggcuccaacaucugccugacccgcaccgaccgggggugguacugcgacaacgccggcuccgugagcuucuucccccaggcggagaccugcaagguccaguccaaccgcguguucugcgacacgaugaacagccggacccuccccuccgaggucaaccugugcaacguggacaucuucaacccgaaguacgacugcaagaucaugaccagcaagaccgacguguccagcuccgucaucacgagccugggcgccaucguguccugcuacgggaagaccaagugcaccgccagcaacaagaaccggggcaucaucaagaccuucuccaacgggugcgacuacgugagcaacaagggcgucgacacggugagcgugggcaacacccucuacugcgucaacaagcaggaggggaagucccuguacgugaagggcgagcccaucaucaacuucuacgacccccugguguuccccagcgacgaguucgacgccuccaucagccaggucaacgagaagaucaaccagucccucgccuucauccgcaagagcgacgagcugcugcacaacgugaacgcggggaaguccaccaccaacaucaugaucaccacgaucaucaucgugaucaucgucauccuccugagccugaucgccgugggccuccugcuguacugcaaggcccgguccaccccggugacccugagcaaggaccagcucuccgggaucaacaacaucgccuucagcaacugaggacuaguguccaccugucccuccugggcugcuggauugucucguuuuccugccaaauaaacaggaucagcgcuuuacagaucuaaaaaaaaaaaaaaaaaaaaaaaaaaaaaaaaaaaaaaaaaaaaaaaaaaaaaaaaaaaaaaaaugcaucccccccccccccccccccccccccccccccaaaggcucuuuucagagccaccagaauu

SEQ ID NO: 4783 - RNA, 1943 nt, Artificial Sequence
  mRNA product Design e-4 comprising derived and/or modified sequence from HRSV(A2)__F_DSCav1_mut4 (opt2)
gggagacuccugucgggcggaaguaggaggaguagaguuuaaaaacaguacucuuuuuccgguucgggacguaguugaagcaacgacaagccggauaaccgcucuugagacaggaagcuuaccauggagcuccucauccucaaggccaacgccaucaccaccauccucaccgccgucaccuucugcuucgccuccggccagaacaucaccgaggaguucuaccaguccaccugcuccgccgucuccaagggcuaccucuccgcccuccgcaccggcugguacaccuccgucaucaccaucgagcucuccaacaucaaggagaacaagugcaacggcaccgacgccaaggucaagcucaucaagcaggagcucgacaaguacaagaacgccgucaccgagcuccagcuccucaugcaguccacccccgccaccggcuccggcuccgccaucugcuccggcgucgccgucugcaagguccuccaccucgagggcgaggucaacaagaucaaguccgcccuccucuccaccaacaaggccgucgucucccucuccaacggcgucuccguccucaccuucaagguccucgaccucaagaacuacaucgacaagcagcuccuccccauccucaacaagcaguccugcuccaucuccaacaucgagaccgucaucgaguuccagcagaagaacaaccgccuccucgagaucacccgcgaguucuccgucaacgccggcgucaccacccccgucuccaccuacaugcucaccaacuccgagcuccucucccucaucaacgacaugcccaucaccaacgaccagaagaagcucauguccaacaacguccagaucguccgccagcaguccuacuccaucaugugcaucaucaaggaggagguccucgccuacgucguccagcucccccucuacggcgucaucgacacccccugcuggaagcuccacaccuccccccucugcaccaccaacaccaaggagggcuccaacaucugccucacccgcaccgaccgcggcugguacugcgacaacgccggcuccgucuccuucuucccccaggccgagaccugcaagguccaguccaaccgcgucuucugcgacaccaugaacucccgcacccuccccuccgaggucaaccucugcaacgucgacaucuucaaccccaaguacgacugcaagaucaugaccuccaagaccgacgucuccuccuccgucaucaccucccucggcgccaucgucuccugcuacggcaagaccaagugcaccgccuccaacaagaaccgcggcaucaucaagaccuucuccaacggcugcgacuacgucuccaacaagggcgucgacaccgucuccgucggcaacacccucuacugcgucaacaagcaggagggcaagucccucuacgucaagggcgagcccaucaucaacuucuacgacccccucgucuuccccuccgacgaguucgacgccuccaucucccaggucaacgagaagaucaaccagucccucgccuucauccgcaaguccgacgagcuccuccacaacgucaacgccggcaaguccaccaccaacaucaugaucaccaccaucaucaucgucaucaucgucauccuccucucccucaucgccgucggccuccuccucuacugcaaggcccgcuccacccccgucacccucuccaaggaccagcucuccggcaucaacaacaucgccuucuccaacugaggacuaguguccaccugucccuccugggcugcuggauugucucguuuuccugccaaauaaacaggaucagcgcuuuacagaucuaaaaaaaaaaaaaaaaaaaaaaaaaaaaaaaaaaaaaaaaaaaaaaaaaaaaaaaaaaaaaaaaugcaucccccccccccccccccccccccccccccccaaaggcucuuuucagagccaccagaauu

SEQ ID NO: 4784 - RNA, 1943 nt, Artificial Sequence
  mRNA product Design e-4 comprising derived and/or modified sequence from HRSV(A2)__F_DSCav1_mut4 (opt3)
gggagacuccugucgggcggaaguaggaggaguagaguuuaaaaacaguacucuuuuuccgguucgggacguaguugaagcaacgacaagccggauaaccgcucuugagacaggaagcuuaccauggagcugcucauccuuaaggccaacgcuauuaccacaauacugacugcagugacguucugcuuugccagcggccagaauaucaccgaagaguucuaccaauccacauguucugcggucucaaaaggguauuugagugcuuuaagaacuggaugguacaccagcguuauuacaaucgaacuguccaacauuaaggagaauaaaugcaacgguaccgacgccaaggugaaacuaaucaagcaggaacucgauaaguauaaaaaugcaguaacugagcugcagcuucugaugcagucuacacccgccaccggcucggggucagcuauauguagcggaguggcagucugcaagguguugcaccucgagggcgaaguuaacaaaaucaagagugcccugcuguccacgaauaaagcuguggucucucucagcaacgguguguccguauuaacuuuuaagguucuggaccuuaagaauuacauugauaaacaauugcugccuauccuaaacaagcagucauguaguauuagcaauaucgagaccgugauagaguuccagcagaaaaacaauaggcuccuggaaauuacacgggaguuuucugucaacgccggggugacuaccccaguguccacauauaugcuuaccaauucagaacuguugagccucaucaacgacaugccgauuacgaacgaucaaaagaaacugaugaguaauaacguccagaucguucgccagcagucuuacuccaucaugugcauuauaaaggaggaaguguuagcguauguagugcaacugccccucuacggagucaucgacacuccuuguuggaaacuucauacaagcccacugugcaccacuaauacaaaggagggcucgaacauuuguuugacccgaacggaucguggcugguacugcgacaaugcagggucuguguccuucuuuccccaggccgaaaccuguaagguucagucaaacagaguguucugcgauacaaugaauaguagaacucugccuagcgaggucaaccucugcaauguggacaucuuuaacccaaaauaugauuguaagauaaugaccuccaaaacagacguaucuagcucaguuauuaccagucugggagcuaucguguccugcuacgguaagacuaaauguacagccagcaauaagaacaggggcaucauuaagaccuucucuaaugggugcgauuaugucucaaacaaaggaguggacacugucagugugggcaauacgcuuuacuguguuaacaagcaagaggguaaaagccuguaugugaagggggaacccaucauuaacuuuuacgacccuuugguauucccauccgaugaguuugacgcaucuauaucgcaggucaaugagaaaaucaaccagagccucgcuuucauucggaaguccgaugaacuguuacacaaugugaacgccggaaagucaacaaccaauaucaugaucacuaccauuauaaucguuauuaucgugauucugcuaagucucaucgcggucggccugcuuuuguauugcaaagcccgcucuacaccggugacccugagcaaggaccagcucuccggcauaaacaauaucgcauucucaaacugaggacuaguguccaccugucccuccugggcugcuggauugucucguuuuccugccaaauaaacaggaucagcgcuuuacagaucuaaaaaaaaaaaaaaaaaaaaaaaaaaaaaaaaaaaaaaaaaaaaaaaaaaaaaaaaaaaaaaaaugcaucccccccccccccccccccccccccccccccaaaggcucuuuucagagccaccagaauu

SEQ ID NO: 4785 - RNA, 1943 nt, Artificial Sequence
  mRNA product Design e-4 comprising derived and/or modified sequence from HRSV(A2)__F_DSCav1_mut4 (opt4)
gggagacuccugucgggcggaaguaggaggaguagaguuuaaaaacaguacucuuuuuccgguucgggacguaguugaagcaacgacaagccggauaaccgcucuugagacaggaagcuuaccauggagcugcugauccugaaggccaacgccaucaccaccauccugaccgccgugaccuucugcuucgccagcggccagaacaucaccgaggaguucuaccagagcaccugcagcgccgugagcaagggcuaccugagcgcccugagaaccggcugguacaccagcgugaucaccaucgagcugagcaacaucaaggagaacaagugcaacggcaccgacgccaaggugaagcugaucaagcaggagcuggacaaguacaagaacgccgugaccgagcugcagcugcugaugcagagcacccccgccaccggcagcggcagcgccaucugcagcggcguggccgugugcaaggugcugcaccuggagggcgaggugaacaagaucaagagcgcccugcugagcaccaacaaggccguggugagccugagcaacggcgugagcgugcugaccuucaaggugcuggaccugaagaacuacaucgacaagcagcugcugcccauccugaacaagcagagcugcagcaucagcaacaucgagaccgugaucgaguuccagcagaagaacaacagacugcuggagaucaccagagaguucagcgugaacgccggcgugaccacccccgugagcaccuacaugcugaccaacagcgagcugcugagccugaucaacgacaugcccaucaccaacgaccagaagaagcugaugagcaacaacgugcagaucgugagacagcagagcuacagcaucaugugcaucaucaaggaggaggugcuggccuacguggugcagcugccccuguacggcgugaucgacacccccugcuggaagcugcacaccagcccccugugcaccaccaacaccaaggagggcagcaacaucugccugaccagaaccgacagaggcugguacugcgacaacgccggcagcgugagcuucuucccccaggccgagaccugcaaggugcagagcaacagaguguucugcgacaccaugaacagcagaacccugcccagcgaggugaaccugugcaacguggacaucuucaaccccaaguacgacugcaagaucaugaccagcaagaccgacgugagcagcagcgugaucaccagccugggcgccaucgugagcugcuacggcaagaccaagugcaccgccagcaacaagaacagaggcaucaucaagaccuucagcaacggcugcgacuacgugagcaacaagggcguggacaccgugagcgugggcaacacccuguacugcgugaacaagcaggagggcaagagccuguacgugaagggcgagcccaucaucaacuucuacgacccccugguguuccccagcgacgaguucgacgccagcaucagccaggugaacgagaagaucaaccagagccuggccuucaucagaaagagcgacgagcugcugcacaacgugaacgccggcaagagcaccaccaacaucaugaucaccaccaucaucaucgugaucaucgugauccugcugagccugaucgccgugggccugcugcuguacugcaaggccagaagcacccccgugacccugagcaaggaccagcugagcggcaucaacaacaucgccuucagcaacugaggacuaguguccaccugucccuccugggcugcuggauugucucguuuuccugccaaauaaacaggaucagcgcuuuacagaucuaaaaaaaaaaaaaaaaaaaaaaaaaaaaaaaaaaaaaaaaaaaaaaaaaaaaaaaaaaaaaaaaugcaucccccccccccccccccccccccccccccccaaaggcucuuuucagagccaccagaauu

SEQ ID NO: 4786 - RNA, 1943 nt, Artificial Sequence
  mRNA product Design e-4 comprising derived and/or modified sequence from HRSV(A2)__F_DSCav1_mut4 (opt5)
gggagacuccugucgggcggaaguaggaggaguagaguuuaaaaacaguacucuuuuuccgguucgggacguaguugaagcaacgacaagccggauaaccgcucuugagacaggaagcuuaccauggagcugcucauccugaaggccaacgcuauuaccacaauccuuacggccgugaccuucugcuuugcgagcggccagaauauuacagaagaguucuaccaauccaccuguucugcugucagcaaaggguaucuguccgcccucagaacaggaugguacaccucuguuaucacaauugaacugagcaacaucaaggagaauaaaugcaacggcaccgacgccaaggugaaacuuaucaagcaggaacuggauaaguauaaaaaugcugugacggagcuccagcugcugaugcaguccacccccgccacagggucuggaagcgcuauuuguuccggcgucgccgugugcaagguucuccaccuggagggggaagugaacaaaaucaagagcgcgcuucugucuaccaauaaagccgucgugucccucagcaacggaguuucugugcugacauuuaagguccuugaccugaagaauuacauugauaaacaacuccugccuauccugaacaagcaguccuguagcauuucuaauaucgagaccgugauugaguuccagcagaaaaacaaucggcuccuggaaaucacgcgcgaguuuuccgugaacgcuggcgucacaaccccgguuagcacauauaugcuuaccaauuccgaacugcucucucugaucaacgacaugcccauuaccaacgaucaaaagaaacuuaugagcaauaacgugcagaucgugagacagcaguccuacagcauuaugugcaucauuaaggaggaaguccuggccuaugugguucaacucccucuguacggcgugaucgacacacccuguuggaaacugcauacgucuccucucugcaccacaaauaccaaggagggguccaacaucugucugacacggaccgaucgcggaugguacugcgacaaugcuggcagcgucucuuucuuuccccaggccgaaacguguaaggugcagagcaacagaguuuucugcgauacaaugaacuccagaacccugccuucugaggugaaucucugcaaugucgacauuuuuaacccgaaauaugauuguaagaucaugaccagcaaaacagacguguccagcucugucauuaccucccugggggcgaucgugagcugcuacggaaagacaaaauguacggccucuaauaagaaccggggcauuaucaagaccuucuccaaugggugcgauuauguuagcaacaaaggaguggacacagucuccgugggcaauacccuuuacuguguuaacaagcaagagggcaaaucucuguaugugaagggggaacccaucauuaacuuuuacgacccucucgucuuccccagcgaugaguuugacgcuuccaucucucaggugaaugagaaaauuaaccagagccuggccuucauccgcaaguccgaugaacugcuccacaaugugaacgcuggaaagagcacaaccaauauuaugaucacgaccauuaucaucguuauuaucgucauucugcuuucucugaucgccgugggccuccugcuguauugcaaagccagauccacaccugugacccuuagcaaggaccagcucucugggauuaacaauaucgcuuucuccaacugaggacuaguguccaccugucccuccugggcugcuggauugucucguuuuccugccaaauaaacaggaucagcgcuuuacagaucuaaaaaaaaaaaaaaaaaaaaaaaaaaaaaaaaaaaaaaaaaaaaaaaaaaaaaaaaaaaaaaaaugcaucccccccccccccccccccccccccccccccaaaggcucuuuucagagccaccagaauu

SEQ ID NO: 4787 - RNA, 1943 nt, Artificial Sequence
  mRNA product Design e-4 comprising derived and/or modified sequence from HRSV(A2)__F_DSCav1_mut4 (opt6)
gggagacuccugucgggcggaaguaggaggaguagaguuuaaaaacaguacucuuuuuccgguucgggacguaguugaagcaacgacaagccggauaaccgcucuugagacaggaagcuuaccauggaacuucuaauacucaaagccaacgcaauaacaacaauauuaacagccguaacauuuugcuucgcaucaggucaaaacauaacagaagaguucuaccaauccacaugcucagcaguaucaaaaggauauuuaagugcucuaagaacaggaugguacacauccguaauaacaaucgaacuaucaaacauaaaagaaaauaaauguaauggaacagacgccaaaguaaaauuaaucaaacaagaacuagacaaauacaaaaacgcaguuacugaauuacaauuauuaaugcaaucaacaccggccacaggaucuggaucagcaauaugcucaggaguagcagucugcaaaguauuacaccuagaaggggaaguuaauaaaaucaaaucagcauuacuauccaccaacaaagcgguaguuucacucuccaacggcguaucugucuuaacauucaaaguauuagaccuaaaaaacuacauugacaaacaacuacuaccaauccuaaacaaacaaucauguuccauaagcaauauagaaacaguaauagaauuucaacaaaaaaacaacagacuauuagaaauaacaagagaauuuuccgucaaugcaggaguuacuaccccugucuccaccuauaugcuaaccaauuccgaacucuuaucauuaauaaacgacaugccuaucacaaaugaccaaaaaaaauuaaugagcaacaacguacaaauaguacgacaacaaucauacucaaucaugugcauaauaaaagaagaaguccuagcauacguuguacaacuaccacuauacggagucauagauaccccaugcuggaaacuccauacaagcccacuaugcacuacaaacacaaaagaaggcucuaauauaugucuaacaagaacagaccgaggaugguacugcgauaaugccggcucagucucauucuuuccgcaagccgaaacuuguaaaguacaaaguaacagaguauuuugugacaccaugaacucaagaacccucccaagcgaagucaaucuaugcaacguugauauauucaaucccaaauacgacugcaaaaucaugaccucaaaaacagacgucagcucauccguuauaacaucacuaggagccaucguaucuugcuauggaaaaacaaaaugcacagcaagcaauaaaaacagaggcauaauaaaaacauucucaaauggaugcgacuacguaucaaacaaaggagucgacacaguuuccguaggaaacacuuuauacugcguaaacaaacaagaaggaaaaucauuauacgucaaaggugaaccaauaauaaacuucuacgauccacuuguauucccaucagacgaauuugacgcaucaauuucacaaguaaacgaaaaaauaaaccaaucacucgcauucauaagaaaaucagaugaacuacuacauaacguaaacgcaggaaaauccacaacaaacaucaugauaacaaccaucauaaucguaauaaucguaauacuauuaucccuaauugcaguaggauuacucuuauauugcaaagcaagaucaacaccaguaacccucaguaaagaccaacuauccggaauaaauaacaucgcauucucaaacuaaggacuaguguccaccugucccuccugggcugcuggauugucucguuuuccugccaaauaaacaggaucagcgcuuuacagaucuaaaaaaaaaaaaaaaaaaaaaaaaaaaaaaaaaaaaaaaaaaaaaaaaaaaaaaaaaaaaaaaaugcaucccccccccccccccccccccccccccccccaaaggcucuuuucagagccaccagaauu

SEQ ID NO: 4788 - RNA, 1943 nt, Artificial Sequence
  mRNA product Design e-4 comprising derived and/or modified sequence from HRSV(A2)__F_DSCav1_mut4 (opt11)
gggagacuccugucgggcggaaguaggaggaguagaguuuaaaaacaguacucuuuuuccgguucgggacguaguugaagcaacgacaagccggauaaccgcucuugagacaggaagcuuaccauggaacugcucauccucaaagccaacgccaucaccaccauucuuaccgccgucacauucugcuucgccucaggccaaaacaucaccgaagaauuuuaccaauccacuuguucagccgucucaaaaggauaccuaucagcccuccguaccggcugguacaccucggucauaacaauagaacucuccaacauaaaagaaaacaaaugcaacggcaccgacgccaaggucaaacugauaaaacaagaacuugauaaauacaaaaacgccgucacugaacuccaacuccucaugcaauccacucccgcuacuggcucuggcuccgccaucugcucuggcgucgccgucuguaaaguacuccaccucgaaggggaagucaacaaaaucaaaucagcccuccuuagcaccaacaaggccgucgucucccucucaaacggagucagcguccucaccuucaagguccucgaccucaagaacuacaucgacaaacaacuccugcccauccuaaauaaacaauccugcucuaucuccaauaucgaaaccguuauagaguuccaacagaaaaacaaccgacuccucgaaaucacccgcgaguucuccgucaacgcaggcgucaccaccccugugucaaccuacaugcucaccaacagcgaacuacucucacucaucaaugacaugcccaucaccaacgaccaaaagaaacucauguccaacaacguccaaaucguacgucaacaauccuacagcaucaugugcaucauaaaagaagaaguccucgccuacgucguccaacuuccccucuacggcgucauagacacccccugcuggaaacugcauaccucaccccuaugcaccaccaacacuaaagaaggcuccaacaucugccucacccgcacggaccgcggcugguacugcgacaacgccggcuccgucuccuucuucccccaagccgaaacuuguaaaguccaauccaacagagucuucugcgacaccaugaacucuagaacgcugccauccgagguaaaccuaugcaacgucgacaucuucaaucccaaauacgacugcaagaucaugaccucaaaaaccgacguauccuccucaguaaucaccagucucggagcuaucgucuccugcuacggcaaaaccaaaugcacggccucuaacaaaaaccgcggcaucaucaaaaccuucucaaacggaugcgacuacgucagcaacaaaggcguagauaccgucucugucggcaacacacuguacugcguaaacaagcaagaaggaaaaucccucuacguaaaaggcgaacccaucaucaacuucuacgacccccucguuuuccccucagaugaauuugacgccucgauaucacaagucaacgaaaagauaaaucagucccucgccuucauccgaaaauccgacgaacuccuccacaacguuaacgcaggaaaguccaccacaaacaucaugauaacuacaaucauaauagucauuaucgucauacuccucucccuaaucgccguaggccugcuacucuacugcaaagcccgcucaacccccgucacucucucaaaagaccaacucuccggcaucaauaacaucgccuucucaaacuaaggacuaguguccaccugucccuccugggcugcuggauugucucguuuuccugccaaauaaacaggaucagcgcuuuacagaucuaaaaaaaaaaaaaaaaaaaaaaaaaaaaaaaaaaaaaaaaaaaaaaaaaaaaaaaaaaaaaaaaugcaucccccccccccccccccccccccccccccccaaaggcucuuuucagagccaccagaauu

SEQ ID NO: 4789 - RNA, 1910 nt, Artificial Sequence
  mRNA product Design e-5 comprising derived and/or modified sequence from HRSV(A2)__F_DSCav1_mut4 (opt1)
gggagagcggcucggccauuuugucccagucaguccggaggcugcggcugcagaaguaccgccugcggaguaacugcaaagaagcuuaccauggagcugcucauccugaaggccaacgccaucaccaccauccugacggcggugaccuucugcuucgccagcggccagaacaucaccgaggaguucuaccaguccacgugcagcgccgucuccaagggguaccucagcgcccugcggaccggcugguacaccuccgugaucaccaucgagcugagcaacaucaaggagaacaagugcaacgggaccgacgccaaggugaagcucaucaagcaggagcuggacaaguacaagaacgcggucacggagcugcagcuccugaugcaguccaccccggcaaccggcuccggcuccgccaucugcagcggcgucgccgugugcaaggugcugcaccucgagggggaggucaacaagaucaagagcgcccugcuguccaccaacaaggccguggugagccucuccaacggcgucagcgugcugaccuucaaggugcuggaccucaagaacuacaucgacaagcagcugcugcccauccugaacaagcagagcugcuccaucagcaacaucgagacggugaucgaguuccagcagaagaacaaccggcuccuggagaucacccgcgaguucagcgugaacgccggggucaccacccccguguccacguacaugcugaccaacagcgagcuccugucccugaucaacgacaugccgaucaccaacgaccagaagaagcucaugagcaacaacgugcagaucguccggcagcaguccuacagcaucaugugcaucaucaaggaggaggugcuggcguacgugguccagcugccccucuacggcgugaucgacacccccugcuggaagcugcacacgagcccccugugcaccaccaacaccaaggagggguccaacaucugccucacgcgcaccgaccggggcugguacugcgacaacgccggcagcgucuccuucuucccgcaggccgagaccugcaaggugcagagcaaccgcguguucugcgacaccaugaacucccggacgcugcccagcgagguaaaccucugcaacgucgacaucuucaaccccaaguacgacugcaagaucaugaccuccaagaccgacgugagcuccagcgugaucaccucccugggggccaucgucagcugcuacggcaagacgaagugcaccgccagcaacaagaaccgggggaucaucaagaccuucuccaacggcugcgacuacgugagcaacaagggcguggacaccguguccgucgggaacacccuguacugcgugaacaagcaggagggcaagagccucuacgugaagggggagcccaucaucaacuucuacgacccgcuggucuuccccuccgacgaguucgacgcgagcaucucccaggugaacgagaagaucaaccagagccuggccuucauccgcaaguccgacgagcugcuccacaacgugaacgccggcaagagcacgaccaacaucaugaucaccaccaucaucaucgucaucaucgugauccugcugucccucaucgccguggggcugcugcucuacugcaaggcccggagcacgcccgucacccuguccaaggaccagcugagcggcaucaacaacaucgcguucuccaacugaggacuaguguccaccugucccuccugggcugcuggauugucucguuuuccugccaaauaaacaggaucagcgcuuuacagaucuaaaaaaaaaaaaaaaaaaaaaaaaaaaaaaaaaaaaaaaaaaaaaaaaaaaaaaaaaaaaaaaaugcaucccccccccccccccccccccccccccccccaaaggcucuuuucagagccaccagaauu

SEQ ID NO: 4790 - RNA, 1910 nt, Artificial Sequence
  mRNA product Design e-5 comprising derived and/or modified sequence from HRSV(A2)__F_DSCav1_mut4 (opt1)
gggagagcggcucggccauuuugucccagucaguccggaggcugcggcugcagaaguaccgccugcggaguaacugcaaagaagcuuaccauggagcugcucauccugaaggccaacgccaucaccaccauccugacggcggugaccuucugcuucgccagcggccagaacaucaccgaggaguucuaccaguccacgugcagcgccgucuccaagggguaccucagcgcccugcgcaccggcugguacaccuccgugaucaccaucgagcugagcaacaucaaggagaacaagugcaacgggaccgacgccaaggugaagcucaucaagcaggagcuggacaaguacaagaacgcggucacggagcugcagcuccugaugcaguccacccccgccaccggcagcggguccgccaucugcagcggcguggccgugugcaagguccugcaccucgagggcgaggugaacaagaucaaguccgcgcugcugagcaccaacaaggccguggucucccucagcaacgggguguccgugcugacguucaagguccuggaccucaagaacuacaucgacaagcagcugcugccgauccucaacaagcagagcugcuccaucagcaacaucgagaccgugaucgaguuccagcagaagaacaaccggcugcuggagaucacccgcgaguucuccgugaacgccggcgucaccacgcccgugagcaccuacaugcucaccaacagcgagcugcugucccucaucaacgacaugcccaucaccaacgaccagaagaagcugaugagcaacaacgugcagaucguccggcagcaguccuacagcaucaugugcaucaucaaggaggaggugcuggccuacgugguccagcucccccuguacggggugaucgacacgccgugcuggaagcugcacaccagcccccucugcaccaccaacacgaaggagggcuccaacaucugccugacccgcaccgaccgggggugguacugcgacaacgccggcuccgugagcuucuucccccaggcggagaccugcaagguccaguccaaccgcguguucugcgacacgaugaacagccggacccuccccuccgaggucaaccugugcaacguggacaucuucaacccgaaguacgacugcaagaucaugaccagcaagaccgacguguccagcuccgucaucacgagccugggcgccaucguguccugcuacgggaagaccaagugcaccgccagcaacaagaaccggggcaucaucaagaccuucuccaacgggugcgacuacgugagcaacaagggcgucgacacggugagcgugggcaacacccucuacugcgucaacaagcaggaggggaagucccuguacgugaagggcgagcccaucaucaacuucuacgacccccugguguuccccagcgacgaguucgacgccuccaucagccaggucaacgagaagaucaaccagucccucgccuucauccgcaagagcgacgagcugcugcacaacgugaacgcggggaaguccaccaccaacaucaugaucaccacgaucaucaucgugaucaucgucauccuccugagccugaucgccgugggccuccugcuguacugcaaggcccgguccaccccggugacccugagcaaggaccagcucuccgggaucaacaacaucgccuucagcaacugaggacuaguguccaccugucccuccugggcugcuggauugucucguuuuccugccaaauaaacaggaucagcgcuuuacagaucuaaaaaaaaaaaaaaaaaaaaaaaaaaaaaaaaaaaaaaaaaaaaaaaaaaaaaaaaaaaaaaaaugcaucccccccccccccccccccccccccccccccaaaggcucuuuucagagccaccagaauu

SEQ ID NO: 4791 - RNA, 1910 nt, Artificial Sequence
  mRNA product Design e-5 comprising derived and/or modified sequence from HRSV(A2)__F_DSCav1_mut4 (opt2)
gggagagcggcucggccauuuugucccagucaguccggaggcugcggcugcagaaguaccgccugcggaguaacugcaaagaagcuuaccauggagcuccucauccucaaggccaacgccaucaccaccauccucaccgccgucaccuucugcuucgccuccggccagaacaucaccgaggaguucuaccaguccaccugcuccgccgucuccaagggcuaccucuccgcccuccgcaccggcugguacaccuccgucaucaccaucgagcucuccaacaucaaggagaacaagugcaacggcaccgacgccaaggucaagcucaucaagcaggagcucgacaaguacaagaacgccgucaccgagcuccagcuccucaugcaguccacccccgccaccggcuccggcuccgccaucugcuccggcgucgccgucugcaagguccuccaccucgagggcgaggucaacaagaucaaguccgcccuccucuccaccaacaaggccgucgucucccucuccaacggcgucuccguccucaccuucaagguccucgaccucaagaacuacaucgacaagcagcuccuccccauccucaacaagcaguccugcuccaucuccaacaucgagaccgucaucgaguuccagcagaagaacaaccgccuccucgagaucacccgcgaguucuccgucaacgccggcgucaccacccccgucuccaccuacaugcucaccaacuccgagcuccucucccucaucaacgacaugcccaucaccaacgaccagaagaagcucauguccaacaacguccagaucguccgccagcaguccuacuccaucaugugcaucaucaaggaggagguccucgccuacgucguccagcucccccucuacggcgucaucgacacccccugcuggaagcuccacaccuccccccucugcaccaccaacaccaaggagggcuccaacaucugccucacccgcaccgaccgcggcugguacugcgacaacgccggcuccgucuccuucuucccccaggccgagaccugcaagguccaguccaaccgcgucuucugcgacaccaugaacucccgcacccuccccuccgaggucaaccucugcaacgucgacaucuucaaccccaaguacgacugcaagaucaugaccuccaagaccgacgucuccuccuccgucaucaccucccucggcgccaucgucuccugcuacggcaagaccaagugcaccgccuccaacaagaaccgcggcaucaucaagaccuucuccaacggcugcgacuacgucuccaacaagggcgucgacaccgucuccgucggcaacacccucuacugcgucaacaagcaggagggcaagucccucuacgucaagggcgagcccaucaucaacuucuacgacccccucgucuuccccuccgacgaguucgacgccuccaucucccaggucaacgagaagaucaaccagucccucgccuucauccgcaaguccgacgagcuccuccacaacgucaacgccggcaaguccaccaccaacaucaugaucaccaccaucaucaucgucaucaucgucauccuccucucccucaucgccgucggccuccuccucuacugcaaggcccgcuccacccccgucacccucuccaaggaccagcucuccggcaucaacaacaucgccuucuccaacugaggacuaguguccaccugucccuccugggcugcuggauugucucguuuuccugccaaauaaacaggaucagcgcuuuacagaucuaaaaaaaaaaaaaaaaaaaaaaaaaaaaaaaaaaaaaaaaaaaaaaaaaaaaaaaaaaaaaaaaugcaucccccccccccccccccccccccccccccccaaaggcucuuuucagagccaccagaauu

SEQ ID NO: 4792 - RNA, 1910 nt, Artificial Sequence
  mRNA product Design e-5 comprising derived and/or modified sequence from HRSV(A2)__F_DSCav1_mut4 (opt3)
gggagagcggcucggccauuuugucccagucaguccggaggcugcggcugcagaaguaccgccugcggaguaacugcaaagaagcuuaccauggagcugcucauccuuaaggccaacgcuauuaccacaauacugacugcagugacguucugcuuugccagcggccagaauaucaccgaagaguucuaccaauccacauguucugcggucucaaaaggguauuugagugcuuuaagaacuggaugguacaccagcguuauuacaaucgaacuguccaacauuaaggagaauaaaugcaacgguaccgacgccaaggugaaacuaaucaagcaggaacucgauaaguauaaaaaugcaguaacugagcugcagcuucugaugcagucuacacccgccaccggcucggggucagcuauauguagcggaguggcagucugcaagguguugcaccucgagggcgaaguuaacaaaaucaagagugcccugcuguccacgaauaaagcuguggucucucucagcaacgguguguccguauuaacuuuuaagguucuggaccuuaagaauuacauugauaaacaauugcugccuauccuaaacaagcagucauguaguauuagcaauaucgagaccgugauagaguuccagcagaaaaacaauaggcuccuggaaauuacacgggaguuuucugucaacgccggggugacuaccccaguguccacauauaugcuuaccaauucagaacuguugagccucaucaacgacaugccgauuacgaacgaucaaaagaaacugaugaguaauaacguccagaucguucgccagcagucuuacuccaucaugugcauuauaaaggaggaaguguuagcguauguagugcaacugccccucuacggagucaucgacacuccuuguuggaaacuucauacaagcccacugugcaccacuaauacaaaggagggcucgaacauuuguuugacccgaacggaucguggcugguacugcgacaaugcagggucuguguccuucuuuccccaggccgaaaccuguaagguucagucaaacagaguguucugcgauacaaugaauaguagaacucugccuagcgaggucaaccucugcaauguggacaucuuuaacccaaaauaugauuguaagauaaugaccuccaaaacagacguaucuagcucaguuauuaccagucugggagcuaucguguccugcuacgguaagacuaaauguacagccagcaauaagaacaggggcaucauuaagaccuucucuaaugggugcgauuaugucucaaacaaaggaguggacacugucagugugggcaauacgcuuuacuguguuaacaagcaagaggguaaaagccuguaugugaagggggaacccaucauuaacuuuuacgacccuuugguauucccauccgaugaguuugacgcaucuauaucgcaggucaaugagaaaaucaaccagagccucgcuuucauucggaaguccgaugaacuguuacacaaugugaacgccggaaagucaacaaccaauaucaugaucacuaccauuauaaucguuauuaucgugauucugcuaagucucaucgcggucggccugcuuuuguauugcaaagcccgcucuacaccggugacccugagcaaggaccagcucuccggcauaaacaauaucgcauucucaaacugaggacuaguguccaccugucccuccugggcugcuggauugucucguuuuccugccaaauaaacaggaucagcgcuuuacagaucuaaaaaaaaaaaaaaaaaaaaaaaaaaaaaaaaaaaaaaaaaaaaaaaaaaaaaaaaaaaaaaaaugcaucccccccccccccccccccccccccccccccaaaggcucuuuucagagccaccagaauu

SEQ ID NO: 4793 - RNA, 1910 nt, Artificial Sequence
  mRNA product Design e-5 comprising derived and/or modified sequence from HRSV(A2)__F_DSCav1_mut4 (opt4)
gggagagcggcucggccauuuugucccagucaguccggaggcugcggcugcagaaguaccgccugcggaguaacugcaaagaagcuuaccauggagcugcugauccugaaggccaacgccaucaccaccauccugaccgccgugaccuucugcuucgccagcggccagaacaucaccgaggaguucuaccagagcaccugcagcgccgugagcaagggcuaccugagcgcccugagaaccggcugguacaccagcgugaucaccaucgagcugagcaacaucaaggagaacaagugcaacggcaccgacgccaaggugaagcugaucaagcaggagcuggacaaguacaagaacgccgugaccgagcugcagcugcugaugcagagcacccccgccaccggcagcggcagcgccaucugcagcggcguggccgugugcaaggugcugcaccuggagggcgaggugaacaagaucaagagcgcccugcugagcaccaacaaggccguggugagccugagcaacggcgugagcgugcugaccuucaaggugcuggaccugaagaacuacaucgacaagcagcugcugcccauccugaacaagcagagcugcagcaucagcaacaucgagaccgugaucgaguuccagcagaagaacaacagacugcuggagaucaccagagaguucagcgugaacgccggcgugaccacccccgugagcaccuacaugcugaccaacagcgagcugcugagccugaucaacgacaugcccaucaccaacgaccagaagaagcugaugagcaacaacgugcagaucgugagacagcagagcuacagcaucaugugcaucaucaaggaggaggugcuggccuacguggugcagcugccccuguacggcgugaucgacacccccugcuggaagcugcacaccagcccccugugcaccaccaacaccaaggagggcagcaacaucugccugaccagaaccgacagaggcugguacugcgacaacgccggcagcgugagcuucuucccccaggccgagaccugcaaggugcagagcaacagaguguucugcgacaccaugaacagcagaacccugcccagcgaggugaaccugugcaacguggacaucuucaaccccaaguacgacugcaagaucaugaccagcaagaccgacgugagcagcagcgugaucaccagccugggcgccaucgugagcugcuacggcaagaccaagugcaccgccagcaacaagaacagaggcaucaucaagaccuucagcaacggcugcgacuacgugagcaacaagggcguggacaccgugagcgugggcaacacccuguacugcgugaacaagcaggagggcaagagccuguacgugaagggcgagcccaucaucaacuucuacgacccccugguguuccccagcgacgaguucgacgccagcaucagccaggugaacgagaagaucaaccagagccuggccuucaucagaaagagcgacgagcugcugcacaacgugaacgccggcaagagcaccaccaacaucaugaucaccaccaucaucaucgugaucaucgugauccugcugagccugaucgccgugggccugcugcuguacugcaaggccagaagcacccccgugacccugagcaaggaccagcugagcggcaucaacaacaucgccuucagcaacugaggacuaguguccaccugucccuccugggcugcuggauugucucguuuuccugccaaauaaacaggaucagcgcuuuacagaucuaaaaaaaaaaaaaaaaaaaaaaaaaaaaaaaaaaaaaaaaaaaaaaaaaaaaaaaaaaaaaaaaugcaucccccccccccccccccccccccccccccccaaaggcucuuuucagagccaccagaauu

SEQ ID NO: 4794 - RNA, 1910 nt, Artificial Sequence
  mRNA product Design e-5 comprising derived and/or modified sequence from HRSV(A2)__F_DSCav1_mut4 (opt5)
gggagagcggcucggccauuuugucccagucaguccggaggcugcggcugcagaaguaccgccugcggaguaacugcaaagaagcuuaccauggagcugcucauccugaaggccaacgcuauuaccacaauccuuacggccgugaccuucugcuuugcgagcggccagaauauuacagaagaguucuaccaauccaccuguucugcugucagcaaaggguaucuguccgcccucagaacaggaugguacaccucuguuaucacaauugaacugagcaacaucaaggagaauaaaugcaacggcaccgacgccaaggugaaacuuaucaagcaggaacuggauaaguauaaaaaugcugugacggagcuccagcugcugaugcaguccacccccgccacagggucuggaagcgcuauuuguuccggcgucgccgugugcaagguucuccaccuggagggggaagugaacaaaaucaagagcgcgcuucugucuaccaauaaagccgucgugucccucagcaacggaguuucugugcugacauuuaagguccuugaccugaagaauuacauugauaaacaacuccugccuauccugaacaagcaguccuguagcauuucuaauaucgagaccgugauugaguuccagcagaaaaacaaucggcuccuggaaaucacgcgcgaguuuuccgugaacgcuggcgucacaaccccgguuagcacauauaugcuuaccaauuccgaacugcucucucugaucaacgacaugcccauuaccaacgaucaaaagaaacuuaugagcaauaacgugcagaucgugagacagcaguccuacagcauuaugugcaucauuaaggaggaaguccuggccuaugugguucaacucccucuguacggcgugaucgacacacccuguuggaaacugcauacgucuccucucugcaccacaaauaccaaggagggguccaacaucugucugacacggaccgaucgcggaugguacugcgacaaugcuggcagcgucucuuucuuuccccaggccgaaacguguaaggugcagagcaacagaguuuucugcgauacaaugaacuccagaacccugccuucugaggugaaucucugcaaugucgacauuuuuaacccgaaauaugauuguaagaucaugaccagcaaaacagacguguccagcucugucauuaccucccugggggcgaucgugagcugcuacggaaagacaaaauguacggccucuaauaagaaccggggcauuaucaagaccuucuccaaugggugcgauuauguuagcaacaaaggaguggacacagucuccgugggcaauacccuuuacuguguuaacaagcaagagggcaaaucucuguaugugaagggggaacccaucauuaacuuuuacgacccucucgucuuccccagcgaugaguuugacgcuuccaucucucaggugaaugagaaaauuaaccagagccuggccuucauccgcaaguccgaugaacugcuccacaaugugaacgcuggaaagagcacaaccaauauuaugaucacgaccauuaucaucguuauuaucgucauucugcuuucucugaucgccgugggccuccugcuguauugcaaagccagauccacaccugugacccuuagcaaggaccagcucucugggauuaacaauaucgcuuucuccaacugaggacuaguguccaccugucccuccugggcugcuggauugucucguuuuccugccaaauaaacaggaucagcgcuuuacagaucuaaaaaaaaaaaaaaaaaaaaaaaaaaaaaaaaaaaaaaaaaaaaaaaaaaaaaaaaaaaaaaaaugcaucccccccccccccccccccccccccccccccaaaggcucuuuucagagccaccagaauu

SEQ ID NO: 4795 - RNA, 1910 nt, Artificial Sequence
  mRNA product Design e-5 comprising derived and/or modified sequence from HRSV(A2)__F_DSCav1_mut4 (opt6)
gggagagcggcucggccauuuugucccagucaguccggaggcugcggcugcagaaguaccgccugcggaguaacugcaaagaagcuuaccauggaacuucuaauacucaaagccaacgcaauaacaacaauauuaacagccguaacauuuugcuucgcaucaggucaaaacauaacagaagaguucuaccaauccacaugcucagcaguaucaaaaggauauuuaagugcucuaagaacaggaugguacacauccguaauaacaaucgaacuaucaaacauaaaagaaaauaaauguaauggaacagacgccaaaguaaaauuaaucaaacaagaacuagacaaauacaaaaacgcaguuacugaauuacaauuauuaaugcaaucaacaccggccacaggaucuggaucagcaauaugcucaggaguagcagucugcaaaguauuacaccuagaaggggaaguuaauaaaaucaaaucagcauuacuauccaccaacaaagcgguaguuucacucuccaacggcguaucugucuuaacauucaaaguauuagaccuaaaaaacuacauugacaaacaacuacuaccaauccuaaacaaacaaucauguuccauaagcaauauagaaacaguaauagaauuucaacaaaaaaacaacagacuauuagaaauaacaagagaauuuuccgucaaugcaggaguuacuaccccugucuccaccuauaugcuaaccaauuccgaacucuuaucauuaauaaacgacaugccuaucacaaaugaccaaaaaaaauuaaugagcaacaacguacaaauaguacgacaacaaucauacucaaucaugugcauaauaaaagaagaaguccuagcauacguuguacaacuaccacuauacggagucauagauaccccaugcuggaaacuccauacaagcccacuaugcacuacaaacacaaaagaaggcucuaauauaugucuaacaagaacagaccgaggaugguacugcgauaaugccggcucagucucauucuuuccgcaagccgaaacuuguaaaguacaaaguaacagaguauuuugugacaccaugaacucaagaacccucccaagcgaagucaaucuaugcaacguugauauauucaaucccaaauacgacugcaaaaucaugaccucaaaaacagacgucagcucauccguuauaacaucacuaggagccaucguaucuugcuauggaaaaacaaaaugcacagcaagcaauaaaaacagaggcauaauaaaaacauucucaaauggaugcgacuacguaucaaacaaaggagucgacacaguuuccguaggaaacacuuuauacugcguaaacaaacaagaaggaaaaucauuauacgucaaaggugaaccaauaauaaacuucuacgauccacuuguauucccaucagacgaauuugacgcaucaauuucacaaguaaacgaaaaaauaaaccaaucacucgcauucauaagaaaaucagaugaacuacuacauaacguaaacgcaggaaaauccacaacaaacaucaugauaacaaccaucauaaucguaauaaucguaauacuauuaucccuaauugcaguaggauuacucuuauauugcaaagcaagaucaacaccaguaacccucaguaaagaccaacuauccggaauaaauaacaucgcauucucaaacuaaggacuaguguccaccugucccuccugggcugcuggauugucucguuuuccugccaaauaaacaggaucagcgcuuuacagaucuaaaaaaaaaaaaaaaaaaaaaaaaaaaaaaaaaaaaaaaaaaaaaaaaaaaaaaaaaaaaaaaaugcaucccccccccccccccccccccccccccccccaaaggcucuuuucagagccaccagaauu

SEQ ID NO: 4796 - RNA, 1910 nt, Artificial Sequence
  mRNA product Design e-5 comprising derived and/or modified sequence from HRSV(A2)__F_DSCav1_mut4 (opt11)
gggagagcggcucggccauuuugucccagucaguccggaggcugcggcugcagaaguaccgccugcggaguaacugcaaagaagcuuaccauggaacugcucauccucaaagccaacgccaucaccaccauucuuaccgccgucacauucugcuucgccucaggccaaaacaucaccgaagaauuuuaccaauccacuuguucagccgucucaaaaggauaccuaucagcccuccguaccggcugguacaccucggucauaacaauagaacucuccaacauaaaagaaaacaaaugcaacggcaccgacgccaaggucaaacugauaaaacaagaacuugauaaauacaaaaacgccgucacugaacuccaacuccucaugcaauccacucccgcuacuggcucuggcuccgccaucugcucuggcgucgccgucuguaaaguacuccaccucgaaggggaagucaacaaaaucaaaucagcccuccuuagcaccaacaaggccgucgucucccucucaaacggagucagcguccucaccuucaagguccucgaccucaagaacuacaucgacaaacaacuccugcccauccuaaauaaacaauccugcucuaucuccaauaucgaaaccguuauagaguuccaacagaaaaacaaccgacuccucgaaaucacccgcgaguucuccgucaacgcaggcgucaccaccccugugucaaccuacaugcucaccaacagcgaacuacucucacucaucaaugacaugcccaucaccaacgaccaaaagaaacucauguccaacaacguccaaaucguacgucaacaauccuacagcaucaugugcaucauaaaagaagaaguccucgccuacgucguccaacuuccccucuacggcgucauagacacccccugcuggaaacugcauaccucaccccuaugcaccaccaacacuaaagaaggcuccaacaucugccucacccgcacggaccgcggcugguacugcgacaacgccggcuccgucuccuucuucccccaagccgaaacuuguaaaguccaauccaacagagucuucugcgacaccaugaacucuagaacgcugccauccgagguaaaccuaugcaacgucgacaucuucaaucccaaauacgacugcaagaucaugaccucaaaaaccgacguauccuccucaguaaucaccagucucggagcuaucgucuccugcuacggcaaaaccaaaugcacggccucuaacaaaaaccgcggcaucaucaaaaccuucucaaacggaugcgacuacgucagcaacaaaggcguagauaccgucucugucggcaacacacuguacugcguaaacaagcaagaaggaaaaucccucuacguaaaaggcgaacccaucaucaacuucuacgacccccucguuuuccccucagaugaauuugacgccucgauaucacaagucaacgaaaagauaaaucagucccucgccuucauccgaaaauccgacgaacuccuccacaacguuaacgcaggaaaguccaccacaaacaucaugauaacuacaaucauaauagucauuaucgucauacuccucucccuaaucgccguaggccugcuacucuacugcaaagcccgcucaacccccgucacucucucaaaagaccaacucuccggcaucaauaacaucgccuucucaaacuaaggacuaguguccaccugucccuccugggcugcuggauugucucguuuuccugccaaauaaacaggaucagcgcuuuacagaucuaaaaaaaaaaaaaaaaaaaaaaaaaaaaaaaaaaaaaaaaaaaaaaaaaaaaaaaaaaaaaaaaugcaucccccccccccccccccccccccccccccccaaaggcucuuuucagagccaccagaauu

SEQ ID NO: 4797 - RNA, 1977 nt, Artificial Sequence
  mRNA product Design e-6 comprising derived and/or modified sequence from HRSV(A2)__F_DSCav1_mut4 (opt1)
gggagagcggcucggccauuuugucccagucaguccggaggcugcggcugcagaaguaccgccugcggaguaacugcaaagaagcuuaccauggagcugcucauccugaaggccaacgccaucaccaccauccugacggcggugaccuucugcuucgccagcggccagaacaucaccgaggaguucuaccaguccacgugcagcgccgucuccaagggguaccucagcgcccugcggaccggcugguacaccuccgugaucaccaucgagcugagcaacaucaaggagaacaagugcaacgggaccgacgccaaggugaagcucaucaagcaggagcuggacaaguacaagaacgcggucacggagcugcagcuccugaugcaguccaccccggcaaccggcuccggcuccgccaucugcagcggcgucgccgugugcaaggugcugcaccucgagggggaggucaacaagaucaagagcgcccugcuguccaccaacaaggccguggugagccucuccaacggcgucagcgugcugaccuucaaggugcuggaccucaagaacuacaucgacaagcagcugcugcccauccugaacaagcagagcugcuccaucagcaacaucgagacggugaucgaguuccagcagaagaacaaccggcuccuggagaucacccgcgaguucagcgugaacgccggggucaccacccccguguccacguacaugcugaccaacagcgagcuccugucccugaucaacgacaugccgaucaccaacgaccagaagaagcucaugagcaacaacgugcagaucguccggcagcaguccuacagcaucaugugcaucaucaaggaggaggugcuggcguacgugguccagcugccccucuacggcgugaucgacacccccugcuggaagcugcacacgagcccccugugcaccaccaacaccaaggagggguccaacaucugccucacgcgcaccgaccggggcugguacugcgacaacgccggcagcgucuccuucuucccgcaggccgagaccugcaaggugcagagcaaccgcguguucugcgacaccaugaacucccggacgcugcccagcgagguaaaccucugcaacgucgacaucuucaaccccaaguacgacugcaagaucaugaccuccaagaccgacgugagcuccagcgugaucaccucccugggggccaucgucagcugcuacggcaagacgaagugcaccgccagcaacaagaaccgggggaucaucaagaccuucuccaacggcugcgacuacgugagcaacaagggcguggacaccguguccgucgggaacacccuguacugcgugaacaagcaggagggcaagagccucuacgugaagggggagcccaucaucaacuucuacgacccgcuggucuuccccuccgacgaguucgacgcgagcaucucccaggugaacgagaagaucaaccagagccuggccuucauccgcaaguccgacgagcugcuccacaacgugaacgccggcaagagcacgaccaacaucaugaucaccaccaucaucaucgucaucaucgugauccugcugucccucaucgccguggggcugcugcucuacugcaaggcccggagcacgcccgucacccuguccaaggaccagcugagcggcaucaacaacaucgcguucuccaacugaggacuaguacuggcugcaucucccuuuccucuguccuccauccuucucccaggauggugaagggggaccugguacccagugauccccaccccaggauccuaaaucaugacuuaccugcuaauaaaaacucauuggaaaagugagaagaucuaaaaaaaaaaaaaaaaaaaaaaaaaaaaaaaaaaaaaaaaaaaaaaaaaaaaaaaaaaaaaaaaugcaucccccccccccccccccccccccccccccccaaaggcucuuuucagagccaccagaauu

SEQ ID NO: 4798 - RNA, 1977 nt, Artificial Sequence
  mRNA product Design e-6 comprising derived and/or modified sequence from HRSV(A2)__F_DSCav1_mut4 (opt1)
gggagagcggcucggccauuuugucccagucaguccggaggcugcggcugcagaaguaccgccugcggaguaacugcaaagaagcuuaccauggagcugcucauccugaaggccaacgccaucaccaccauccugacggcggugaccuucugcuucgccagcggccagaacaucaccgaggaguucuaccaguccacgugcagcgccgucuccaagggguaccucagcgcccugcgcaccggcugguacaccuccgugaucaccaucgagcugagcaacaucaaggagaacaagugcaacgggaccgacgccaaggugaagcucaucaagcaggagcuggacaaguacaagaacgcggucacggagcugcagcuccugaugcaguccacccccgccaccggcagcggguccgccaucugcagcggcguggccgugugcaagguccugcaccucgagggcgaggugaacaagaucaaguccgcgcugcugagcaccaacaaggccguggucucccucagcaacgggguguccgugcugacguucaagguccuggaccucaagaacuacaucgacaagcagcugcugccgauccucaacaagcagagcugcuccaucagcaacaucgagaccgugaucgaguuccagcagaagaacaaccggcugcuggagaucacccgcgaguucuccgugaacgccggcgucaccacgcccgugagcaccuacaugcucaccaacagcgagcugcugucccucaucaacgacaugcccaucaccaacgaccagaagaagcugaugagcaacaacgugcagaucguccggcagcaguccuacagcaucaugugcaucaucaaggaggaggugcuggccuacgugguccagcucccccuguacggggugaucgacacgccgugcuggaagcugcacaccagcccccucugcaccaccaacacgaaggagggcuccaacaucugccugacccgcaccgaccgggggugguacugcgacaacgccggcuccgugagcuucuucccccaggcggagaccugcaagguccaguccaaccgcguguucugcgacacgaugaacagccggacccuccccuccgaggucaaccugugcaacguggacaucuucaacccgaaguacgacugcaagaucaugaccagcaagaccgacguguccagcuccgucaucacgagccugggcgccaucguguccugcuacgggaagaccaagugcaccgccagcaacaagaaccggggcaucaucaagaccuucuccaacgggugcgacuacgugagcaacaagggcgucgacacggugagcgugggcaacacccucuacugcgucaacaagcaggaggggaagucccuguacgugaagggcgagcccaucaucaacuucuacgacccccugguguuccccagcgacgaguucgacgccuccaucagccaggucaacgagaagaucaaccagucccucgccuucauccgcaagagcgacgagcugcugcacaacgugaacgcggggaaguccaccaccaacaucaugaucaccacgaucaucaucgugaucaucgucauccuccugagccugaucgccgugggccuccugcuguacugcaaggcccgguccaccccggugacccugagcaaggaccagcucuccgggaucaacaacaucgccuucagcaacugaggacuaguacuggcugcaucucccuuuccucuguccuccauccuucucccaggauggugaagggggaccugguacccagugauccccaccccaggauccuaaaucaugacuuaccugcuaauaaaaacucauuggaaaagugagaagaucuaaaaaaaaaaaaaaaaaaaaaaaaaaaaaaaaaaaaaaaaaaaaaaaaaaaaaaaaaaaaaaaaugcaucccccccccccccccccccccccccccccccaaaggcucuuuucagagccaccagaauu

SEQ ID NO: 4799 - RNA, 1977 nt, Artificial Sequence
  mRNA product Design e-6 comprising derived and/or modified sequence from HRSV(A2)__F_DSCav1_mut4 (opt2)
gggagagcggcucggccauuuugucccagucaguccggaggcugcggcugcagaaguaccgccugcggaguaacugcaaagaagcuuaccauggagcuccucauccucaaggccaacgccaucaccaccauccucaccgccgucaccuucugcuucgccuccggccagaacaucaccgaggaguucuaccaguccaccugcuccgccgucuccaagggcuaccucuccgcccuccgcaccggcugguacaccuccgucaucaccaucgagcucuccaacaucaaggagaacaagugcaacggcaccgacgccaaggucaagcucaucaagcaggagcucgacaaguacaagaacgccgucaccgagcuccagcuccucaugcaguccacccccgccaccggcuccggcuccgccaucugcuccggcgucgccgucugcaagguccuccaccucgagggcgaggucaacaagaucaaguccgcccuccucuccaccaacaaggccgucgucucccucuccaacggcgucuccguccucaccuucaagguccucgaccucaagaacuacaucgacaagcagcuccuccccauccucaacaagcaguccugcuccaucuccaacaucgagaccgucaucgaguuccagcagaagaacaaccgccuccucgagaucacccgcgaguucuccgucaacgccggcgucaccacccccgucuccaccuacaugcucaccaacuccgagcuccucucccucaucaacgacaugcccaucaccaacgaccagaagaagcucauguccaacaacguccagaucguccgccagcaguccuacuccaucaugugcaucaucaaggaggagguccucgccuacgucguccagcucccccucuacggcgucaucgacacccccugcuggaagcuccacaccuccccccucugcaccaccaacaccaaggagggcuccaacaucugccucacccgcaccgaccgcggcugguacugcgacaacgccggcuccgucuccuucuucccccaggccgagaccugcaagguccaguccaaccgcgucuucugcgacaccaugaacucccgcacccuccccuccgaggucaaccucugcaacgucgacaucuucaaccccaaguacgacugcaagaucaugaccuccaagaccgacgucuccuccuccgucaucaccucccucggcgccaucgucuccugcuacggcaagaccaagugcaccgccuccaacaagaaccgcggcaucaucaagaccuucuccaacggcugcgacuacgucuccaacaagggcgucgacaccgucuccgucggcaacacccucuacugcgucaacaagcaggagggcaagucccucuacgucaagggcgagcccaucaucaacuucuacgacccccucgucuuccccuccgacgaguucgacgccuccaucucccaggucaacgagaagaucaaccagucccucgccuucauccgcaaguccgacgagcuccuccacaacgucaacgccggcaaguccaccaccaacaucaugaucaccaccaucaucaucgucaucaucgucauccuccucucccucaucgccgucggccuccuccucuacugcaaggcccgcuccacccccgucacccucuccaaggaccagcucuccggcaucaacaacaucgccuucuccaacugaggacuaguacuggcugcaucucccuuuccucuguccuccauccuucucccaggauggugaagggggaccugguacccagugauccccaccccaggauccuaaaucaugacuuaccugcuaauaaaaacucauuggaaaagugagaagaucuaaaaaaaaaaaaaaaaaaaaaaaaaaaaaaaaaaaaaaaaaaaaaaaaaaaaaaaaaaaaaaaaugcaucccccccccccccccccccccccccccccccaaaggcucuuuucagagccaccagaauu

SEQ ID NO: 4800 - RNA, 1977 nt, Artificial Sequence
  mRNA product Design e-6 comprising derived and/or modified sequence from HRSV(A2)__F_DSCav1_mut4 (opt3)
gggagagcggcucggccauuuugucccagucaguccggaggcugcggcugcagaaguaccgccugcggaguaacugcaaagaagcuuaccauggagcugcucauccuuaaggccaacgcuauuaccacaauacugacugcagugacguucugcuuugccagcggccagaauaucaccgaagaguucuaccaauccacauguucugcggucucaaaaggguauuugagugcuuuaagaacuggaugguacaccagcguuauuacaaucgaacuguccaacauuaaggagaauaaaugcaacgguaccgacgccaaggugaaacuaaucaagcaggaacucgauaaguauaaaaaugcaguaacugagcugcagcuucugaugcagucuacacccgccaccggcucggggucagcuauauguagcggaguggcagucugcaagguguugcaccucgagggcgaaguuaacaaaaucaagagugcccugcuguccacgaauaaagcuguggucucucucagcaacgguguguccguauuaacuuuuaagguucuggaccuuaagaauuacauugauaaacaauugcugccuauccuaaacaagcagucauguaguauuagcaauaucgagaccgugauagaguuccagcagaaaaacaauaggcuccuggaaauuacacgggaguuuucugucaacgccggggugacuaccccaguguccacauauaugcuuaccaauucagaacuguugagccucaucaacgacaugccgauuacgaacgaucaaaagaaacugaugaguaauaacguccagaucguucgccagcagucuuacuccaucaugugcauuauaaaggaggaaguguuagcguauguagugcaacugccccucuacggagucaucgacacuccuuguuggaaacuucauacaagcccacugugcaccacuaauacaaaggagggcucgaacauuuguuugacccgaacggaucguggcugguacugcgacaaugcagggucuguguccuucuuuccccaggccgaaaccuguaagguucagucaaacagaguguucugcgauacaaugaauaguagaacucugccuagcgaggucaaccucugcaauguggacaucuuuaacccaaaauaugauuguaagauaaugaccuccaaaacagacguaucuagcucaguuauuaccagucugggagcuaucguguccugcuacgguaagacuaaauguacagccagcaauaagaacaggggcaucauuaagaccuucucuaaugggugcgauuaugucucaaacaaaggaguggacacugucagugugggcaauacgcuuuacuguguuaacaagcaagaggguaaaagccuguaugugaagggggaacccaucauuaacuuuuacgacccuuugguauucccauccgaugaguuugacgcaucuauaucgcaggucaaugagaaaaucaaccagagccucgcuuucauucggaaguccgaugaacuguuacacaaugugaacgccggaaagucaacaaccaauaucaugaucacuaccauuauaaucguuauuaucgugauucugcuaagucucaucgcggucggccugcuuuuguauugcaaagcccgcucuacaccggugacccugagcaaggaccagcucuccggcauaaacaauaucgcauucucaaacugaggacuaguacuggcugcaucucccuuuccucuguccuccauccuucucccaggauggugaagggggaccugguacccagugauccccaccccaggauccuaaaucaugacuuaccugcuaauaaaaacucauuggaaaagugagaagaucuaaaaaaaaaaaaaaaaaaaaaaaaaaaaaaaaaaaaaaaaaaaaaaaaaaaaaaaaaaaaaaaaugcaucccccccccccccccccccccccccccccccaaaggcucuuuucagagccaccagaauu

SEQ ID NO: 4801 - RNA, 1977 nt, Artificial Sequence
  mRNA product Design e-6 comprising derived and/or modified sequence from HRSV(A2)__F_DSCav1_mut4 (opt4)
gggagagcggcucggccauuuugucccagucaguccggaggcugcggcugcagaaguaccgccugcggaguaacugcaaagaagcuuaccauggagcugcugauccugaaggccaacgccaucaccaccauccugaccgccgugaccuucugcuucgccagcggccagaacaucaccgaggaguucuaccagagcaccugcagcgccgugagcaagggcuaccugagcgcccugagaaccggcugguacaccagcgugaucaccaucgagcugagcaacaucaaggagaacaagugcaacggcaccgacgccaaggugaagcugaucaagcaggagcuggacaaguacaagaacgccgugaccgagcugcagcugcugaugcagagcacccccgccaccggcagcggcagcgccaucugcagcggcguggccgugugcaaggugcugcaccuggagggcgaggugaacaagaucaagagcgcccugcugagcaccaacaaggccguggugagccugagcaacggcgugagcgugcugaccuucaaggugcuggaccugaagaacuacaucgacaagcagcugcugcccauccugaacaagcagagcugcagcaucagcaacaucgagaccgugaucgaguuccagcagaagaacaacagacugcuggagaucaccagagaguucagcgugaacgccggcgugaccacccccgugagcaccuacaugcugaccaacagcgagcugcugagccugaucaacgacaugcccaucaccaacgaccagaagaagcugaugagcaacaacgugcagaucgugagacagcagagcuacagcaucaugugcaucaucaaggaggaggugcuggccuacguggugcagcugccccuguacggcgugaucgacacccccugcuggaagcugcacaccagcccccugugcaccaccaacaccaaggagggcagcaacaucugccugaccagaaccgacagaggcugguacugcgacaacgccggcagcgugagcuucuucccccaggccgagaccugcaaggugcagagcaacagaguguucugcgacaccaugaacagcagaacccugcccagcgaggugaaccugugcaacguggacaucuucaaccccaaguacgacugcaagaucaugaccagcaagaccgacgugagcagcagcgugaucaccagccugggcgccaucgugagcugcuacggcaagaccaagugcaccgccagcaacaagaacagaggcaucaucaagaccuucagcaacggcugcgacuacgugagcaacaagggcguggacaccgugagcgugggcaacacccuguacugcgugaacaagcaggagggcaagagccuguacgugaagggcgagcccaucaucaacuucuacgacccccugguguuccccagcgacgaguucgacgccagcaucagccaggugaacgagaagaucaaccagagccuggccuucaucagaaagagcgacgagcugcugcacaacgugaacgccggcaagagcaccaccaacaucaugaucaccaccaucaucaucgugaucaucgugauccugcugagccugaucgccgugggccugcugcuguacugcaaggccagaagcacccccgugacccugagcaaggaccagcugagcggcaucaacaacaucgccuucagcaacugaggacuaguacuggcugcaucucccuuuccucuguccuccauccuucucccaggauggugaagggggaccugguacccagugauccccaccccaggauccuaaaucaugacuuaccugcuaauaaaaacucauuggaaaagugagaagaucuaaaaaaaaaaaaaaaaaaaaaaaaaaaaaaaaaaaaaaaaaaaaaaaaaaaaaaaaaaaaaaaaugcaucccccccccccccccccccccccccccccccaaaggcucuuuucagagccaccagaauu

SEQ ID NO: 4802 - RNA, 1977 nt, Artificial Sequence
  mRNA product Design e-6 comprising derived and/or modified sequence from HRSV(A2)__F_DSCav1_mut4 (opt5)
gggagagcggcucggccauuuugucccagucaguccggaggcugcggcugcagaaguaccgccugcggaguaacugcaaagaagcuuaccauggagcugcucauccugaaggccaacgcuauuaccacaauccuuacggccgugaccuucugcuuugcgagcggccagaauauuacagaagaguucuaccaauccaccuguucugcugucagcaaaggguaucuguccgcccucagaacaggaugguacaccucuguuaucacaauugaacugagcaacaucaaggagaauaaaugcaacggcaccgacgccaaggugaaacuuaucaagcaggaacuggauaaguauaaaaaugcugugacggagcuccagcugcugaugcaguccacccccgccacagggucuggaagcgcuauuuguuccggcgucgccgugugcaagguucuccaccuggagggggaagugaacaaaaucaagagcgcgcuucugucuaccaauaaagccgucgugucccucagcaacggaguuucugugcugacauuuaagguccuugaccugaagaauuacauugauaaacaacuccugccuauccugaacaagcaguccuguagcauuucuaauaucgagaccgugauugaguuccagcagaaaaacaaucggcuccuggaaaucacgcgcgaguuuuccgugaacgcuggcgucacaaccccgguuagcacauauaugcuuaccaauuccgaacugcucucucugaucaacgacaugcccauuaccaacgaucaaaagaaacuuaugagcaauaacgugcagaucgugagacagcaguccuacagcauuaugugcaucauuaaggaggaaguccuggccuaugugguucaacucccucuguacggcgugaucgacacacccuguuggaaacugcauacgucuccucucugcaccacaaauaccaaggagggguccaacaucugucugacacggaccgaucgcggaugguacugcgacaaugcuggcagcgucucuuucuuuccccaggccgaaacguguaaggugcagagcaacagaguuuucugcgauacaaugaacuccagaacccugccuucugaggugaaucucugcaaugucgacauuuuuaacccgaaauaugauuguaagaucaugaccagcaaaacagacguguccagcucugucauuaccucccugggggcgaucgugagcugcuacggaaagacaaaauguacggccucuaauaagaaccggggcauuaucaagaccuucuccaaugggugcgauuauguuagcaacaaaggaguggacacagucuccgugggcaauacccuuuacuguguuaacaagcaagagggcaaaucucuguaugugaagggggaacccaucauuaacuuuuacgacccucucgucuuccccagcgaugaguuugacgcuuccaucucucaggugaaugagaaaauuaaccagagccuggccuucauccgcaaguccgaugaacugcuccacaaugugaacgcuggaaagagcacaaccaauauuaugaucacgaccauuaucaucguuauuaucgucauucugcuuucucugaucgccgugggccuccugcuguauugcaaagccagauccacaccugugacccuuagcaaggaccagcucucugggauuaacaauaucgcuuucuccaacugaggacuaguacuggcugcaucucccuuuccucuguccuccauccuucucccaggauggugaagggggaccugguacccagugauccccaccccaggauccuaaaucaugacuuaccugcuaauaaaaacucauuggaaaagugagaagaucuaaaaaaaaaaaaaaaaaaaaaaaaaaaaaaaaaaaaaaaaaaaaaaaaaaaaaaaaaaaaaaaaugcaucccccccccccccccccccccccccccccccaaaggcucuuuucagagccaccagaauu

SEQ ID NO: 4803 - RNA, 1977 nt, Artificial Sequence
  mRNA product Design e-6 comprising derived and/or modified sequence from HRSV(A2)__F_DSCav1_mut4 (opt6)
gggagagcggcucggccauuuugucccagucaguccggaggcugcggcugcagaaguaccgccugcggaguaacugcaaagaagcuuaccauggaacuucuaauacucaaagccaacgcaauaacaacaauauuaacagccguaacauuuugcuucgcaucaggucaaaacauaacagaagaguucuaccaauccacaugcucagcaguaucaaaaggauauuuaagugcucuaagaacaggaugguacacauccguaauaacaaucgaacuaucaaacauaaaagaaaauaaauguaauggaacagacgccaaaguaaaauuaaucaaacaagaacuagacaaauacaaaaacgcaguuacugaauuacaauuauuaaugcaaucaacaccggccacaggaucuggaucagcaauaugcucaggaguagcagucugcaaaguauuacaccuagaaggggaaguuaauaaaaucaaaucagcauuacuauccaccaacaaagcgguaguuucacucuccaacggcguaucugucuuaacauucaaaguauuagaccuaaaaaacuacauugacaaacaacuacuaccaauccuaaacaaacaaucauguuccauaagcaauauagaaacaguaauagaauuucaacaaaaaaacaacagacuauuagaaauaacaagagaauuuuccgucaaugcaggaguuacuaccccugucuccaccuauaugcuaaccaauuccgaacucuuaucauuaauaaacgacaugccuaucacaaaugaccaaaaaaaauuaaugagcaacaacguacaaauaguacgacaacaaucauacucaaucaugugcauaauaaaagaagaaguccuagcauacguuguacaacuaccacuauacggagucauagauaccccaugcuggaaacuccauacaagcccacuaugcacuacaaacacaaaagaaggcucuaauauaugucuaacaagaacagaccgaggaugguacugcgauaaugccggcucagucucauucuuuccgcaagccgaaacuuguaaaguacaaaguaacagaguauuuugugacaccaugaacucaagaacccucccaagcgaagucaaucuaugcaacguugauauauucaaucccaaauacgacugcaaaaucaugaccucaaaaacagacgucagcucauccguuauaacaucacuaggagccaucguaucuugcuauggaaaaacaaaaugcacagcaagcaauaaaaacagaggcauaauaaaaacauucucaaauggaugcgacuacguaucaaacaaaggagucgacacaguuuccguaggaaacacuuuauacugcguaaacaaacaagaaggaaaaucauuauacgucaaaggugaaccaauaauaaacuucuacgauccacuuguauucccaucagacgaauuugacgcaucaauuucacaaguaaacgaaaaaauaaaccaaucacucgcauucauaagaaaaucagaugaacuacuacauaacguaaacgcaggaaaauccacaacaaacaucaugauaacaaccaucauaaucguaauaaucguaauacuauuaucccuaauugcaguaggauuacucuuauauugcaaagcaagaucaacaccaguaacccucaguaaagaccaacuauccggaauaaauaacaucgcauucucaaacuaaggacuaguacuggcugcaucucccuuuccucuguccuccauccuucucccaggauggugaagggggaccugguacccagugauccccaccccaggauccuaaaucaugacuuaccugcuaauaaaaacucauuggaaaagugagaagaucuaaaaaaaaaaaaaaaaaaaaaaaaaaaaaaaaaaaaaaaaaaaaaaaaaaaaaaaaaaaaaaaaugcaucccccccccccccccccccccccccccccccaaaggcucuuuucagagccaccagaauu

SEQ ID NO: 4804 - RNA, 1977 nt, Artificial Sequence
  mRNA product Design e-6 comprising derived and/or modified sequence from HRSV(A2)__F_DSCav1_mut4 (opt11)
gggagagcggcucggccauuuugucccagucaguccggaggcugcggcugcagaaguaccgccugcggaguaacugcaaagaagcuuaccauggaacugcucauccucaaagccaacgccaucaccaccauucuuaccgccgucacauucugcuucgccucaggccaaaacaucaccgaagaauuuuaccaauccacuuguucagccgucucaaaaggauaccuaucagcccuccguaccggcugguacaccucggucauaacaauagaacucuccaacauaaaagaaaacaaaugcaacggcaccgacgccaaggucaaacugauaaaacaagaacuugauaaauacaaaaacgccgucacugaacuccaacuccucaugcaauccacucccgcuacuggcucuggcuccgccaucugcucuggcgucgccgucuguaaaguacuccaccucgaaggggaagucaacaaaaucaaaucagcccuccuuagcaccaacaaggccgucgucucccucucaaacggagucagcguccucaccuucaagguccucgaccucaagaacuacaucgacaaacaacuccugcccauccuaaauaaacaauccugcucuaucuccaauaucgaaaccguuauagaguuccaacagaaaaacaaccgacuccucgaaaucacccgcgaguucuccgucaacgcaggcgucaccaccccugugucaaccuacaugcucaccaacagcgaacuacucucacucaucaaugacaugcccaucaccaacgaccaaaagaaacucauguccaacaacguccaaaucguacgucaacaauccuacagcaucaugugcaucauaaaagaagaaguccucgccuacgucguccaacuuccccucuacggcgucauagacacccccugcuggaaacugcauaccucaccccuaugcaccaccaacacuaaagaaggcuccaacaucugccucacccgcacggaccgcggcugguacugcgacaacgccggcuccgucuccuucuucccccaagccgaaacuuguaaaguccaauccaacagagucuucugcgacaccaugaacucuagaacgcugccauccgagguaaaccuaugcaacgucgacaucuucaaucccaaauacgacugcaagaucaugaccucaaaaaccgacguauccuccucaguaaucaccagucucggagcuaucgucuccugcuacggcaaaaccaaaugcacggccucuaacaaaaaccgcggcaucaucaaaaccuucucaaacggaugcgacuacgucagcaacaaaggcguagauaccgucucugucggcaacacacuguacugcguaaacaagcaagaaggaaaaucccucuacguaaaaggcgaacccaucaucaacuucuacgacccccucguuuuccccucagaugaauuugacgccucgauaucacaagucaacgaaaagauaaaucagucccucgccuucauccgaaaauccgacgaacuccuccacaacguuaacgcaggaaaguccaccacaaacaucaugauaacuacaaucauaauagucauuaucgucauacuccucucccuaaucgccguaggccugcuacucuacugcaaagcccgcucaacccccgucacucucucaaaagaccaacucuccggcaucaauaacaucgccuucucaaacuaaggacuaguacuggcugcaucucccuuuccucuguccuccauccuucucccaggauggugaagggggaccugguacccagugauccccaccccaggauccuaaaucaugacuuaccugcuaauaaaaacucauuggaaaagugagaagaucuaaaaaaaaaaaaaaaaaaaaaaaaaaaaaaaaaaaaaaaaaaaaaaaaaaaaaaaaaaaaaaaaugcaucccccccccccccccccccccccccccccccaaaggcucuuuucagagccaccagaauu

SEQ ID NO: 4805 - RNA, 2193 nt, Artificial Sequence
  mRNA product Design f-1 comprising derived and/or modified sequence from HRSV(A2)__F_DSCav1_mut4 (opt1)
gggagagcggcucggccauuuugucccagucaguccggaggcugcggcugcagaaguaccgccugcggaguaacugcaaagaagcuuaccauggagcugcucauccugaaggccaacgccaucaccaccauccugacggcggugaccuucugcuucgccagcggccagaacaucaccgaggaguucuaccaguccacgugcagcgccgucuccaagggguaccucagcgcccugcggaccggcugguacaccuccgugaucaccaucgagcugagcaacaucaaggagaacaagugcaacgggaccgacgccaaggugaagcucaucaagcaggagcuggacaaguacaagaacgcggucacggagcugcagcuccugaugcaguccaccccggcaaccggcuccggcuccgccaucugcagcggcgucgccgugugcaaggugcugcaccucgagggggaggucaacaagaucaagagcgcccugcuguccaccaacaaggccguggugagccucuccaacggcgucagcgugcugaccuucaaggugcuggaccucaagaacuacaucgacaagcagcugcugcccauccugaacaagcagagcugcuccaucagcaacaucgagacggugaucgaguuccagcagaagaacaaccggcuccuggagaucacccgcgaguucagcgugaacgccggggucaccacccccguguccacguacaugcugaccaacagcgagcuccugucccugaucaacgacaugccgaucaccaacgaccagaagaagcucaugagcaacaacgugcagaucguccggcagcaguccuacagcaucaugugcaucaucaaggaggaggugcuggcguacgugguccagcugccccucuacggcgugaucgacacccccugcuggaagcugcacacgagcccccugugcaccaccaacaccaaggagggguccaacaucugccucacgcgcaccgaccggggcugguacugcgacaacgccggcagcgucuccuucuucccgcaggccgagaccugcaaggugcagagcaaccgcguguucugcgacaccaugaacucccggacgcugcccagcgagguaaaccucugcaacgucgacaucuucaaccccaaguacgacugcaagaucaugaccuccaagaccgacgugagcuccagcgugaucaccucccugggggccaucgucagcugcuacggcaagacgaagugcaccgccagcaacaagaaccgggggaucaucaagaccuucuccaacggcugcgacuacgugagcaacaagggcguggacaccguguccgucgggaacacccuguacugcgugaacaagcaggagggcaagagccucuacgugaagggggagcccaucaucaacuucuacgacccgcuggucuuccccuccgacgaguucgacgcgagcaucucccaggugaacgagaagaucaaccagagccuggccuucauccgcaaguccgacgagcugcuccacaacgugaacgccggcaagagcacgaccaacaucaugaucaccaccaucaucaucgucaucaucgugauccugcugucccucaucgccguggggcugcugcucuacugcaaggcccggagcacgcccgucacccuguccaaggaccagcugagcggcaucaacaacaucgcguucuccaacugaggacuagugaagggaacacccaaauuuaauucagccuuaagcacaauuaauuaagagugaaacguaauuguacaagcaguuggucacccaccauagggcaugaucaacaccgcaaccuuuccuuuuucccccagugauucugaaaaaccccucuucccuucagcuugcuuagauguuccaaauuuaguaagcuuaaggcggccuacagaagaaaaagaaaaaaaaggccacaaaaguucccucucacuuucaguaaauaaaauaaaagcagcaacagaaauaaagaaauaaaugaaauucaaaaugaaauaaauauuguguugugcagcauuaaaaaaucaauaaaaauuaaaaaugagcaagaucuaaaaaaaaaaaaaaaaaaaaaaaaaaaaaaaaaaaaaaaaaaaaaaaaaaaaaaaaaaaaaaaaugcaucccccccccccccccccccccccccccccccaaaggcucuuuucagagccaccagaauu

SEQ ID NO: 4806 - RNA, 2193 nt, Artificial Sequence
  mRNA product Design f-1 comprising derived and/or modified sequence from HRSV(A2)__F_DSCav1_mut4 (opt1)
gggagagcggcucggccauuuugucccagucaguccggaggcugcggcugcagaaguaccgccugcggaguaacugcaaagaagcuuaccauggagcugcucauccugaaggccaacgccaucaccaccauccugacggcggugaccuucugcuucgccagcggccagaacaucaccgaggaguucuaccaguccacgugcagcgccgucuccaagggguaccucagcgcccugcgcaccggcugguacaccuccgugaucaccaucgagcugagcaacaucaaggagaacaagugcaacgggaccgacgccaaggugaagcucaucaagcaggagcuggacaaguacaagaacgcggucacggagcugcagcuccugaugcaguccacccccgccaccggcagcggguccgccaucugcagcggcguggccgugugcaagguccugcaccucgagggcgaggugaacaagaucaaguccgcgcugcugagcaccaacaaggccguggucucccucagcaacgggguguccgugcugacguucaagguccuggaccucaagaacuacaucgacaagcagcugcugccgauccucaacaagcagagcugcuccaucagcaacaucgagaccgugaucgaguuccagcagaagaacaaccggcugcuggagaucacccgcgaguucuccgugaacgccggcgucaccacgcccgugagcaccuacaugcucaccaacagcgagcugcugucccucaucaacgacaugcccaucaccaacgaccagaagaagcugaugagcaacaacgugcagaucguccggcagcaguccuacagcaucaugugcaucaucaaggaggaggugcuggccuacgugguccagcucccccuguacggggugaucgacacgccgugcuggaagcugcacaccagcccccucugcaccaccaacacgaaggagggcuccaacaucugccugacccgcaccgaccgggggugguacugcgacaacgccggcuccgugagcuucuucccccaggcggagaccugcaagguccaguccaaccgcguguucugcgacacgaugaacagccggacccuccccuccgaggucaaccugugcaacguggacaucuucaacccgaaguacgacugcaagaucaugaccagcaagaccgacguguccagcuccgucaucacgagccugggcgccaucguguccugcuacgggaagaccaagugcaccgccagcaacaagaaccggggcaucaucaagaccuucuccaacgggugcgacuacgugagcaacaagggcgucgacacggugagcgugggcaacacccucuacugcgucaacaagcaggaggggaagucccuguacgugaagggcgagcccaucaucaacuucuacgacccccugguguuccccagcgacgaguucgacgccuccaucagccaggucaacgagaagaucaaccagucccucgccuucauccgcaagagcgacgagcugcugcacaacgugaacgcggggaaguccaccaccaacaucaugaucaccacgaucaucaucgugaucaucgucauccuccugagccugaucgccgugggccuccugcuguacugcaaggcccgguccaccccggugacccugagcaaggaccagcucuccgggaucaacaacaucgccuucagcaacugaggacuagugaagggaacacccaaauuuaauucagccuuaagcacaauuaauuaagagugaaacguaauuguacaagcaguuggucacccaccauagggcaugaucaacaccgcaaccuuuccuuuuucccccagugauucugaaaaaccccucuucccuucagcuugcuuagauguuccaaauuuaguaagcuuaaggcggccuacagaagaaaaagaaaaaaaaggccacaaaaguucccucucacuuucaguaaauaaaauaaaagcagcaacagaaauaaagaaauaaaugaaauucaaaaugaaauaaauauuguguugugcagcauuaaaaaaucaauaaaaauuaaaaaugagcaagaucuaaaaaaaaaaaaaaaaaaaaaaaaaaaaaaaaaaaaaaaaaaaaaaaaaaaaaaaaaaaaaaaaugcaucccccccccccccccccccccccccccccccaaaggcucuuuucagagccaccagaauu

SEQ ID NO: 4807 - RNA, 2193 nt, Artificial Sequence
  mRNA product Design f-1 comprising derived and/or modified sequence from HRSV(A2)__F_DSCav1_mut4 (opt2)
gggagagcggcucggccauuuugucccagucaguccggaggcugcggcugcagaaguaccgccugcggaguaacugcaaagaagcuuaccauggagcuccucauccucaaggccaacgccaucaccaccauccucaccgccgucaccuucugcuucgccuccggccagaacaucaccgaggaguucuaccaguccaccugcuccgccgucuccaagggcuaccucuccgcccuccgcaccggcugguacaccuccgucaucaccaucgagcucuccaacaucaaggagaacaagugcaacggcaccgacgccaaggucaagcucaucaagcaggagcucgacaaguacaagaacgccgucaccgagcuccagcuccucaugcaguccacccccgccaccggcuccggcuccgccaucugcuccggcgucgccgucugcaagguccuccaccucgagggcgaggucaacaagaucaaguccgcccuccucuccaccaacaaggccgucgucucccucuccaacggcgucuccguccucaccuucaagguccucgaccucaagaacuacaucgacaagcagcuccuccccauccucaacaagcaguccugcuccaucuccaacaucgagaccgucaucgaguuccagcagaagaacaaccgccuccucgagaucacccgcgaguucuccgucaacgccggcgucaccacccccgucuccaccuacaugcucaccaacuccgagcuccucucccucaucaacgacaugcccaucaccaacgaccagaagaagcucauguccaacaacguccagaucguccgccagcaguccuacuccaucaugugcaucaucaaggaggagguccucgccuacgucguccagcucccccucuacggcgucaucgacacccccugcuggaagcuccacaccuccccccucugcaccaccaacaccaaggagggcuccaacaucugccucacccgcaccgaccgcggcugguacugcgacaacgccggcuccgucuccuucuucccccaggccgagaccugcaagguccaguccaaccgcgucuucugcgacaccaugaacucccgcacccuccccuccgaggucaaccucugcaacgucgacaucuucaaccccaaguacgacugcaagaucaugaccuccaagaccgacgucuccuccuccgucaucaccucccucggcgccaucgucuccugcuacggcaagaccaagugcaccgccuccaacaagaaccgcggcaucaucaagaccuucuccaacggcugcgacuacgucuccaacaagggcgucgacaccgucuccgucggcaacacccucuacugcgucaacaagcaggagggcaagucccucuacgucaagggcgagcccaucaucaacuucuacgacccccucgucuuccccuccgacgaguucgacgccuccaucucccaggucaacgagaagaucaaccagucccucgccuucauccgcaaguccgacgagcuccuccacaacgucaacgccggcaaguccaccaccaacaucaugaucaccaccaucaucaucgucaucaucgucauccuccucucccucaucgccgucggccuccuccucuacugcaaggcccgcuccacccccgucacccucuccaaggaccagcucuccggcaucaacaacaucgccuucuccaacugaggacuagugaagggaacacccaaauuuaauucagccuuaagcacaauuaauuaagagugaaacguaauuguacaagcaguuggucacccaccauagggcaugaucaacaccgcaaccuuuccuuuuucccccagugauucugaaaaaccccucuucccuucagcuugcuuagauguuccaaauuuaguaagcuuaaggcggccuacagaagaaaaagaaaaaaaaggccacaaaaguucccucucacuuucaguaaauaaaauaaaagcagcaacagaaauaaagaaauaaaugaaauucaaaaugaaauaaauauuguguugugcagcauuaaaaaaucaauaaaaauuaaaaaugagcaagaucuaaaaaaaaaaaaaaaaaaaaaaaaaaaaaaaaaaaaaaaaaaaaaaaaaaaaaaaaaaaaaaaaugcaucccccccccccccccccccccccccccccccaaaggcucuuuucagagccaccagaauu

SEQ ID NO: 4808 - RNA, 2193 nt, Artificial Sequence
  mRNA product Design f-1 comprising derived and/or modified sequence from HRSV(A2)__F_DSCav1_mut4 (opt3)
gggagagcggcucggccauuuugucccagucaguccggaggcugcggcugcagaaguaccgccugcggaguaacugcaaagaagcuuaccauggagcugcucauccuuaaggccaacgcuauuaccacaauacugacugcagugacguucugcuuugccagcggccagaauaucaccgaagaguucuaccaauccacauguucugcggucucaaaaggguauuugagugcuuuaagaacuggaugguacaccagcguuauuacaaucgaacuguccaacauuaaggagaauaaaugcaacgguaccgacgccaaggugaaacuaaucaagcaggaacucgauaaguauaaaaaugcaguaacugagcugcagcuucugaugcagucuacacccgccaccggcucggggucagcuauauguagcggaguggcagucugcaagguguugcaccucgagggcgaaguuaacaaaaucaagagugcccugcuguccacgaauaaagcuguggucucucucagcaacgguguguccguauuaacuuuuaagguucuggaccuuaagaauuacauugauaaacaauugcugccuauccuaaacaagcagucauguaguauuagcaauaucgagaccgugauagaguuccagcagaaaaacaauaggcuccuggaaauuacacgggaguuuucugucaacgccggggugacuaccccaguguccacauauaugcuuaccaauucagaacuguugagccucaucaacgacaugccgauuacgaacgaucaaaagaaacugaugaguaauaacguccagaucguucgccagcagucuuacuccaucaugugcauuauaaaggaggaaguguuagcguauguagugcaacugccccucuacggagucaucgacacuccuuguuggaaacuucauacaagcccacugugcaccacuaauacaaaggagggcucgaacauuuguuugacccgaacggaucguggcugguacugcgacaaugcagggucuguguccuucuuuccccaggccgaaaccuguaagguucagucaaacagaguguucugcgauacaaugaauaguagaacucugccuagcgaggucaaccucugcaauguggacaucuuuaacccaaaauaugauuguaagauaaugaccuccaaaacagacguaucuagcucaguuauuaccagucugggagcuaucguguccugcuacgguaagacuaaauguacagccagcaauaagaacaggggcaucauuaagaccuucucuaaugggugcgauuaugucucaaacaaaggaguggacacugucagugugggcaauacgcuuuacuguguuaacaagcaagaggguaaaagccuguaugugaagggggaacccaucauuaacuuuuacgacccuuugguauucccauccgaugaguuugacgcaucuauaucgcaggucaaugagaaaaucaaccagagccucgcuuucauucggaaguccgaugaacuguuacacaaugugaacgccggaaagucaacaaccaauaucaugaucacuaccauuauaaucguuauuaucgugauucugcuaagucucaucgcggucggccugcuuuuguauugcaaagcccgcucuacaccggugacccugagcaaggaccagcucuccggcauaaacaauaucgcauucucaaacugaggacuagugaagggaacacccaaauuuaauucagccuuaagcacaauuaauuaagagugaaacguaauuguacaagcaguuggucacccaccauagggcaugaucaacaccgcaaccuuuccuuuuucccccagugauucugaaaaaccccucuucccuucagcuugcuuagauguuccaaauuuaguaagcuuaaggcggccuacagaagaaaaagaaaaaaaaggccacaaaaguucccucucacuuucaguaaauaaaauaaaagcagcaacagaaauaaagaaauaaaugaaauucaaaaugaaauaaauauuguguugugcagcauuaaaaaaucaauaaaaauuaaaaaugagcaagaucuaaaaaaaaaaaaaaaaaaaaaaaaaaaaaaaaaaaaaaaaaaaaaaaaaaaaaaaaaaaaaaaaugcaucccccccccccccccccccccccccccccccaaaggcucuuuucagagccaccagaauu

SEQ ID NO: 4809 - RNA, 2193 nt, Artificial Sequence
  mRNA product Design f-1 comprising derived and/or modified sequence from HRSV(A2)__F_DSCav1_mut4 (opt4)
gggagagcggcucggccauuuugucccagucaguccggaggcugcggcugcagaaguaccgccugcggaguaacugcaaagaagcuuaccauggagcugcugauccugaaggccaacgccaucaccaccauccugaccgccgugaccuucugcuucgccagcggccagaacaucaccgaggaguucuaccagagcaccugcagcgccgugagcaagggcuaccugagcgcccugagaaccggcugguacaccagcgugaucaccaucgagcugagcaacaucaaggagaacaagugcaacggcaccgacgccaaggugaagcugaucaagcaggagcuggacaaguacaagaacgccgugaccgagcugcagcugcugaugcagagcacccccgccaccggcagcggcagcgccaucugcagcggcguggccgugugcaaggugcugcaccuggagggcgaggugaacaagaucaagagcgcccugcugagcaccaacaaggccguggugagccugagcaacggcgugagcgugcugaccuucaaggugcuggaccugaagaacuacaucgacaagcagcugcugcccauccugaacaagcagagcugcagcaucagcaacaucgagaccgugaucgaguuccagcagaagaacaacagacugcuggagaucaccagagaguucagcgugaacgccggcgugaccacccccgugagcaccuacaugcugaccaacagcgagcugcugagccugaucaacgacaugcccaucaccaacgaccagaagaagcugaugagcaacaacgugcagaucgugagacagcagagcuacagcaucaugugcaucaucaaggaggaggugcuggccuacguggugcagcugccccuguacggcgugaucgacacccccugcuggaagcugcacaccagcccccugugcaccaccaacaccaaggagggcagcaacaucugccugaccagaaccgacagaggcugguacugcgacaacgccggcagcgugagcuucuucccccaggccgagaccugcaaggugcagagcaacagaguguucugcgacaccaugaacagcagaacccugcccagcgaggugaaccugugcaacguggacaucuucaaccccaaguacgacugcaagaucaugaccagcaagaccgacgugagcagcagcgugaucaccagccugggcgccaucgugagcugcuacggcaagaccaagugcaccgccagcaacaagaacagaggcaucaucaagaccuucagcaacggcugcgacuacgugagcaacaagggcguggacaccgugagcgugggcaacacccuguacugcgugaacaagcaggagggcaagagccuguacgugaagggcgagcccaucaucaacuucuacgacccccugguguuccccagcgacgaguucgacgccagcaucagccaggugaacgagaagaucaaccagagccuggccuucaucagaaagagcgacgagcugcugcacaacgugaacgccggcaagagcaccaccaacaucaugaucaccaccaucaucaucgugaucaucgugauccugcugagccugaucgccgugggccugcugcuguacugcaaggccagaagcacccccgugacccugagcaaggaccagcugagcggcaucaacaacaucgccuucagcaacugaggacuagugaagggaacacccaaauuuaauucagccuuaagcacaauuaauuaagagugaaacguaauuguacaagcaguuggucacccaccauagggcaugaucaacaccgcaaccuuuccuuuuucccccagugauucugaaaaaccccucuucccuucagcuugcuuagauguuccaaauuuaguaagcuuaaggcggccuacagaagaaaaagaaaaaaaaggccacaaaaguucccucucacuuucaguaaauaaaauaaaagcagcaacagaaauaaagaaauaaaugaaauucaaaaugaaauaaauauuguguugugcagcauuaaaaaaucaauaaaaauuaaaaaugagcaagaucuaaaaaaaaaaaaaaaaaaaaaaaaaaaaaaaaaaaaaaaaaaaaaaaaaaaaaaaaaaaaaaaaugcaucccccccccccccccccccccccccccccccaaaggcucuuuucagagccaccagaauu

SEQ ID NO: 4810 - RNA, 2193 nt, Artificial Sequence
  mRNA product Design f-1 comprising derived and/or modified sequence from HRSV(A2)__F_DSCav1_mut4 (opt5)
gggagagcggcucggccauuuugucccagucaguccggaggcugcggcugcagaaguaccgccugcggaguaacugcaaagaagcuuaccauggagcugcucauccugaaggccaacgcuauuaccacaauccuuacggccgugaccuucugcuuugcgagcggccagaauauuacagaagaguucuaccaauccaccuguucugcugucagcaaaggguaucuguccgcccucagaacaggaugguacaccucuguuaucacaauugaacugagcaacaucaaggagaauaaaugcaacggcaccgacgccaaggugaaacuuaucaagcaggaacuggauaaguauaaaaaugcugugacggagcuccagcugcugaugcaguccacccccgccacagggucuggaagcgcuauuuguuccggcgucgccgugugcaagguucuccaccuggagggggaagugaacaaaaucaagagcgcgcuucugucuaccaauaaagccgucgugucccucagcaacggaguuucugugcugacauuuaagguccuugaccugaagaauuacauugauaaacaacuccugccuauccugaacaagcaguccuguagcauuucuaauaucgagaccgugauugaguuccagcagaaaaacaaucggcuccuggaaaucacgcgcgaguuuuccgugaacgcuggcgucacaaccccgguuagcacauauaugcuuaccaauuccgaacugcucucucugaucaacgacaugcccauuaccaacgaucaaaagaaacuuaugagcaauaacgugcagaucgugagacagcaguccuacagcauuaugugcaucauuaaggaggaaguccuggccuaugugguucaacucccucuguacggcgugaucgacacacccuguuggaaacugcauacgucuccucucugcaccacaaauaccaaggagggguccaacaucugucugacacggaccgaucgcggaugguacugcgacaaugcuggcagcgucucuuucuuuccccaggccgaaacguguaaggugcagagcaacagaguuuucugcgauacaaugaacuccagaacccugccuucugaggugaaucucugcaaugucgacauuuuuaacccgaaauaugauuguaagaucaugaccagcaaaacagacguguccagcucugucauuaccucccugggggcgaucgugagcugcuacggaaagacaaaauguacggccucuaauaagaaccggggcauuaucaagaccuucuccaaugggugcgauuauguuagcaacaaaggaguggacacagucuccgugggcaauacccuuuacuguguuaacaagcaagagggcaaaucucuguaugugaagggggaacccaucauuaacuuuuacgacccucucgucuuccccagcgaugaguuugacgcuuccaucucucaggugaaugagaaaauuaaccagagccuggccuucauccgcaaguccgaugaacugcuccacaaugugaacgcuggaaagagcacaaccaauauuaugaucacgaccauuaucaucguuauuaucgucauucugcuuucucugaucgccgugggccuccugcuguauugcaaagccagauccacaccugugacccuuagcaaggaccagcucucugggauuaacaauaucgcuuucuccaacugaggacuagugaagggaacacccaaauuuaauucagccuuaagcacaauuaauuaagagugaaacguaauuguacaagcaguuggucacccaccauagggcaugaucaacaccgcaaccuuuccuuuuucccccagugauucugaaaaaccccucuucccuucagcuugcuuagauguuccaaauuuaguaagcuuaaggcggccuacagaagaaaaagaaaaaaaaggccacaaaaguucccucucacuuucaguaaauaaaauaaaagcagcaacagaaauaaagaaauaaaugaaauucaaaaugaaauaaauauuguguugugcagcauuaaaaaaucaauaaaaauuaaaaaugagcaagaucuaaaaaaaaaaaaaaaaaaaaaaaaaaaaaaaaaaaaaaaaaaaaaaaaaaaaaaaaaaaaaaaaugcaucccccccccccccccccccccccccccccccaaaggcucuuuucagagccaccagaauu

SEQ ID NO: 4811 - RNA, 2193 nt, Artificial Sequence
  mRNA product Design f-1 comprising derived and/or modified sequence from HRSV(A2)__F_DSCav1_mut4 (opt6)
gggagagcggcucggccauuuugucccagucaguccggaggcugcggcugcagaaguaccgccugcggaguaacugcaaagaagcuuaccauggaacuucuaauacucaaagccaacgcaauaacaacaauauuaacagccguaacauuuugcuucgcaucaggucaaaacauaacagaagaguucuaccaauccacaugcucagcaguaucaaaaggauauuuaagugcucuaagaacaggaugguacacauccguaauaacaaucgaacuaucaaacauaaaagaaaauaaauguaauggaacagacgccaaaguaaaauuaaucaaacaagaacuagacaaauacaaaaacgcaguuacugaauuacaauuauuaaugcaaucaacaccggccacaggaucuggaucagcaauaugcucaggaguagcagucugcaaaguauuacaccuagaaggggaaguuaauaaaaucaaaucagcauuacuauccaccaacaaagcgguaguuucacucuccaacggcguaucugucuuaacauucaaaguauuagaccuaaaaaacuacauugacaaacaacuacuaccaauccuaaacaaacaaucauguuccauaagcaauauagaaacaguaauagaauuucaacaaaaaaacaacagacuauuagaaauaacaagagaauuuuccgucaaugcaggaguuacuaccccugucuccaccuauaugcuaaccaauuccgaacucuuaucauuaauaaacgacaugccuaucacaaaugaccaaaaaaaauuaaugagcaacaacguacaaauaguacgacaacaaucauacucaaucaugugcauaauaaaagaagaaguccuagcauacguuguacaacuaccacuauacggagucauagauaccccaugcuggaaacuccauacaagcccacuaugcacuacaaacacaaaagaaggcucuaauauaugucuaacaagaacagaccgaggaugguacugcgauaaugccggcucagucucauucuuuccgcaagccgaaacuuguaaaguacaaaguaacagaguauuuugugacaccaugaacucaagaacccucccaagcgaagucaaucuaugcaacguugauauauucaaucccaaauacgacugcaaaaucaugaccucaaaaacagacgucagcucauccguuauaacaucacuaggagccaucguaucuugcuauggaaaaacaaaaugcacagcaagcaauaaaaacagaggcauaauaaaaacauucucaaauggaugcgacuacguaucaaacaaaggagucgacacaguuuccguaggaaacacuuuauacugcguaaacaaacaagaaggaaaaucauuauacgucaaaggugaaccaauaauaaacuucuacgauccacuuguauucccaucagacgaauuugacgcaucaauuucacaaguaaacgaaaaaauaaaccaaucacucgcauucauaagaaaaucagaugaacuacuacauaacguaaacgcaggaaaauccacaacaaacaucaugauaacaaccaucauaaucguaauaaucguaauacuauuaucccuaauugcaguaggauuacucuuauauugcaaagcaagaucaacaccaguaacccucaguaaagaccaacuauccggaauaaauaacaucgcauucucaaacuaaggacuagugaagggaacacccaaauuuaauucagccuuaagcacaauuaauuaagagugaaacguaauuguacaagcaguuggucacccaccauagggcaugaucaacaccgcaaccuuuccuuuuucccccagugauucugaaaaaccccucuucccuucagcuugcuuagauguuccaaauuuaguaagcuuaaggcggccuacagaagaaaaagaaaaaaaaggccacaaaaguucccucucacuuucaguaaauaaaauaaaagcagcaacagaaauaaagaaauaaaugaaauucaaaaugaaauaaauauuguguugugcagcauuaaaaaaucaauaaaaauuaaaaaugagcaagaucuaaaaaaaaaaaaaaaaaaaaaaaaaaaaaaaaaaaaaaaaaaaaaaaaaaaaaaaaaaaaaaaaugcaucccccccccccccccccccccccccccccccaaaggcucuuuucagagccaccagaauu

SEQ ID NO: 4812 - RNA, 2193 nt, Artificial Sequence
  mRNA product Design f-1 comprising derived and/or modified sequence from HRSV(A2)__F_DSCav1_mut4 (opt11)
gggagagcggcucggccauuuugucccagucaguccggaggcugcggcugcagaaguaccgccugcggaguaacugcaaagaagcuuaccauggaacugcucauccucaaagccaacgccaucaccaccauucuuaccgccgucacauucugcuucgccucaggccaaaacaucaccgaagaauuuuaccaauccacuuguucagccgucucaaaaggauaccuaucagcccuccguaccggcugguacaccucggucauaacaauagaacucuccaacauaaaagaaaacaaaugcaacggcaccgacgccaaggucaaacugauaaaacaagaacuugauaaauacaaaaacgccgucacugaacuccaacuccucaugcaauccacucccgcuacuggcucuggcuccgccaucugcucuggcgucgccgucuguaaaguacuccaccucgaaggggaagucaacaaaaucaaaucagcccuccuuagcaccaacaaggccgucgucucccucucaaacggagucagcguccucaccuucaagguccucgaccucaagaacuacaucgacaaacaacuccugcccauccuaaauaaacaauccugcucuaucuccaauaucgaaaccguuauagaguuccaacagaaaaacaaccgacuccucgaaaucacccgcgaguucuccgucaacgcaggcgucaccaccccugugucaaccuacaugcucaccaacagcgaacuacucucacucaucaaugacaugcccaucaccaacgaccaaaagaaacucauguccaacaacguccaaaucguacgucaacaauccuacagcaucaugugcaucauaaaagaagaaguccucgccuacgucguccaacuuccccucuacggcgucauagacacccccugcuggaaacugcauaccucaccccuaugcaccaccaacacuaaagaaggcuccaacaucugccucacccgcacggaccgcggcugguacugcgacaacgccggcuccgucuccuucuucccccaagccgaaacuuguaaaguccaauccaacagagucuucugcgacaccaugaacucuagaacgcugccauccgagguaaaccuaugcaacgucgacaucuucaaucccaaauacgacugcaagaucaugaccucaaaaaccgacguauccuccucaguaaucaccagucucggagcuaucgucuccugcuacggcaaaaccaaaugcacggccucuaacaaaaaccgcggcaucaucaaaaccuucucaaacggaugcgacuacgucagcaacaaaggcguagauaccgucucugucggcaacacacuguacugcguaaacaagcaagaaggaaaaucccucuacguaaaaggcgaacccaucaucaacuucuacgacccccucguuuuccccucagaugaauuugacgccucgauaucacaagucaacgaaaagauaaaucagucccucgccuucauccgaaaauccgacgaacuccuccacaacguuaacgcaggaaaguccaccacaaacaucaugauaacuacaaucauaauagucauuaucgucauacuccucucccuaaucgccguaggccugcuacucuacugcaaagcccgcucaacccccgucacucucucaaaagaccaacucuccggcaucaauaacaucgccuucucaaacuaaggacuagugaagggaacacccaaauuuaauucagccuuaagcacaauuaauuaagagugaaacguaauuguacaagcaguuggucacccaccauagggcaugaucaacaccgcaaccuuuccuuuuucccccagugauucugaaaaaccccucuucccuucagcuugcuuagauguuccaaauuuaguaagcuuaaggcggccuacagaagaaaaagaaaaaaaaggccacaaaaguucccucucacuuucaguaaauaaaauaaaagcagcaacagaaauaaagaaauaaaugaaauucaaaaugaaauaaauauuguguugugcagcauuaaaaaaucaauaaaaauuaaaaaugagcaagaucuaaaaaaaaaaaaaaaaaaaaaaaaaaaaaaaaaaaaaaaaaaaaaaaaaaaaaaaaaaaaaaaaugcaucccccccccccccccccccccccccccccccaaaggcucuuuucagagccaccagaauu

SEQ ID NO: 4813 - RNA, 1973 nt, Artificial Sequence
  mRNA product Design f-2 comprising derived and/or modified sequence from HRSV(A2)__F_DSCav1_mut4 (opt1)
gggagagcggcucggccauuuugucccagucaguccggaggcugcggcugcagaaguaccgccugcggaguaacugcaaagaagcuuaccauggagcugcucauccugaaggccaacgccaucaccaccauccugacggcggugaccuucugcuucgccagcggccagaacaucaccgaggaguucuaccaguccacgugcagcgccgucuccaagggguaccucagcgcccugcggaccggcugguacaccuccgugaucaccaucgagcugagcaacaucaaggagaacaagugcaacgggaccgacgccaaggugaagcucaucaagcaggagcuggacaaguacaagaacgcggucacggagcugcagcuccugaugcaguccaccccggcaaccggcuccggcuccgccaucugcagcggcgucgccgugugcaaggugcugcaccucgagggggaggucaacaagaucaagagcgcccugcuguccaccaacaaggccguggugagccucuccaacggcgucagcgugcugaccuucaaggugcuggaccucaagaacuacaucgacaagcagcugcugcccauccugaacaagcagagcugcuccaucagcaacaucgagacggugaucgaguuccagcagaagaacaaccggcuccuggagaucacccgcgaguucagcgugaacgccggggucaccacccccguguccacguacaugcugaccaacagcgagcuccugucccugaucaacgacaugccgaucaccaacgaccagaagaagcucaugagcaacaacgugcagaucguccggcagcaguccuacagcaucaugugcaucaucaaggaggaggugcuggcguacgugguccagcugccccucuacggcgugaucgacacccccugcuggaagcugcacacgagcccccugugcaccaccaacaccaaggagggguccaacaucugccucacgcgcaccgaccggggcugguacugcgacaacgccggcagcgucuccuucuucccgcaggccgagaccugcaaggugcagagcaaccgcguguucugcgacaccaugaacucccggacgcugcccagcgagguaaaccucugcaacgucgacaucuucaaccccaaguacgacugcaagaucaugaccuccaagaccgacgugagcuccagcgugaucaccucccugggggccaucgucagcugcuacggcaagacgaagugcaccgccagcaacaagaaccgggggaucaucaagaccuucuccaacggcugcgacuacgugagcaacaagggcguggacaccguguccgucgggaacacccuguacugcgugaacaagcaggagggcaagagccucuacgugaagggggagcccaucaucaacuucuacgacccgcuggucuuccccuccgacgaguucgacgcgagcaucucccaggugaacgagaagaucaaccagagccuggccuucauccgcaaguccgacgagcugcuccacaacgugaacgccggcaagagcacgaccaacaucaugaucaccaccaucaucaucgucaucaucgugauccugcugucccucaucgccguggggcugcugcucuacugcaaggcccggagcacgcccgucacccuguccaaggaccagcugagcggcaucaacaacaucgcguucuccaacugaggacuaguggaagcauuuuccuggcugauuaaaagaaauuacucagcuauggucaucuguuccuguuagaaggcuaugcagcauauuauauacuaugcgcauguuaugaaaugcauaauaaaaaauuuuaaaaaaucuaaaagaucuaaaaaaaaaaaaaaaaaaaaaaaaaaaaaaaaaaaaaaaaaaaaaaaaaaaaaaaaaaaaaaaaugcaucccccccccccccccccccccccccccccccaaaggcucuuuucagagccaccagaauu

SEQ ID NO: 4814 - RNA, 1973 nt, Artificial Sequence
  mRNA product Design f-2 comprising derived and/or modified sequence from HRSV(A2)__F_DSCav1_mut4 (opt1)
gggagagcggcucggccauuuugucccagucaguccggaggcugcggcugcagaaguaccgccugcggaguaacugcaaagaagcuuaccauggagcugcucauccugaaggccaacgccaucaccaccauccugacggcggugaccuucugcuucgccagcggccagaacaucaccgaggaguucuaccaguccacgugcagcgccgucuccaagggguaccucagcgcccugcgcaccggcugguacaccuccgugaucaccaucgagcugagcaacaucaaggagaacaagugcaacgggaccgacgccaaggugaagcucaucaagcaggagcuggacaaguacaagaacgcggucacggagcugcagcuccugaugcaguccacccccgccaccggcagcggguccgccaucugcagcggcguggccgugugcaagguccugcaccucgagggcgaggugaacaagaucaaguccgcgcugcugagcaccaacaaggccguggucucccucagcaacgggguguccgugcugacguucaagguccuggaccucaagaacuacaucgacaagcagcugcugccgauccucaacaagcagagcugcuccaucagcaacaucgagaccgugaucgaguuccagcagaagaacaaccggcugcuggagaucacccgcgaguucuccgugaacgccggcgucaccacgcccgugagcaccuacaugcucaccaacagcgagcugcugucccucaucaacgacaugcccaucaccaacgaccagaagaagcugaugagcaacaacgugcagaucguccggcagcaguccuacagcaucaugugcaucaucaaggaggaggugcuggccuacgugguccagcucccccuguacggggugaucgacacgccgugcuggaagcugcacaccagcccccucugcaccaccaacacgaaggagggcuccaacaucugccugacccgcaccgaccgggggugguacugcgacaacgccggcuccgugagcuucuucccccaggcggagaccugcaagguccaguccaaccgcguguucugcgacacgaugaacagccggacccuccccuccgaggucaaccugugcaacguggacaucuucaacccgaaguacgacugcaagaucaugaccagcaagaccgacguguccagcuccgucaucacgagccugggcgccaucguguccugcuacgggaagaccaagugcaccgccagcaacaagaaccggggcaucaucaagaccuucuccaacgggugcgacuacgugagcaacaagggcgucgacacggugagcgugggcaacacccucuacugcgucaacaagcaggaggggaagucccuguacgugaagggcgagcccaucaucaacuucuacgacccccugguguuccccagcgacgaguucgacgccuccaucagccaggucaacgagaagaucaaccagucccucgccuucauccgcaagagcgacgagcugcugcacaacgugaacgcggggaaguccaccaccaacaucaugaucaccacgaucaucaucgugaucaucgucauccuccugagccugaucgccgugggccuccugcuguacugcaaggcccgguccaccccggugacccugagcaaggaccagcucuccgggaucaacaacaucgccuucagcaacugaggacuaguggaagcauuuuccuggcugauuaaaagaaauuacucagcuauggucaucuguuccuguuagaaggcuaugcagcauauuauauacuaugcgcauguuaugaaaugcauaauaaaaaauuuuaaaaaaucuaaaagaucuaaaaaaaaaaaaaaaaaaaaaaaaaaaaaaaaaaaaaaaaaaaaaaaaaaaaaaaaaaaaaaaaugcaucccccccccccccccccccccccccccccccaaaggcucuuuucagagccaccagaauu

SEQ ID NO: 4815 - RNA, 1973 nt, Artificial Sequence
  mRNA product Design f-2 comprising derived and/or modified sequence from HRSV(A2)__F_DSCav1_mut4 (opt2)
gggagagcggcucggccauuuugucccagucaguccggaggcugcggcugcagaaguaccgccugcggaguaacugcaaagaagcuuaccauggagcuccucauccucaaggccaacgccaucaccaccauccucaccgccgucaccuucugcuucgccuccggccagaacaucaccgaggaguucuaccaguccaccugcuccgccgucuccaagggcuaccucuccgcccuccgcaccggcugguacaccuccgucaucaccaucgagcucuccaacaucaaggagaacaagugcaacggcaccgacgccaaggucaagcucaucaagcaggagcucgacaaguacaagaacgccgucaccgagcuccagcuccucaugcaguccacccccgccaccggcuccggcuccgccaucugcuccggcgucgccgucugcaagguccuccaccucgagggcgaggucaacaagaucaaguccgcccuccucuccaccaacaaggccgucgucucccucuccaacggcgucuccguccucaccuucaagguccucgaccucaagaacuacaucgacaagcagcuccuccccauccucaacaagcaguccugcuccaucuccaacaucgagaccgucaucgaguuccagcagaagaacaaccgccuccucgagaucacccgcgaguucuccgucaacgccggcgucaccacccccgucuccaccuacaugcucaccaacuccgagcuccucucccucaucaacgacaugcccaucaccaacgaccagaagaagcucauguccaacaacguccagaucguccgccagcaguccuacuccaucaugugcaucaucaaggaggagguccucgccuacgucguccagcucccccucuacggcgucaucgacacccccugcuggaagcuccacaccuccccccucugcaccaccaacaccaaggagggcuccaacaucugccucacccgcaccgaccgcggcugguacugcgacaacgccggcuccgucuccuucuucccccaggccgagaccugcaagguccaguccaaccgcgucuucugcgacaccaugaacucccgcacccuccccuccgaggucaaccucugcaacgucgacaucuucaaccccaaguacgacugcaagaucaugaccuccaagaccgacgucuccuccuccgucaucaccucccucggcgccaucgucuccugcuacggcaagaccaagugcaccgccuccaacaagaaccgcggcaucaucaagaccuucuccaacggcugcgacuacgucuccaacaagggcgucgacaccgucuccgucggcaacacccucuacugcgucaacaagcaggagggcaagucccucuacgucaagggcgagcccaucaucaacuucuacgacccccucgucuuccccuccgacgaguucgacgccuccaucucccaggucaacgagaagaucaaccagucccucgccuucauccgcaaguccgacgagcuccuccacaacgucaacgccggcaaguccaccaccaacaucaugaucaccaccaucaucaucgucaucaucgucauccuccucucccucaucgccgucggccuccuccucuacugcaaggcccgcuccacccccgucacccucuccaaggaccagcucuccggcaucaacaacaucgccuucuccaacugaggacuaguggaagcauuuuccuggcugauuaaaagaaauuacucagcuauggucaucuguuccuguuagaaggcuaugcagcauauuauauacuaugcgcauguuaugaaaugcauaauaaaaaauuuuaaaaaaucuaaaagaucuaaaaaaaaaaaaaaaaaaaaaaaaaaaaaaaaaaaaaaaaaaaaaaaaaaaaaaaaaaaaaaaaugcaucccccccccccccccccccccccccccccccaaaggcucuuuucagagccaccagaauu

SEQ ID NO: 4816 - RNA, 1973 nt, Artificial Sequence
  mRNA product Design f-2 comprising derived and/or modified sequence from HRSV(A2)__F_DSCav1_mut4 (opt3)
gggagagcggcucggccauuuugucccagucaguccggaggcugcggcugcagaaguaccgccugcggaguaacugcaaagaagcuuaccauggagcugcucauccuuaaggccaacgcuauuaccacaauacugacugcagugacguucugcuuugccagcggccagaauaucaccgaagaguucuaccaauccacauguucugcggucucaaaaggguauuugagugcuuuaagaacuggaugguacaccagcguuauuacaaucgaacuguccaacauuaaggagaauaaaugcaacgguaccgacgccaaggugaaacuaaucaagcaggaacucgauaaguauaaaaaugcaguaacugagcugcagcuucugaugcagucuacacccgccaccggcucggggucagcuauauguagcggaguggcagucugcaagguguugcaccucgagggcgaaguuaacaaaaucaagagugcccugcuguccacgaauaaagcuguggucucucucagcaacgguguguccguauuaacuuuuaagguucuggaccuuaagaauuacauugauaaacaauugcugccuauccuaaacaagcagucauguaguauuagcaauaucgagaccgugauagaguuccagcagaaaaacaauaggcuccuggaaauuacacgggaguuuucugucaacgccggggugacuaccccaguguccacauauaugcuuaccaauucagaacuguugagccucaucaacgacaugccgauuacgaacgaucaaaagaaacugaugaguaauaacguccagaucguucgccagcagucuuacuccaucaugugcauuauaaaggaggaaguguuagcguauguagugcaacugccccucuacggagucaucgacacuccuuguuggaaacuucauacaagcccacugugcaccacuaauacaaaggagggcucgaacauuuguuugacccgaacggaucguggcugguacugcgacaaugcagggucuguguccuucuuuccccaggccgaaaccuguaagguucagucaaacagaguguucugcgauacaaugaauaguagaacucugccuagcgaggucaaccucugcaauguggacaucuuuaacccaaaauaugauuguaagauaaugaccuccaaaacagacguaucuagcucaguuauuaccagucugggagcuaucguguccugcuacgguaagacuaaauguacagccagcaauaagaacaggggcaucauuaagaccuucucuaaugggugcgauuaugucucaaacaaaggaguggacacugucagugugggcaauacgcuuuacuguguuaacaagcaagaggguaaaagccuguaugugaagggggaacccaucauuaacuuuuacgacccuuugguauucccauccgaugaguuugacgcaucuauaucgcaggucaaugagaaaaucaaccagagccucgcuuucauucggaaguccgaugaacuguuacacaaugugaacgccggaaagucaacaaccaauaucaugaucacuaccauuauaaucguuauuaucgugauucugcuaagucucaucgcggucggccugcuuuuguauugcaaagcccgcucuacaccggugacccugagcaaggaccagcucuccggcauaaacaauaucgcauucucaaacugaggacuaguggaagcauuuuccuggcugauuaaaagaaauuacucagcuauggucaucuguuccuguuagaaggcuaugcagcauauuauauacuaugcgcauguuaugaaaugcauaauaaaaaauuuuaaaaaaucuaaaagaucuaaaaaaaaaaaaaaaaaaaaaaaaaaaaaaaaaaaaaaaaaaaaaaaaaaaaaaaaaaaaaaaaugcaucccccccccccccccccccccccccccccccaaaggcucuuuucagagccaccagaauu

SEQ ID NO: 4817 - RNA, 1973 nt, Artificial Sequence
  mRNA product Design f-2 comprising derived and/or modified sequence from HRSV(A2)__F_DSCav1_mut4 (opt4)
gggagagcggcucggccauuuugucccagucaguccggaggcugcggcugcagaaguaccgccugcggaguaacugcaaagaagcuuaccauggagcugcugauccugaaggccaacgccaucaccaccauccugaccgccgugaccuucugcuucgccagcggccagaacaucaccgaggaguucuaccagagcaccugcagcgccgugagcaagggcuaccugagcgcccugagaaccggcugguacaccagcgugaucaccaucgagcugagcaacaucaaggagaacaagugcaacggcaccgacgccaaggugaagcugaucaagcaggagcuggacaaguacaagaacgccgugaccgagcugcagcugcugaugcagagcacccccgccaccggcagcggcagcgccaucugcagcggcguggccgugugcaaggugcugcaccuggagggcgaggugaacaagaucaagagcgcccugcugagcaccaacaaggccguggugagccugagcaacggcgugagcgugcugaccuucaaggugcuggaccugaagaacuacaucgacaagcagcugcugcccauccugaacaagcagagcugcagcaucagcaacaucgagaccgugaucgaguuccagcagaagaacaacagacugcuggagaucaccagagaguucagcgugaacgccggcgugaccacccccgugagcaccuacaugcugaccaacagcgagcugcugagccugaucaacgacaugcccaucaccaacgaccagaagaagcugaugagcaacaacgugcagaucgugagacagcagagcuacagcaucaugugcaucaucaaggaggaggugcuggccuacguggugcagcugccccuguacggcgugaucgacacccccugcuggaagcugcacaccagcccccugugcaccaccaacaccaaggagggcagcaacaucugccugaccagaaccgacagaggcugguacugcgacaacgccggcagcgugagcuucuucccccaggccgagaccugcaaggugcagagcaacagaguguucugcgacaccaugaacagcagaacccugcccagcgaggugaaccugugcaacguggacaucuucaaccccaaguacgacugcaagaucaugaccagcaagaccgacgugagcagcagcgugaucaccagccugggcgccaucgugagcugcuacggcaagaccaagugcaccgccagcaacaagaacagaggcaucaucaagaccuucagcaacggcugcgacuacgugagcaacaagggcguggacaccgugagcgugggcaacacccuguacugcgugaacaagcaggagggcaagagccuguacgugaagggcgagcccaucaucaacuucuacgacccccugguguuccccagcgacgaguucgacgccagcaucagccaggugaacgagaagaucaaccagagccuggccuucaucagaaagagcgacgagcugcugcacaacgugaacgccggcaagagcaccaccaacaucaugaucaccaccaucaucaucgugaucaucgugauccugcugagccugaucgccgugggccugcugcuguacugcaaggccagaagcacccccgugacccugagcaaggaccagcugagcggcaucaacaacaucgccuucagcaacugaggacuaguggaagcauuuuccuggcugauuaaaagaaauuacucagcuauggucaucuguuccuguuagaaggcuaugcagcauauuauauacuaugcgcauguuaugaaaugcauaauaaaaaauuuuaaaaaaucuaaaagaucuaaaaaaaaaaaaaaaaaaaaaaaaaaaaaaaaaaaaaaaaaaaaaaaaaaaaaaaaaaaaaaaaugcaucccccccccccccccccccccccccccccccaaaggcucuuuucagagccaccagaauu

SEQ ID NO: 4818 - RNA, 1973 nt, Artificial Sequence
  mRNA product Design f-2 comprising derived and/or modified sequence from HRSV(A2)__F_DSCav1_mut4 (opt5)
gggagagcggcucggccauuuugucccagucaguccggaggcugcggcugcagaaguaccgccugcggaguaacugcaaagaagcuuaccauggagcugcucauccugaaggccaacgcuauuaccacaauccuuacggccgugaccuucugcuuugcgagcggccagaauauuacagaagaguucuaccaauccaccuguucugcugucagcaaaggguaucuguccgcccucagaacaggaugguacaccucuguuaucacaauugaacugagcaacaucaaggagaauaaaugcaacggcaccgacgccaaggugaaacuuaucaagcaggaacuggauaaguauaaaaaugcugugacggagcuccagcugcugaugcaguccacccccgccacagggucuggaagcgcuauuuguuccggcgucgccgugugcaagguucuccaccuggagggggaagugaacaaaaucaagagcgcgcuucugucuaccaauaaagccgucgugucccucagcaacggaguuucugugcugacauuuaagguccuugaccugaagaauuacauugauaaacaacuccugccuauccugaacaagcaguccuguagcauuucuaauaucgagaccgugauugaguuccagcagaaaaacaaucggcuccuggaaaucacgcgcgaguuuuccgugaacgcuggcgucacaaccccgguuagcacauauaugcuuaccaauuccgaacugcucucucugaucaacgacaugcccauuaccaacgaucaaaagaaacuuaugagcaauaacgugcagaucgugagacagcaguccuacagcauuaugugcaucauuaaggaggaaguccuggccuaugugguucaacucccucuguacggcgugaucgacacacccuguuggaaacugcauacgucuccucucugcaccacaaauaccaaggagggguccaacaucugucugacacggaccgaucgcggaugguacugcgacaaugcuggcagcgucucuuucuuuccccaggccgaaacguguaaggugcagagcaacagaguuuucugcgauacaaugaacuccagaacccugccuucugaggugaaucucugcaaugucgacauuuuuaacccgaaauaugauuguaagaucaugaccagcaaaacagacguguccagcucugucauuaccucccugggggcgaucgugagcugcuacggaaagacaaaauguacggccucuaauaagaaccggggcauuaucaagaccuucuccaaugggugcgauuauguuagcaacaaaggaguggacacagucuccgugggcaauacccuuuacuguguuaacaagcaagagggcaaaucucuguaugugaagggggaacccaucauuaacuuuuacgacccucucgucuuccccagcgaugaguuugacgcuuccaucucucaggugaaugagaaaauuaaccagagccuggccuucauccgcaaguccgaugaacugcuccacaaugugaacgcuggaaagagcacaaccaauauuaugaucacgaccauuaucaucguuauuaucgucauucugcuuucucugaucgccgugggccuccugcuguauugcaaagccagauccacaccugugacccuuagcaaggaccagcucucugggauuaacaauaucgcuuucuccaacugaggacuaguggaagcauuuuccuggcugauuaaaagaaauuacucagcuauggucaucuguuccuguuagaaggcuaugcagcauauuauauacuaugcgcauguuaugaaaugcauaauaaaaaauuuuaaaaaaucuaaaagaucuaaaaaaaaaaaaaaaaaaaaaaaaaaaaaaaaaaaaaaaaaaaaaaaaaaaaaaaaaaaaaaaaugcaucccccccccccccccccccccccccccccccaaaggcucuuuucagagccaccagaauu

SEQ ID NO: 4819 - RNA, 1973 nt, Artificial Sequence
  mRNA product Design f-2 comprising derived and/or modified sequence from HRSV(A2)__F_DSCav1_mut4 (opt6)
gggagagcggcucggccauuuugucccagucaguccggaggcugcggcugcagaaguaccgccugcggaguaacugcaaagaagcuuaccauggaacuucuaauacucaaagccaacgcaauaacaacaauauuaacagccguaacauuuugcuucgcaucaggucaaaacauaacagaagaguucuaccaauccacaugcucagcaguaucaaaaggauauuuaagugcucuaagaacaggaugguacacauccguaauaacaaucgaacuaucaaacauaaaagaaaauaaauguaauggaacagacgccaaaguaaaauuaaucaaacaagaacuagacaaauacaaaaacgcaguuacugaauuacaauuauuaaugcaaucaacaccggccacaggaucuggaucagcaauaugcucaggaguagcagucugcaaaguauuacaccuagaaggggaaguuaauaaaaucaaaucagcauuacuauccaccaacaaagcgguaguuucacucuccaacggcguaucugucuuaacauucaaaguauuagaccuaaaaaacuacauugacaaacaacuacuaccaauccuaaacaaacaaucauguuccauaagcaauauagaaacaguaauagaauuucaacaaaaaaacaacagacuauuagaaauaacaagagaauuuuccgucaaugcaggaguuacuaccccugucuccaccuauaugcuaaccaauuccgaacucuuaucauuaauaaacgacaugccuaucacaaaugaccaaaaaaaauuaaugagcaacaacguacaaauaguacgacaacaaucauacucaaucaugugcauaauaaaagaagaaguccuagcauacguuguacaacuaccacuauacggagucauagauaccccaugcuggaaacuccauacaagcccacuaugcacuacaaacacaaaagaaggcucuaauauaugucuaacaagaacagaccgaggaugguacugcgauaaugccggcucagucucauucuuuccgcaagccgaaacuuguaaaguacaaaguaacagaguauuuugugacaccaugaacucaagaacccucccaagcgaagucaaucuaugcaacguugauauauucaaucccaaauacgacugcaaaaucaugaccucaaaaacagacgucagcucauccguuauaacaucacuaggagccaucguaucuugcuauggaaaaacaaaaugcacagcaagcaauaaaaacagaggcauaauaaaaacauucucaaauggaugcgacuacguaucaaacaaaggagucgacacaguuuccguaggaaacacuuuauacugcguaaacaaacaagaaggaaaaucauuauacgucaaaggugaaccaauaauaaacuucuacgauccacuuguauucccaucagacgaauuugacgcaucaauuucacaaguaaacgaaaaaauaaaccaaucacucgcauucauaagaaaaucagaugaacuacuacauaacguaaacgcaggaaaauccacaacaaacaucaugauaacaaccaucauaaucguaauaaucguaauacuauuaucccuaauugcaguaggauuacucuuauauugcaaagcaagaucaacaccaguaacccucaguaaagaccaacuauccggaauaaauaacaucgcauucucaaacuaaggacuaguggaagcauuuuccuggcugauuaaaagaaauuacucagcuauggucaucuguuccuguuagaaggcuaugcagcauauuauauacuaugcgcauguuaugaaaugcauaauaaaaaauuuuaaaaaaucuaaaagaucuaaaaaaaaaaaaaaaaaaaaaaaaaaaaaaaaaaaaaaaaaaaaaaaaaaaaaaaaaaaaaaaaugcaucccccccccccccccccccccccccccccccaaaggcucuuuucagagccaccagaauu

SEQ ID NO: 4820 - RNA, 1973 nt, Artificial Sequence
  mRNA product Design f-2 comprising derived and/or modified sequence from HRSV(A2)__F_DSCav1_mut4 (opt11)
gggagagcggcucggccauuuugucccagucaguccggaggcugcggcugcagaaguaccgccugcggaguaacugcaaagaagcuuaccauggaacugcucauccucaaagccaacgccaucaccaccauucuuaccgccgucacauucugcuucgccucaggccaaaacaucaccgaagaauuuuaccaauccacuuguucagccgucucaaaaggauaccuaucagcccuccguaccggcugguacaccucggucauaacaauagaacucuccaacauaaaagaaaacaaaugcaacggcaccgacgccaaggucaaacugauaaaacaagaacuugauaaauacaaaaacgccgucacugaacuccaacuccucaugcaauccacucccgcuacuggcucuggcuccgccaucugcucuggcgucgccgucuguaaaguacuccaccucgaaggggaagucaacaaaaucaaaucagcccuccuuagcaccaacaaggccgucgucucccucucaaacggagucagcguccucaccuucaagguccucgaccucaagaacuacaucgacaaacaacuccugcccauccuaaauaaacaauccugcucuaucuccaauaucgaaaccguuauagaguuccaacagaaaaacaaccgacuccucgaaaucacccgcgaguucuccgucaacgcaggcgucaccaccccugugucaaccuacaugcucaccaacagcgaacuacucucacucaucaaugacaugcccaucaccaacgaccaaaagaaacucauguccaacaacguccaaaucguacgucaacaauccuacagcaucaugugcaucauaaaagaagaaguccucgccuacgucguccaacuuccccucuacggcgucauagacacccccugcuggaaacugcauaccucaccccuaugcaccaccaacacuaaagaaggcuccaacaucugccucacccgcacggaccgcggcugguacugcgacaacgccggcuccgucuccuucuucccccaagccgaaacuuguaaaguccaauccaacagagucuucugcgacaccaugaacucuagaacgcugccauccgagguaaaccuaugcaacgucgacaucuucaaucccaaauacgacugcaagaucaugaccucaaaaaccgacguauccuccucaguaaucaccagucucggagcuaucgucuccugcuacggcaaaaccaaaugcacggccucuaacaaaaaccgcggcaucaucaaaaccuucucaaacggaugcgacuacgucagcaacaaaggcguagauaccgucucugucggcaacacacuguacugcguaaacaagcaagaaggaaaaucccucuacguaaaaggcgaacccaucaucaacuucuacgacccccucguuuuccccucagaugaauuugacgccucgauaucacaagucaacgaaaagauaaaucagucccucgccuucauccgaaaauccgacgaacuccuccacaacguuaacgcaggaaaguccaccacaaacaucaugauaacuacaaucauaauagucauuaucgucauacuccucucccuaaucgccguaggccugcuacucuacugcaaagcccgcucaacccccgucacucucucaaaagaccaacucuccggcaucaauaacaucgccuucucaaacuaaggacuaguggaagcauuuuccuggcugauuaaaagaaauuacucagcuauggucaucuguuccuguuagaaggcuaugcagcauauuauauacuaugcgcauguuaugaaaugcauaauaaaaaauuuuaaaaaaucuaaaagaucuaaaaaaaaaaaaaaaaaaaaaaaaaaaaaaaaaaaaaaaaaaaaaaaaaaaaaaaaaaaaaaaaugcaucccccccccccccccccccccccccccccccaaaggcucuuuucagagccaccagaauu

SEQ ID NO: 4821 - RNA, 1964 nt, Artificial Sequence
  mRNA product Design f-3 comprising derived and/or modified sequence from HRSV(A2)__F_DSCav1_mut4 (opt1)
gggagagucccgcagucggcguccagcggcucugcuuguucgugugugugucguugcaggccuuauucaagcuuaccauggagcugcucauccugaaggccaacgccaucaccaccauccugacggcggugaccuucugcuucgccagcggccagaacaucaccgaggaguucuaccaguccacgugcagcgccgucuccaagggguaccucagcgcccugcggaccggcugguacaccuccgugaucaccaucgagcugagcaacaucaaggagaacaagugcaacgggaccgacgccaaggugaagcucaucaagcaggagcuggacaaguacaagaacgcggucacggagcugcagcuccugaugcaguccaccccggcaaccggcuccggcuccgccaucugcagcggcgucgccgugugcaaggugcugcaccucgagggggaggucaacaagaucaagagcgcccugcuguccaccaacaaggccguggugagccucuccaacggcgucagcgugcugaccuucaaggugcuggaccucaagaacuacaucgacaagcagcugcugcccauccugaacaagcagagcugcuccaucagcaacaucgagacggugaucgaguuccagcagaagaacaaccggcuccuggagaucacccgcgaguucagcgugaacgccggggucaccacccccguguccacguacaugcugaccaacagcgagcuccugucccugaucaacgacaugccgaucaccaacgaccagaagaagcucaugagcaacaacgugcagaucguccggcagcaguccuacagcaucaugugcaucaucaaggaggaggugcuggcguacgugguccagcugccccucuacggcgugaucgacacccccugcuggaagcugcacacgagcccccugugcaccaccaacaccaaggagggguccaacaucugccucacgcgcaccgaccggggcugguacugcgacaacgccggcagcgucuccuucuucccgcaggccgagaccugcaaggugcagagcaaccgcguguucugcgacaccaugaacucccggacgcugcccagcgagguaaaccucugcaacgucgacaucuucaaccccaaguacgacugcaagaucaugaccuccaagaccgacgugagcuccagcgugaucaccucccugggggccaucgucagcugcuacggcaagacgaagugcaccgccagcaacaagaaccgggggaucaucaagaccuucuccaacggcugcgacuacgugagcaacaagggcguggacaccguguccgucgggaacacccuguacugcgugaacaagcaggagggcaagagccucuacgugaagggggagcccaucaucaacuucuacgacccgcuggucuuccccuccgacgaguucgacgcgagcaucucccaggugaacgagaagaucaaccagagccuggccuucauccgcaaguccgacgagcugcuccacaacgugaacgccggcaagagcacgaccaacaucaugaucaccaccaucaucaucgucaucaucgugauccugcugucccucaucgccguggggcugcugcucuacugcaaggcccggagcacgcccgucacccuguccaaggaccagcugagcggcaucaacaacaucgcguucuccaacugaggacuaguacuggcugcaucucccuuuccucuguccuccauccuucucccaggauggugaagggggaccugguacccagugauccccaccccaggauccuaaaucaugacuuaccugcuaauaaaaacucauuggaaaagugagaagaucuaaaaaaaaaaaaaaaaaaaaaaaaaaaaaaaaaaaaaaaaaaaaaaaaaaaaaaaaaaaaaaaaugcaucccccccccccccccccccccccccccccccaaaggcucuuuucagagccaccagaauu

SEQ ID NO: 4822 - RNA, 1964 nt, Artificial Sequence
  mRNA product Design f-3 comprising derived and/or modified sequence from HRSV(A2)__F_DSCav1_mut4 (opt1)
gggagagucccgcagucggcguccagcggcucugcuuguucgugugugugucguugcaggccuuauucaagcuuaccauggagcugcucauccugaaggccaacgccaucaccaccauccugacggcggugaccuucugcuucgccagcggccagaacaucaccgaggaguucuaccaguccacgugcagcgccgucuccaagggguaccucagcgcccugcgcaccggcugguacaccuccgugaucaccaucgagcugagcaacaucaaggagaacaagugcaacgggaccgacgccaaggugaagcucaucaagcaggagcuggacaaguacaagaacgcggucacggagcugcagcuccugaugcaguccacccccgccaccggcagcggguccgccaucugcagcggcguggccgugugcaagguccugcaccucgagggcgaggugaacaagaucaaguccgcgcugcugagcaccaacaaggccguggucucccucagcaacgggguguccgugcugacguucaagguccuggaccucaagaacuacaucgacaagcagcugcugccgauccucaacaagcagagcugcuccaucagcaacaucgagaccgugaucgaguuccagcagaagaacaaccggcugcuggagaucacccgcgaguucuccgugaacgccggcgucaccacgcccgugagcaccuacaugcucaccaacagcgagcugcugucccucaucaacgacaugcccaucaccaacgaccagaagaagcugaugagcaacaacgugcagaucguccggcagcaguccuacagcaucaugugcaucaucaaggaggaggugcuggccuacgugguccagcucccccuguacggggugaucgacacgccgugcuggaagcugcacaccagcccccucugcaccaccaacacgaaggagggcuccaacaucugccugacccgcaccgaccgggggugguacugcgacaacgccggcuccgugagcuucuucccccaggcggagaccugcaagguccaguccaaccgcguguucugcgacacgaugaacagccggacccuccccuccgaggucaaccugugcaacguggacaucuucaacccgaaguacgacugcaagaucaugaccagcaagaccgacguguccagcuccgucaucacgagccugggcgccaucguguccugcuacgggaagaccaagugcaccgccagcaacaagaaccggggcaucaucaagaccuucuccaacgggugcgacuacgugagcaacaagggcgucgacacggugagcgugggcaacacccucuacugcgucaacaagcaggaggggaagucccuguacgugaagggcgagcccaucaucaacuucuacgacccccugguguuccccagcgacgaguucgacgccuccaucagccaggucaacgagaagaucaaccagucccucgccuucauccgcaagagcgacgagcugcugcacaacgugaacgcggggaaguccaccaccaacaucaugaucaccacgaucaucaucgugaucaucgucauccuccugagccugaucgccgugggccuccugcuguacugcaaggcccgguccaccccggugacccugagcaaggaccagcucuccgggaucaacaacaucgccuucagcaacugaggacuaguacuggcugcaucucccuuuccucuguccuccauccuucucccaggauggugaagggggaccugguacccagugauccccaccccaggauccuaaaucaugacuuaccugcuaauaaaaacucauuggaaaagugagaagaucuaaaaaaaaaaaaaaaaaaaaaaaaaaaaaaaaaaaaaaaaaaaaaaaaaaaaaaaaaaaaaaaaugcaucccccccccccccccccccccccccccccccaaaggcucuuuucagagccaccagaauu

SEQ ID NO: 4823 - RNA, 1964 nt, Artificial Sequence
  mRNA product Design f-3 comprising derived and/or modified sequence from HRSV(A2)__F_DSCav1_mut4 (opt2)
gggagagucccgcagucggcguccagcggcucugcuuguucgugugugugucguugcaggccuuauucaagcuuaccauggagcuccucauccucaaggccaacgccaucaccaccauccucaccgccgucaccuucugcuucgccuccggccagaacaucaccgaggaguucuaccaguccaccugcuccgccgucuccaagggcuaccucuccgcccuccgcaccggcugguacaccuccgucaucaccaucgagcucuccaacaucaaggagaacaagugcaacggcaccgacgccaaggucaagcucaucaagcaggagcucgacaaguacaagaacgccgucaccgagcuccagcuccucaugcaguccacccccgccaccggcuccggcuccgccaucugcuccggcgucgccgucugcaagguccuccaccucgagggcgaggucaacaagaucaaguccgcccuccucuccaccaacaaggccgucgucucccucuccaacggcgucuccguccucaccuucaagguccucgaccucaagaacuacaucgacaagcagcuccuccccauccucaacaagcaguccugcuccaucuccaacaucgagaccgucaucgaguuccagcagaagaacaaccgccuccucgagaucacccgcgaguucuccgucaacgccggcgucaccacccccgucuccaccuacaugcucaccaacuccgagcuccucucccucaucaacgacaugcccaucaccaacgaccagaagaagcucauguccaacaacguccagaucguccgccagcaguccuacuccaucaugugcaucaucaaggaggagguccucgccuacgucguccagcucccccucuacggcgucaucgacacccccugcuggaagcuccacaccuccccccucugcaccaccaacaccaaggagggcuccaacaucugccucacccgcaccgaccgcggcugguacugcgacaacgccggcuccgucuccuucuucccccaggccgagaccugcaagguccaguccaaccgcgucuucugcgacaccaugaacucccgcacccuccccuccgaggucaaccucugcaacgucgacaucuucaaccccaaguacgacugcaagaucaugaccuccaagaccgacgucuccuccuccgucaucaccucccucggcgccaucgucuccugcuacggcaagaccaagugcaccgccuccaacaagaaccgcggcaucaucaagaccuucuccaacggcugcgacuacgucuccaacaagggcgucgacaccgucuccgucggcaacacccucuacugcgucaacaagcaggagggcaagucccucuacgucaagggcgagcccaucaucaacuucuacgacccccucgucuuccccuccgacgaguucgacgccuccaucucccaggucaacgagaagaucaaccagucccucgccuucauccgcaaguccgacgagcuccuccacaacgucaacgccggcaaguccaccaccaacaucaugaucaccaccaucaucaucgucaucaucgucauccuccucucccucaucgccgucggccuccuccucuacugcaaggcccgcuccacccccgucacccucuccaaggaccagcucuccggcaucaacaacaucgccuucuccaacugaggacuaguacuggcugcaucucccuuuccucuguccuccauccuucucccaggauggugaagggggaccugguacccagugauccccaccccaggauccuaaaucaugacuuaccugcuaauaaaaacucauuggaaaagugagaagaucuaaaaaaaaaaaaaaaaaaaaaaaaaaaaaaaaaaaaaaaaaaaaaaaaaaaaaaaaaaaaaaaaugcaucccccccccccccccccccccccccccccccaaaggcucuuuucagagccaccagaauu

SEQ ID NO: 4824 - RNA, 1964 nt, Artificial Sequence
  mRNA product Design f-3 comprising derived and/or modified sequence from HRSV(A2)__F_DSCav1_mut4 (opt3)
gggagagucccgcagucggcguccagcggcucugcuuguucgugugugugucguugcaggccuuauucaagcuuaccauggagcugcucauccuuaaggccaacgcuauuaccacaauacugacugcagugacguucugcuuugccagcggccagaauaucaccgaagaguucuaccaauccacauguucugcggucucaaaaggguauuugagugcuuuaagaacuggaugguacaccagcguuauuacaaucgaacuguccaacauuaaggagaauaaaugcaacgguaccgacgccaaggugaaacuaaucaagcaggaacucgauaaguauaaaaaugcaguaacugagcugcagcuucugaugcagucuacacccgccaccggcucggggucagcuauauguagcggaguggcagucugcaagguguugcaccucgagggcgaaguuaacaaaaucaagagugcccugcuguccacgaauaaagcuguggucucucucagcaacgguguguccguauuaacuuuuaagguucuggaccuuaagaauuacauugauaaacaauugcugccuauccuaaacaagcagucauguaguauuagcaauaucgagaccgugauagaguuccagcagaaaaacaauaggcuccuggaaauuacacgggaguuuucugucaacgccggggugacuaccccaguguccacauauaugcuuaccaauucagaacuguugagccucaucaacgacaugccgauuacgaacgaucaaaagaaacugaugaguaauaacguccagaucguucgccagcagucuuacuccaucaugugcauuauaaaggaggaaguguuagcguauguagugcaacugccccucuacggagucaucgacacuccuuguuggaaacuucauacaagcccacugugcaccacuaauacaaaggagggcucgaacauuuguuugacccgaacggaucguggcugguacugcgacaaugcagggucuguguccuucuuuccccaggccgaaaccuguaagguucagucaaacagaguguucugcgauacaaugaauaguagaacucugccuagcgaggucaaccucugcaauguggacaucuuuaacccaaaauaugauuguaagauaaugaccuccaaaacagacguaucuagcucaguuauuaccagucugggagcuaucguguccugcuacgguaagacuaaauguacagccagcaauaagaacaggggcaucauuaagaccuucucuaaugggugcgauuaugucucaaacaaaggaguggacacugucagugugggcaauacgcuuuacuguguuaacaagcaagaggguaaaagccuguaugugaagggggaacccaucauuaacuuuuacgacccuuugguauucccauccgaugaguuugacgcaucuauaucgcaggucaaugagaaaaucaaccagagccucgcuuucauucggaaguccgaugaacuguuacacaaugugaacgccggaaagucaacaaccaauaucaugaucacuaccauuauaaucguuauuaucgugauucugcuaagucucaucgcggucggccugcuuuuguauugcaaagcccgcucuacaccggugacccugagcaaggaccagcucuccggcauaaacaauaucgcauucucaaacugaggacuaguacuggcugcaucucccuuuccucuguccuccauccuucucccaggauggugaagggggaccugguacccagugauccccaccccaggauccuaaaucaugacuuaccugcuaauaaaaacucauuggaaaagugagaagaucuaaaaaaaaaaaaaaaaaaaaaaaaaaaaaaaaaaaaaaaaaaaaaaaaaaaaaaaaaaaaaaaaugcaucccccccccccccccccccccccccccccccaaaggcucuuuucagagccaccagaauu

SEQ ID NO: 4825 - RNA, 1964 nt, Artificial Sequence
  mRNA product Design f-3 comprising derived and/or modified sequence from HRSV(A2)__F_DSCav1_mut4 (opt4)
gggagagucccgcagucggcguccagcggcucugcuuguucgugugugugucguugcaggccuuauucaagcuuaccauggagcugcugauccugaaggccaacgccaucaccaccauccugaccgccgugaccuucugcuucgccagcggccagaacaucaccgaggaguucuaccagagcaccugcagcgccgugagcaagggcuaccugagcgcccugagaaccggcugguacaccagcgugaucaccaucgagcugagcaacaucaaggagaacaagugcaacggcaccgacgccaaggugaagcugaucaagcaggagcuggacaaguacaagaacgccgugaccgagcugcagcugcugaugcagagcacccccgccaccggcagcggcagcgccaucugcagcggcguggccgugugcaaggugcugcaccuggagggcgaggugaacaagaucaagagcgcccugcugagcaccaacaaggccguggugagccugagcaacggcgugagcgugcugaccuucaaggugcuggaccugaagaacuacaucgacaagcagcugcugcccauccugaacaagcagagcugcagcaucagcaacaucgagaccgugaucgaguuccagcagaagaacaacagacugcuggagaucaccagagaguucagcgugaacgccggcgugaccacccccgugagcaccuacaugcugaccaacagcgagcugcugagccugaucaacgacaugcccaucaccaacgaccagaagaagcugaugagcaacaacgugcagaucgugagacagcagagcuacagcaucaugugcaucaucaaggaggaggugcuggccuacguggugcagcugccccuguacggcgugaucgacacccccugcuggaagcugcacaccagcccccugugcaccaccaacaccaaggagggcagcaacaucugccugaccagaaccgacagaggcugguacugcgacaacgccggcagcgugagcuucuucccccaggccgagaccugcaaggugcagagcaacagaguguucugcgacaccaugaacagcagaacccugcccagcgaggugaaccugugcaacguggacaucuucaaccccaaguacgacugcaagaucaugaccagcaagaccgacgugagcagcagcgugaucaccagccugggcgccaucgugagcugcuacggcaagaccaagugcaccgccagcaacaagaacagaggcaucaucaagaccuucagcaacggcugcgacuacgugagcaacaagggcguggacaccgugagcgugggcaacacccuguacugcgugaacaagcaggagggcaagagccuguacgugaagggcgagcccaucaucaacuucuacgacccccugguguuccccagcgacgaguucgacgccagcaucagccaggugaacgagaagaucaaccagagccuggccuucaucagaaagagcgacgagcugcugcacaacgugaacgccggcaagagcaccaccaacaucaugaucaccaccaucaucaucgugaucaucgugauccugcugagccugaucgccgugggccugcugcuguacugcaaggccagaagcacccccgugacccugagcaaggaccagcugagcggcaucaacaacaucgccuucagcaacugaggacuaguacuggcugcaucucccuuuccucuguccuccauccuucucccaggauggugaagggggaccugguacccagugauccccaccccaggauccuaaaucaugacuuaccugcuaauaaaaacucauuggaaaagugagaagaucuaaaaaaaaaaaaaaaaaaaaaaaaaaaaaaaaaaaaaaaaaaaaaaaaaaaaaaaaaaaaaaaaugcaucccccccccccccccccccccccccccccccaaaggcucuuuucagagccaccagaauu

SEQ ID NO: 4826 - RNA, 1964 nt, Artificial Sequence
  mRNA product Design f-3 comprising derived and/or modified sequence from HRSV(A2)__F_DSCav1_mut4 (opt5)
gggagagucccgcagucggcguccagcggcucugcuuguucgugugugugucguugcaggccuuauucaagcuuaccauggagcugcucauccugaaggccaacgcuauuaccacaauccuuacggccgugaccuucugcuuugcgagcggccagaauauuacagaagaguucuaccaauccaccuguucugcugucagcaaaggguaucuguccgcccucagaacaggaugguacaccucuguuaucacaauugaacugagcaacaucaaggagaauaaaugcaacggcaccgacgccaaggugaaacuuaucaagcaggaacuggauaaguauaaaaaugcugugacggagcuccagcugcugaugcaguccacccccgccacagggucuggaagcgcuauuuguuccggcgucgccgugugcaagguucuccaccuggagggggaagugaacaaaaucaagagcgcgcuucugucuaccaauaaagccgucgugucccucagcaacggaguuucugugcugacauuuaagguccuugaccugaagaauuacauugauaaacaacuccugccuauccugaacaagcaguccuguagcauuucuaauaucgagaccgugauugaguuccagcagaaaaacaaucggcuccuggaaaucacgcgcgaguuuuccgugaacgcuggcgucacaaccccgguuagcacauauaugcuuaccaauuccgaacugcucucucugaucaacgacaugcccauuaccaacgaucaaaagaaacuuaugagcaauaacgugcagaucgugagacagcaguccuacagcauuaugugcaucauuaaggaggaaguccuggccuaugugguucaacucccucuguacggcgugaucgacacacccuguuggaaacugcauacgucuccucucugcaccacaaauaccaaggagggguccaacaucugucugacacggaccgaucgcggaugguacugcgacaaugcuggcagcgucucuuucuuuccccaggccgaaacguguaaggugcagagcaacagaguuuucugcgauacaaugaacuccagaacccugccuucugaggugaaucucugcaaugucgacauuuuuaacccgaaauaugauuguaagaucaugaccagcaaaacagacguguccagcucugucauuaccucccugggggcgaucgugagcugcuacggaaagacaaaauguacggccucuaauaagaaccggggcauuaucaagaccuucuccaaugggugcgauuauguuagcaacaaaggaguggacacagucuccgugggcaauacccuuuacuguguuaacaagcaagagggcaaaucucuguaugugaagggggaacccaucauuaacuuuuacgacccucucgucuuccccagcgaugaguuugacgcuuccaucucucaggugaaugagaaaauuaaccagagccuggccuucauccgcaaguccgaugaacugcuccacaaugugaacgcuggaaagagcacaaccaauauuaugaucacgaccauuaucaucguuauuaucgucauucugcuuucucugaucgccgugggccuccugcuguauugcaaagccagauccacaccugugacccuuagcaaggaccagcucucugggauuaacaauaucgcuuucuccaacugaggacuaguacuggcugcaucucccuuuccucuguccuccauccuucucccaggauggugaagggggaccugguacccagugauccccaccccaggauccuaaaucaugacuuaccugcuaauaaaaacucauuggaaaagugagaagaucuaaaaaaaaaaaaaaaaaaaaaaaaaaaaaaaaaaaaaaaaaaaaaaaaaaaaaaaaaaaaaaaaugcaucccccccccccccccccccccccccccccccaaaggcucuuuucagagccaccagaauu

SEQ ID NO: 4827 - RNA, 1964 nt, Artificial Sequence
  mRNA product Design f-3 comprising derived and/or modified sequence from HRSV(A2)__F_DSCav1_mut4 (opt6)
gggagagucccgcagucggcguccagcggcucugcuuguucgugugugugucguugcaggccuuauucaagcuuaccauggaacuucuaauacucaaagccaacgcaauaacaacaauauuaacagccguaacauuuugcuucgcaucaggucaaaacauaacagaagaguucuaccaauccacaugcucagcaguaucaaaaggauauuuaagugcucuaagaacaggaugguacacauccguaauaacaaucgaacuaucaaacauaaaagaaaauaaauguaauggaacagacgccaaaguaaaauuaaucaaacaagaacuagacaaauacaaaaacgcaguuacugaauuacaauuauuaaugcaaucaacaccggccacaggaucuggaucagcaauaugcucaggaguagcagucugcaaaguauuacaccuagaaggggaaguuaauaaaaucaaaucagcauuacuauccaccaacaaagcgguaguuucacucuccaacggcguaucugucuuaacauucaaaguauuagaccuaaaaaacuacauugacaaacaacuacuaccaauccuaaacaaacaaucauguuccauaagcaauauagaaacaguaauagaauuucaacaaaaaaacaacagacuauuagaaauaacaagagaauuuuccgucaaugcaggaguuacuaccccugucuccaccuauaugcuaaccaauuccgaacucuuaucauuaauaaacgacaugccuaucacaaaugaccaaaaaaaauuaaugagcaacaacguacaaauaguacgacaacaaucauacucaaucaugugcauaauaaaagaagaaguccuagcauacguuguacaacuaccacuauacggagucauagauaccccaugcuggaaacuccauacaagcccacuaugcacuacaaacacaaaagaaggcucuaauauaugucuaacaagaacagaccgaggaugguacugcgauaaugccggcucagucucauucuuuccgcaagccgaaacuuguaaaguacaaaguaacagaguauuuugugacaccaugaacucaagaacccucccaagcgaagucaaucuaugcaacguugauauauucaaucccaaauacgacugcaaaaucaugaccucaaaaacagacgucagcucauccguuauaacaucacuaggagccaucguaucuugcuauggaaaaacaaaaugcacagcaagcaauaaaaacagaggcauaauaaaaacauucucaaauggaugcgacuacguaucaaacaaaggagucgacacaguuuccguaggaaacacuuuauacugcguaaacaaacaagaaggaaaaucauuauacgucaaaggugaaccaauaauaaacuucuacgauccacuuguauucccaucagacgaauuugacgcaucaauuucacaaguaaacgaaaaaauaaaccaaucacucgcauucauaagaaaaucagaugaacuacuacauaacguaaacgcaggaaaauccacaacaaacaucaugauaacaaccaucauaaucguaauaaucguaauacuauuaucccuaauugcaguaggauuacucuuauauugcaaagcaagaucaacaccaguaacccucaguaaagaccaacuauccggaauaaauaacaucgcauucucaaacuaaggacuaguacuggcugcaucucccuuuccucuguccuccauccuucucccaggauggugaagggggaccugguacccagugauccccaccccaggauccuaaaucaugacuuaccugcuaauaaaaacucauuggaaaagugagaagaucuaaaaaaaaaaaaaaaaaaaaaaaaaaaaaaaaaaaaaaaaaaaaaaaaaaaaaaaaaaaaaaaaugcaucccccccccccccccccccccccccccccccaaaggcucuuuucagagccaccagaauu

SEQ ID NO: 4828 - RNA, 1964 nt, Artificial Sequence
  mRNA product Design f-3 comprising derived and/or modified sequence from HRSV(A2)__F_DSCav1_mut4 (opt11)
gggagagucccgcagucggcguccagcggcucugcuuguucgugugugugucguugcaggccuuauucaagcuuaccauggaacugcucauccucaaagccaacgccaucaccaccauucuuaccgccgucacauucugcuucgccucaggccaaaacaucaccgaagaauuuuaccaauccacuuguucagccgucucaaaaggauaccuaucagcccuccguaccggcugguacaccucggucauaacaauagaacucuccaacauaaaagaaaacaaaugcaacggcaccgacgccaaggucaaacugauaaaacaagaacuugauaaauacaaaaacgccgucacugaacuccaacuccucaugcaauccacucccgcuacuggcucuggcuccgccaucugcucuggcgucgccgucuguaaaguacuccaccucgaaggggaagucaacaaaaucaaaucagcccuccuuagcaccaacaaggccgucgucucccucucaaacggagucagcguccucaccuucaagguccucgaccucaagaacuacaucgacaaacaacuccugcccauccuaaauaaacaauccugcucuaucuccaauaucgaaaccguuauagaguuccaacagaaaaacaaccgacuccucgaaaucacccgcgaguucuccgucaacgcaggcgucaccaccccugugucaaccuacaugcucaccaacagcgaacuacucucacucaucaaugacaugcccaucaccaacgaccaaaagaaacucauguccaacaacguccaaaucguacgucaacaauccuacagcaucaugugcaucauaaaagaagaaguccucgccuacgucguccaacuuccccucuacggcgucauagacacccccugcuggaaacugcauaccucaccccuaugcaccaccaacacuaaagaaggcuccaacaucugccucacccgcacggaccgcggcugguacugcgacaacgccggcuccgucuccuucuucccccaagccgaaacuuguaaaguccaauccaacagagucuucugcgacaccaugaacucuagaacgcugccauccgagguaaaccuaugcaacgucgacaucuucaaucccaaauacgacugcaagaucaugaccucaaaaaccgacguauccuccucaguaaucaccagucucggagcuaucgucuccugcuacggcaaaaccaaaugcacggccucuaacaaaaaccgcggcaucaucaaaaccuucucaaacggaugcgacuacgucagcaacaaaggcguagauaccgucucugucggcaacacacuguacugcguaaacaagcaagaaggaaaaucccucuacguaaaaggcgaacccaucaucaacuucuacgacccccucguuuuccccucagaugaauuugacgccucgauaucacaagucaacgaaaagauaaaucagucccucgccuucauccgaaaauccgacgaacuccuccacaacguuaacgcaggaaaguccaccacaaacaucaugauaacuacaaucauaauagucauuaucgucauacuccucucccuaaucgccguaggccugcuacucuacugcaaagcccgcucaacccccgucacucucucaaaagaccaacucuccggcaucaauaacaucgccuucucaaacuaaggacuaguacuggcugcaucucccuuuccucuguccuccauccuucucccaggauggugaagggggaccugguacccagugauccccaccccaggauccuaaaucaugacuuaccugcuaauaaaaacucauuggaaaagugagaagaucuaaaaaaaaaaaaaaaaaaaaaaaaaaaaaaaaaaaaaaaaaaaaaaaaaaaaaaaaaaaaaaaaugcaucccccccccccccccccccccccccccccccaaaggcucuuuucagagccaccagaauu

SEQ ID NO: 4829 - RNA, 2180 nt, Artificial Sequence
  mRNA product Design f-4 comprising derived and/or modified sequence from HRSV(A2)__F_DSCav1_mut4 (opt1)
gggagagucccgcagucggcguccagcggcucugcuuguucgugugugugucguugcaggccuuauucaagcuuaccauggagcugcucauccugaaggccaacgccaucaccaccauccugacggcggugaccuucugcuucgccagcggccagaacaucaccgaggaguucuaccaguccacgugcagcgccgucuccaagggguaccucagcgcccugcggaccggcugguacaccuccgugaucaccaucgagcugagcaacaucaaggagaacaagugcaacgggaccgacgccaaggugaagcucaucaagcaggagcuggacaaguacaagaacgcggucacggagcugcagcuccugaugcaguccaccccggcaaccggcuccggcuccgccaucugcagcggcgucgccgugugcaaggugcugcaccucgagggggaggucaacaagaucaagagcgcccugcuguccaccaacaaggccguggugagccucuccaacggcgucagcgugcugaccuucaaggugcuggaccucaagaacuacaucgacaagcagcugcugcccauccugaacaagcagagcugcuccaucagcaacaucgagacggugaucgaguuccagcagaagaacaaccggcuccuggagaucacccgcgaguucagcgugaacgccggggucaccacccccguguccacguacaugcugaccaacagcgagcuccugucccugaucaacgacaugccgaucaccaacgaccagaagaagcucaugagcaacaacgugcagaucguccggcagcaguccuacagcaucaugugcaucaucaaggaggaggugcuggcguacgugguccagcugccccucuacggcgugaucgacacccccugcuggaagcugcacacgagcccccugugcaccaccaacaccaaggagggguccaacaucugccucacgcgcaccgaccggggcugguacugcgacaacgccggcagcgucuccuucuucccgcaggccgagaccugcaaggugcagagcaaccgcguguucugcgacaccaugaacucccggacgcugcccagcgagguaaaccucugcaacgucgacaucuucaaccccaaguacgacugcaagaucaugaccuccaagaccgacgugagcuccagcgugaucaccucccugggggccaucgucagcugcuacggcaagacgaagugcaccgccagcaacaagaaccgggggaucaucaagaccuucuccaacggcugcgacuacgugagcaacaagggcguggacaccguguccgucgggaacacccuguacugcgugaacaagcaggagggcaagagccucuacgugaagggggagcccaucaucaacuucuacgacccgcuggucuuccccuccgacgaguucgacgcgagcaucucccaggugaacgagaagaucaaccagagccuggccuucauccgcaaguccgacgagcugcuccacaacgugaacgccggcaagagcacgaccaacaucaugaucaccaccaucaucaucgucaucaucgugauccugcugucccucaucgccguggggcugcugcucuacugcaaggcccggagcacgcccgucacccuguccaaggaccagcugagcggcaucaacaacaucgcguucuccaacugaggacuagugaagggaacacccaaauuuaauucagccuuaagcacaauuaauuaagagugaaacguaauuguacaagcaguuggucacccaccauagggcaugaucaacaccgcaaccuuuccuuuuucccccagugauucugaaaaaccccucuucccuucagcuugcuuagauguuccaaauuuaguaagcuuaaggcggccuacagaagaaaaagaaaaaaaaggccacaaaaguucccucucacuuucaguaaauaaaauaaaagcagcaacagaaauaaagaaauaaaugaaauucaaaaugaaauaaauauuguguugugcagcauuaaaaaaucaauaaaaauuaaaaaugagcaagaucuaaaaaaaaaaaaaaaaaaaaaaaaaaaaaaaaaaaaaaaaaaaaaaaaaaaaaaaaaaaaaaaaugcaucccccccccccccccccccccccccccccccaaaggcucuuuucagagccaccagaauu

SEQ ID NO: 4830 - RNA, 2180 nt, Artificial Sequence
  mRNA product Design f-4 comprising derived and/or modified sequence from HRSV(A2)__F_DSCav1_mut4 (opt1)
gggagagucccgcagucggcguccagcggcucugcuuguucgugugugugucguugcaggccuuauucaagcuuaccauggagcugcucauccugaaggccaacgccaucaccaccauccugacggcggugaccuucugcuucgccagcggccagaacaucaccgaggaguucuaccaguccacgugcagcgccgucuccaagggguaccucagcgcccugcgcaccggcugguacaccuccgugaucaccaucgagcugagcaacaucaaggagaacaagugcaacgggaccgacgccaaggugaagcucaucaagcaggagcuggacaaguacaagaacgcggucacggagcugcagcuccugaugcaguccacccccgccaccggcagcggguccgccaucugcagcggcguggccgugugcaagguccugcaccucgagggcgaggugaacaagaucaaguccgcgcugcugagcaccaacaaggccguggucucccucagcaacgggguguccgugcugacguucaagguccuggaccucaagaacuacaucgacaagcagcugcugccgauccucaacaagcagagcugcuccaucagcaacaucgagaccgugaucgaguuccagcagaagaacaaccggcugcuggagaucacccgcgaguucuccgugaacgccggcgucaccacgcccgugagcaccuacaugcucaccaacagcgagcugcugucccucaucaacgacaugcccaucaccaacgaccagaagaagcugaugagcaacaacgugcagaucguccggcagcaguccuacagcaucaugugcaucaucaaggaggaggugcuggccuacgugguccagcucccccuguacggggugaucgacacgccgugcuggaagcugcacaccagcccccucugcaccaccaacacgaaggagggcuccaacaucugccugacccgcaccgaccgggggugguacugcgacaacgccggcuccgugagcuucuucccccaggcggagaccugcaagguccaguccaaccgcguguucugcgacacgaugaacagccggacccuccccuccgaggucaaccugugcaacguggacaucuucaacccgaaguacgacugcaagaucaugaccagcaagaccgacguguccagcuccgucaucacgagccugggcgccaucguguccugcuacgggaagaccaagugcaccgccagcaacaagaaccggggcaucaucaagaccuucuccaacgggugcgacuacgugagcaacaagggcgucgacacggugagcgugggcaacacccucuacugcgucaacaagcaggaggggaagucccuguacgugaagggcgagcccaucaucaacuucuacgacccccugguguuccccagcgacgaguucgacgccuccaucagccaggucaacgagaagaucaaccagucccucgccuucauccgcaagagcgacgagcugcugcacaacgugaacgcggggaaguccaccaccaacaucaugaucaccacgaucaucaucgugaucaucgucauccuccugagccugaucgccgugggccuccugcuguacugcaaggcccgguccaccccggugacccugagcaaggaccagcucuccgggaucaacaacaucgccuucagcaacugaggacuagugaagggaacacccaaauuuaauucagccuuaagcacaauuaauuaagagugaaacguaauuguacaagcaguuggucacccaccauagggcaugaucaacaccgcaaccuuuccuuuuucccccagugauucugaaaaaccccucuucccuucagcuugcuuagauguuccaaauuuaguaagcuuaaggcggccuacagaagaaaaagaaaaaaaaggccacaaaaguucccucucacuuucaguaaauaaaauaaaagcagcaacagaaauaaagaaauaaaugaaauucaaaaugaaauaaauauuguguugugcagcauuaaaaaaucaauaaaaauuaaaaaugagcaagaucuaaaaaaaaaaaaaaaaaaaaaaaaaaaaaaaaaaaaaaaaaaaaaaaaaaaaaaaaaaaaaaaaugcaucccccccccccccccccccccccccccccccaaaggcucuuuucagagccaccagaauu

SEQ ID NO: 4831 - RNA, 2180 nt, Artificial Sequence
  mRNA product Design f-4 comprising derived and/or modified sequence from HRSV(A2)__F_DSCav1_mut4 (opt2)
gggagagucccgcagucggcguccagcggcucugcuuguucgugugugugucguugcaggccuuauucaagcuuaccauggagcuccucauccucaaggccaacgccaucaccaccauccucaccgccgucaccuucugcuucgccuccggccagaacaucaccgaggaguucuaccaguccaccugcuccgccgucuccaagggcuaccucuccgcccuccgcaccggcugguacaccuccgucaucaccaucgagcucuccaacaucaaggagaacaagugcaacggcaccgacgccaaggucaagcucaucaagcaggagcucgacaaguacaagaacgccgucaccgagcuccagcuccucaugcaguccacccccgccaccggcuccggcuccgccaucugcuccggcgucgccgucugcaagguccuccaccucgagggcgaggucaacaagaucaaguccgcccuccucuccaccaacaaggccgucgucucccucuccaacggcgucuccguccucaccuucaagguccucgaccucaagaacuacaucgacaagcagcuccuccccauccucaacaagcaguccugcuccaucuccaacaucgagaccgucaucgaguuccagcagaagaacaaccgccuccucgagaucacccgcgaguucuccgucaacgccggcgucaccacccccgucuccaccuacaugcucaccaacuccgagcuccucucccucaucaacgacaugcccaucaccaacgaccagaagaagcucauguccaacaacguccagaucguccgccagcaguccuacuccaucaugugcaucaucaaggaggagguccucgccuacgucguccagcucccccucuacggcgucaucgacacccccugcuggaagcuccacaccuccccccucugcaccaccaacaccaaggagggcuccaacaucugccucacccgcaccgaccgcggcugguacugcgacaacgccggcuccgucuccuucuucccccaggccgagaccugcaagguccaguccaaccgcgucuucugcgacaccaugaacucccgcacccuccccuccgaggucaaccucugcaacgucgacaucuucaaccccaaguacgacugcaagaucaugaccuccaagaccgacgucuccuccuccgucaucaccucccucggcgccaucgucuccugcuacggcaagaccaagugcaccgccuccaacaagaaccgcggcaucaucaagaccuucuccaacggcugcgacuacgucuccaacaagggcgucgacaccgucuccgucggcaacacccucuacugcgucaacaagcaggagggcaagucccucuacgucaagggcgagcccaucaucaacuucuacgacccccucgucuuccccuccgacgaguucgacgccuccaucucccaggucaacgagaagaucaaccagucccucgccuucauccgcaaguccgacgagcuccuccacaacgucaacgccggcaaguccaccaccaacaucaugaucaccaccaucaucaucgucaucaucgucauccuccucucccucaucgccgucggccuccuccucuacugcaaggcccgcuccacccccgucacccucuccaaggaccagcucuccggcaucaacaacaucgccuucuccaacugaggacuagugaagggaacacccaaauuuaauucagccuuaagcacaauuaauuaagagugaaacguaauuguacaagcaguuggucacccaccauagggcaugaucaacaccgcaaccuuuccuuuuucccccagugauucugaaaaaccccucuucccuucagcuugcuuagauguuccaaauuuaguaagcuuaaggcggccuacagaagaaaaagaaaaaaaaggccacaaaaguucccucucacuuucaguaaauaaaauaaaagcagcaacagaaauaaagaaauaaaugaaauucaaaaugaaauaaauauuguguugugcagcauuaaaaaaucaauaaaaauuaaaaaugagcaagaucuaaaaaaaaaaaaaaaaaaaaaaaaaaaaaaaaaaaaaaaaaaaaaaaaaaaaaaaaaaaaaaaaugcaucccccccccccccccccccccccccccccccaaaggcucuuuucagagccaccagaauu

SEQ ID NO: 4832 - RNA, 2180 nt, Artificial Sequence
  mRNA product Design f-4 comprising derived and/or modified sequence from HRSV(A2)__F_DSCav1_mut4 (opt3)
gggagagucccgcagucggcguccagcggcucugcuuguucgugugugugucguugcaggccuuauucaagcuuaccauggagcugcucauccuuaaggccaacgcuauuaccacaauacugacugcagugacguucugcuuugccagcggccagaauaucaccgaagaguucuaccaauccacauguucugcggucucaaaaggguauuugagugcuuuaagaacuggaugguacaccagcguuauuacaaucgaacuguccaacauuaaggagaauaaaugcaacgguaccgacgccaaggugaaacuaaucaagcaggaacucgauaaguauaaaaaugcaguaacugagcugcagcuucugaugcagucuacacccgccaccggcucggggucagcuauauguagcggaguggcagucugcaagguguugcaccucgagggcgaaguuaacaaaaucaagagugcccugcuguccacgaauaaagcuguggucucucucagcaacgguguguccguauuaacuuuuaagguucuggaccuuaagaauuacauugauaaacaauugcugccuauccuaaacaagcagucauguaguauuagcaauaucgagaccgugauagaguuccagcagaaaaacaauaggcuccuggaaauuacacgggaguuuucugucaacgccggggugacuaccccaguguccacauauaugcuuaccaauucagaacuguugagccucaucaacgacaugccgauuacgaacgaucaaaagaaacugaugaguaauaacguccagaucguucgccagcagucuuacuccaucaugugcauuauaaaggaggaaguguuagcguauguagugcaacugccccucuacggagucaucgacacuccuuguuggaaacuucauacaagcccacugugcaccacuaauacaaaggagggcucgaacauuuguuugacccgaacggaucguggcugguacugcgacaaugcagggucuguguccuucuuuccccaggccgaaaccuguaagguucagucaaacagaguguucugcgauacaaugaauaguagaacucugccuagcgaggucaaccucugcaauguggacaucuuuaacccaaaauaugauuguaagauaaugaccuccaaaacagacguaucuagcucaguuauuaccagucugggagcuaucguguccugcuacgguaagacuaaauguacagccagcaauaagaacaggggcaucauuaagaccuucucuaaugggugcgauuaugucucaaacaaaggaguggacacugucagugugggcaauacgcuuuacuguguuaacaagcaagaggguaaaagccuguaugugaagggggaacccaucauuaacuuuuacgacccuuugguauucccauccgaugaguuugacgcaucuauaucgcaggucaaugagaaaaucaaccagagccucgcuuucauucggaaguccgaugaacuguuacacaaugugaacgccggaaagucaacaaccaauaucaugaucacuaccauuauaaucguuauuaucgugauucugcuaagucucaucgcggucggccugcuuuuguauugcaaagcccgcucuacaccggugacccugagcaaggaccagcucuccggcauaaacaauaucgcauucucaaacugaggacuagugaagggaacacccaaauuuaauucagccuuaagcacaauuaauuaagagugaaacguaauuguacaagcaguuggucacccaccauagggcaugaucaacaccgcaaccuuuccuuuuucccccagugauucugaaaaaccccucuucccuucagcuugcuuagauguuccaaauuuaguaagcuuaaggcggccuacagaagaaaaagaaaaaaaaggccacaaaaguucccucucacuuucaguaaauaaaauaaaagcagcaacagaaauaaagaaauaaaugaaauucaaaaugaaauaaauauuguguugugcagcauuaaaaaaucaauaaaaauuaaaaaugagcaagaucuaaaaaaaaaaaaaaaaaaaaaaaaaaaaaaaaaaaaaaaaaaaaaaaaaaaaaaaaaaaaaaaaugcaucccccccccccccccccccccccccccccccaaaggcucuuuucagagccaccagaauu

SEQ ID NO: 4833 - RNA, 2180 nt, Artificial Sequence
  mRNA product Design f-4 comprising derived and/or modified sequence from HRSV(A2)__F_DSCav1_mut4 (opt4)
gggagagucccgcagucggcguccagcggcucugcuuguucgugugugugucguugcaggccuuauucaagcuuaccauggagcugcugauccugaaggccaacgccaucaccaccauccugaccgccgugaccuucugcuucgccagcggccagaacaucaccgaggaguucuaccagagcaccugcagcgccgugagcaagggcuaccugagcgcccugagaaccggcugguacaccagcgugaucaccaucgagcugagcaacaucaaggagaacaagugcaacggcaccgacgccaaggugaagcugaucaagcaggagcuggacaaguacaagaacgccgugaccgagcugcagcugcugaugcagagcacccccgccaccggcagcggcagcgccaucugcagcggcguggccgugugcaaggugcugcaccuggagggcgaggugaacaagaucaagagcgcccugcugagcaccaacaaggccguggugagccugagcaacggcgugagcgugcugaccuucaaggugcuggaccugaagaacuacaucgacaagcagcugcugcccauccugaacaagcagagcugcagcaucagcaacaucgagaccgugaucgaguuccagcagaagaacaacagacugcuggagaucaccagagaguucagcgugaacgccggcgugaccacccccgugagcaccuacaugcugaccaacagcgagcugcugagccugaucaacgacaugcccaucaccaacgaccagaagaagcugaugagcaacaacgugcagaucgugagacagcagagcuacagcaucaugugcaucaucaaggaggaggugcuggccuacguggugcagcugccccuguacggcgugaucgacacccccugcuggaagcugcacaccagcccccugugcaccaccaacaccaaggagggcagcaacaucugccugaccagaaccgacagaggcugguacugcgacaacgccggcagcgugagcuucuucccccaggccgagaccugcaaggugcagagcaacagaguguucugcgacaccaugaacagcagaacccugcccagcgaggugaaccugugcaacguggacaucuucaaccccaaguacgacugcaagaucaugaccagcaagaccgacgugagcagcagcgugaucaccagccugggcgccaucgugagcugcuacggcaagaccaagugcaccgccagcaacaagaacagaggcaucaucaagaccuucagcaacggcugcgacuacgugagcaacaagggcguggacaccgugagcgugggcaacacccuguacugcgugaacaagcaggagggcaagagccuguacgugaagggcgagcccaucaucaacuucuacgacccccugguguuccccagcgacgaguucgacgccagcaucagccaggugaacgagaagaucaaccagagccuggccuucaucagaaagagcgacgagcugcugcacaacgugaacgccggcaagagcaccaccaacaucaugaucaccaccaucaucaucgugaucaucgugauccugcugagccugaucgccgugggccugcugcuguacugcaaggccagaagcacccccgugacccugagcaaggaccagcugagcggcaucaacaacaucgccuucagcaacugaggacuagugaagggaacacccaaauuuaauucagccuuaagcacaauuaauuaagagugaaacguaauuguacaagcaguuggucacccaccauagggcaugaucaacaccgcaaccuuuccuuuuucccccagugauucugaaaaaccccucuucccuucagcuugcuuagauguuccaaauuuaguaagcuuaaggcggccuacagaagaaaaagaaaaaaaaggccacaaaaguucccucucacuuucaguaaauaaaauaaaagcagcaacagaaauaaagaaauaaaugaaauucaaaaugaaauaaauauuguguugugcagcauuaaaaaaucaauaaaaauuaaaaaugagcaagaucuaaaaaaaaaaaaaaaaaaaaaaaaaaaaaaaaaaaaaaaaaaaaaaaaaaaaaaaaaaaaaaaaugcaucccccccccccccccccccccccccccccccaaaggcucuuuucagagccaccagaauu

SEQ ID NO: 4834 - RNA, 2180 nt, Artificial Sequence
  mRNA product Design f-4 comprising derived and/or modified sequence from HRSV(A2)__F_DSCav1_mut4 (opt5)
gggagagucccgcagucggcguccagcggcucugcuuguucgugugugugucguugcaggccuuauucaagcuuaccauggagcugcucauccugaaggccaacgcuauuaccacaauccuuacggccgugaccuucugcuuugcgagcggccagaauauuacagaagaguucuaccaauccaccuguucugcugucagcaaaggguaucuguccgcccucagaacaggaugguacaccucuguuaucacaauugaacugagcaacaucaaggagaauaaaugcaacggcaccgacgccaaggugaaacuuaucaagcaggaacuggauaaguauaaaaaugcugugacggagcuccagcugcugaugcaguccacccccgccacagggucuggaagcgcuauuuguuccggcgucgccgugugcaagguucuccaccuggagggggaagugaacaaaaucaagagcgcgcuucugucuaccaauaaagccgucgugucccucagcaacggaguuucugugcugacauuuaagguccuugaccugaagaauuacauugauaaacaacuccugccuauccugaacaagcaguccuguagcauuucuaauaucgagaccgugauugaguuccagcagaaaaacaaucggcuccuggaaaucacgcgcgaguuuuccgugaacgcuggcgucacaaccccgguuagcacauauaugcuuaccaauuccgaacugcucucucugaucaacgacaugcccauuaccaacgaucaaaagaaacuuaugagcaauaacgugcagaucgugagacagcaguccuacagcauuaugugcaucauuaaggaggaaguccuggccuaugugguucaacucccucuguacggcgugaucgacacacccuguuggaaacugcauacgucuccucucugcaccacaaauaccaaggagggguccaacaucugucugacacggaccgaucgcggaugguacugcgacaaugcuggcagcgucucuuucuuuccccaggccgaaacguguaaggugcagagcaacagaguuuucugcgauacaaugaacuccagaacccugccuucugaggugaaucucugcaaugucgacauuuuuaacccgaaauaugauuguaagaucaugaccagcaaaacagacguguccagcucugucauuaccucccugggggcgaucgugagcugcuacggaaagacaaaauguacggccucuaauaagaaccggggcauuaucaagaccuucuccaaugggugcgauuauguuagcaacaaaggaguggacacagucuccgugggcaauacccuuuacuguguuaacaagcaagagggcaaaucucuguaugugaagggggaacccaucauuaacuuuuacgacccucucgucuuccccagcgaugaguuugacgcuuccaucucucaggugaaugagaaaauuaaccagagccuggccuucauccgcaaguccgaugaacugcuccacaaugugaacgcuggaaagagcacaaccaauauuaugaucacgaccauuaucaucguuauuaucgucauucugcuuucucugaucgccgugggccuccugcuguauugcaaagccagauccacaccugugacccuuagcaaggaccagcucucugggauuaacaauaucgcuuucuccaacugaggacuagugaagggaacacccaaauuuaauucagccuuaagcacaauuaauuaagagugaaacguaauuguacaagcaguuggucacccaccauagggcaugaucaacaccgcaaccuuuccuuuuucccccagugauucugaaaaaccccucuucccuucagcuugcuuagauguuccaaauuuaguaagcuuaaggcggccuacagaagaaaaagaaaaaaaaggccacaaaaguucccucucacuuucaguaaauaaaauaaaagcagcaacagaaauaaagaaauaaaugaaauucaaaaugaaauaaauauuguguugugcagcauuaaaaaaucaauaaaaauuaaaaaugagcaagaucuaaaaaaaaaaaaaaaaaaaaaaaaaaaaaaaaaaaaaaaaaaaaaaaaaaaaaaaaaaaaaaaaugcaucccccccccccccccccccccccccccccccaaaggcucuuuucagagccaccagaauu

SEQ ID NO: 4835 - RNA, 2180 nt, Artificial Sequence
  mRNA product Design f-4 comprising derived and/or modified sequence from HRSV(A2)__F_DSCav1_mut4 (opt6)
gggagagucccgcagucggcguccagcggcucugcuuguucgugugugugucguugcaggccuuauucaagcuuaccauggaacuucuaauacucaaagccaacgcaauaacaacaauauuaacagccguaacauuuugcuucgcaucaggucaaaacauaacagaagaguucuaccaauccacaugcucagcaguaucaaaaggauauuuaagugcucuaagaacaggaugguacacauccguaauaacaaucgaacuaucaaacauaaaagaaaauaaauguaauggaacagacgccaaaguaaaauuaaucaaacaagaacuagacaaauacaaaaacgcaguuacugaauuacaauuauuaaugcaaucaacaccggccacaggaucuggaucagcaauaugcucaggaguagcagucugcaaaguauuacaccuagaaggggaaguuaauaaaaucaaaucagcauuacuauccaccaacaaagcgguaguuucacucuccaacggcguaucugucuuaacauucaaaguauuagaccuaaaaaacuacauugacaaacaacuacuaccaauccuaaacaaacaaucauguuccauaagcaauauagaaacaguaauagaauuucaacaaaaaaacaacagacuauuagaaauaacaagagaauuuuccgucaaugcaggaguuacuaccccugucuccaccuauaugcuaaccaauuccgaacucuuaucauuaauaaacgacaugccuaucacaaaugaccaaaaaaaauuaaugagcaacaacguacaaauaguacgacaacaaucauacucaaucaugugcauaauaaaagaagaaguccuagcauacguuguacaacuaccacuauacggagucauagauaccccaugcuggaaacuccauacaagcccacuaugcacuacaaacacaaaagaaggcucuaauauaugucuaacaagaacagaccgaggaugguacugcgauaaugccggcucagucucauucuuuccgcaagccgaaacuuguaaaguacaaaguaacagaguauuuugugacaccaugaacucaagaacccucccaagcgaagucaaucuaugcaacguugauauauucaaucccaaauacgacugcaaaaucaugaccucaaaaacagacgucagcucauccguuauaacaucacuaggagccaucguaucuugcuauggaaaaacaaaaugcacagcaagcaauaaaaacagaggcauaauaaaaacauucucaaauggaugcgacuacguaucaaacaaaggagucgacacaguuuccguaggaaacacuuuauacugcguaaacaaacaagaaggaaaaucauuauacgucaaaggugaaccaauaauaaacuucuacgauccacuuguauucccaucagacgaauuugacgcaucaauuucacaaguaaacgaaaaaauaaaccaaucacucgcauucauaagaaaaucagaugaacuacuacauaacguaaacgcaggaaaauccacaacaaacaucaugauaacaaccaucauaaucguaauaaucguaauacuauuaucccuaauugcaguaggauuacucuuauauugcaaagcaagaucaacaccaguaacccucaguaaagaccaacuauccggaauaaauaacaucgcauucucaaacuaaggacuagugaagggaacacccaaauuuaauucagccuuaagcacaauuaauuaagagugaaacguaauuguacaagcaguuggucacccaccauagggcaugaucaacaccgcaaccuuuccuuuuucccccagugauucugaaaaaccccucuucccuucagcuugcuuagauguuccaaauuuaguaagcuuaaggcggccuacagaagaaaaagaaaaaaaaggccacaaaaguucccucucacuuucaguaaauaaaauaaaagcagcaacagaaauaaagaaauaaaugaaauucaaaaugaaauaaauauuguguugugcagcauuaaaaaaucaauaaaaauuaaaaaugagcaagaucuaaaaaaaaaaaaaaaaaaaaaaaaaaaaaaaaaaaaaaaaaaaaaaaaaaaaaaaaaaaaaaaaugcaucccccccccccccccccccccccccccccccaaaggcucuuuucagagccaccagaauu

SEQ ID NO: 4836 - RNA, 2180 nt, Artificial Sequence
  mRNA product Design f-4 comprising derived and/or modified sequence from HRSV(A2)__F_DSCav1_mut4 (opt11)
gggagagucccgcagucggcguccagcggcucugcuuguucgugugugugucguugcaggccuuauucaagcuuaccauggaacugcucauccucaaagccaacgccaucaccaccauucuuaccgccgucacauucugcuucgccucaggccaaaacaucaccgaagaauuuuaccaauccacuuguucagccgucucaaaaggauaccuaucagcccuccguaccggcugguacaccucggucauaacaauagaacucuccaacauaaaagaaaacaaaugcaacggcaccgacgccaaggucaaacugauaaaacaagaacuugauaaauacaaaaacgccgucacugaacuccaacuccucaugcaauccacucccgcuacuggcucuggcuccgccaucugcucuggcgucgccgucuguaaaguacuccaccucgaaggggaagucaacaaaaucaaaucagcccuccuuagcaccaacaaggccgucgucucccucucaaacggagucagcguccucaccuucaagguccucgaccucaagaacuacaucgacaaacaacuccugcccauccuaaauaaacaauccugcucuaucuccaauaucgaaaccguuauagaguuccaacagaaaaacaaccgacuccucgaaaucacccgcgaguucuccgucaacgcaggcgucaccaccccugugucaaccuacaugcucaccaacagcgaacuacucucacucaucaaugacaugcccaucaccaacgaccaaaagaaacucauguccaacaacguccaaaucguacgucaacaauccuacagcaucaugugcaucauaaaagaagaaguccucgccuacgucguccaacuuccccucuacggcgucauagacacccccugcuggaaacugcauaccucaccccuaugcaccaccaacacuaaagaaggcuccaacaucugccucacccgcacggaccgcggcugguacugcgacaacgccggcuccgucuccuucuucccccaagccgaaacuuguaaaguccaauccaacagagucuucugcgacaccaugaacucuagaacgcugccauccgagguaaaccuaugcaacgucgacaucuucaaucccaaauacgacugcaagaucaugaccucaaaaaccgacguauccuccucaguaaucaccagucucggagcuaucgucuccugcuacggcaaaaccaaaugcacggccucuaacaaaaaccgcggcaucaucaaaaccuucucaaacggaugcgacuacgucagcaacaaaggcguagauaccgucucugucggcaacacacuguacugcguaaacaagcaagaaggaaaaucccucuacguaaaaggcgaacccaucaucaacuucuacgacccccucguuuuccccucagaugaauuugacgccucgauaucacaagucaacgaaaagauaaaucagucccucgccuucauccgaaaauccgacgaacuccuccacaacguuaacgcaggaaaguccaccacaaacaucaugauaacuacaaucauaauagucauuaucgucauacuccucucccuaaucgccguaggccugcuacucuacugcaaagcccgcucaacccccgucacucucucaaaagaccaacucuccggcaucaauaacaucgccuucucaaacuaaggacuagugaagggaacacccaaauuuaauucagccuuaagcacaauuaauuaagagugaaacguaauuguacaagcaguuggucacccaccauagggcaugaucaacaccgcaaccuuuccuuuuucccccagugauucugaaaaaccccucuucccuucagcuugcuuagauguuccaaauuuaguaagcuuaaggcggccuacagaagaaaaagaaaaaaaaggccacaaaaguucccucucacuuucaguaaauaaaauaaaagcagcaacagaaauaaagaaauaaaugaaauucaaaaugaaauaaauauuguguugugcagcauuaaaaaaucaauaaaaauuaaaaaugagcaagaucuaaaaaaaaaaaaaaaaaaaaaaaaaaaaaaaaaaaaaaaaaaaaaaaaaaaaaaaaaaaaaaaaugcaucccccccccccccccccccccccccccccccaaaggcucuuuucagagccaccagaauu

SEQ ID NO: 4837 - RNA, 1956 nt, Artificial Sequence
  mRNA product Design f-5 comprising derived and/or modified sequence from HRSV(A2)__F_DSCav1_mut4 (opt1)
gggagacuuucccauucuguagcagaauuugguguugccuguggucuuggucccgcggagaagcuuaccauggagcugcucauccugaaggccaacgccaucaccaccauccugacggcggugaccuucugcuucgccagcggccagaacaucaccgaggaguucuaccaguccacgugcagcgccgucuccaagggguaccucagcgcccugcggaccggcugguacaccuccgugaucaccaucgagcugagcaacaucaaggagaacaagugcaacgggaccgacgccaaggugaagcucaucaagcaggagcuggacaaguacaagaacgcggucacggagcugcagcuccugaugcaguccaccccggcaaccggcuccggcuccgccaucugcagcggcgucgccgugugcaaggugcugcaccucgagggggaggucaacaagaucaagagcgcccugcuguccaccaacaaggccguggugagccucuccaacggcgucagcgugcugaccuucaaggugcuggaccucaagaacuacaucgacaagcagcugcugcccauccugaacaagcagagcugcuccaucagcaacaucgagacggugaucgaguuccagcagaagaacaaccggcuccuggagaucacccgcgaguucagcgugaacgccggggucaccacccccguguccacguacaugcugaccaacagcgagcuccugucccugaucaacgacaugccgaucaccaacgaccagaagaagcucaugagcaacaacgugcagaucguccggcagcaguccuacagcaucaugugcaucaucaaggaggaggugcuggcguacgugguccagcugccccucuacggcgugaucgacacccccugcuggaagcugcacacgagcccccugugcaccaccaacaccaaggagggguccaacaucugccucacgcgcaccgaccggggcugguacugcgacaacgccggcagcgucuccuucuucccgcaggccgagaccugcaaggugcagagcaaccgcguguucugcgacaccaugaacucccggacgcugcccagcgagguaaaccucugcaacgucgacaucuucaaccccaaguacgacugcaagaucaugaccuccaagaccgacgugagcuccagcgugaucaccucccugggggccaucgucagcugcuacggcaagacgaagugcaccgccagcaacaagaaccgggggaucaucaagaccuucuccaacggcugcgacuacgugagcaacaagggcguggacaccguguccgucgggaacacccuguacugcgugaacaagcaggagggcaagagccucuacgugaagggggagcccaucaucaacuucuacgacccgcuggucuuccccuccgacgaguucgacgcgagcaucucccaggugaacgagaagaucaaccagagccuggccuucauccgcaaguccgacgagcugcuccacaacgugaacgccggcaagagcacgaccaacaucaugaucaccaccaucaucaucgucaucaucgugauccugcugucccucaucgccguggggcugcugcucuacugcaaggcccggagcacgcccgucacccuguccaaggaccagcugagcggcaucaacaacaucgcguucuccaacugaggacuaguacuggcugcaucucccuuuccucuguccuccauccuucucccaggauggugaagggggaccugguacccagugauccccaccccaggauccuaaaucaugacuuaccugcuaauaaaaacucauuggaaaagugagaagaucuaaaaaaaaaaaaaaaaaaaaaaaaaaaaaaaaaaaaaaaaaaaaaaaaaaaaaaaaaaaaaaaaugcaucccccccccccccccccccccccccccccccaaaggcucuuuucagagccaccagaauu

SEQ ID NO: 4838 - RNA, 1956 nt, Artificial Sequence
  mRNA product Design f-5 comprising derived and/or modified sequence from HRSV(A2)__F_DSCav1_mut4 (opt1)
gggagacuuucccauucuguagcagaauuugguguugccuguggucuuggucccgcggagaagcuuaccauggagcugcucauccugaaggccaacgccaucaccaccauccugacggcggugaccuucugcuucgccagcggccagaacaucaccgaggaguucuaccaguccacgugcagcgccgucuccaagggguaccucagcgcccugcgcaccggcugguacaccuccgugaucaccaucgagcugagcaacaucaaggagaacaagugcaacgggaccgacgccaaggugaagcucaucaagcaggagcuggacaaguacaagaacgcggucacggagcugcagcuccugaugcaguccacccccgccaccggcagcggguccgccaucugcagcggcguggccgugugcaagguccugcaccucgagggcgaggugaacaagaucaaguccgcgcugcugagcaccaacaaggccguggucucccucagcaacgggguguccgugcugacguucaagguccuggaccucaagaacuacaucgacaagcagcugcugccgauccucaacaagcagagcugcuccaucagcaacaucgagaccgugaucgaguuccagcagaagaacaaccggcugcuggagaucacccgcgaguucuccgugaacgccggcgucaccacgcccgugagcaccuacaugcucaccaacagcgagcugcugucccucaucaacgacaugcccaucaccaacgaccagaagaagcugaugagcaacaacgugcagaucguccggcagcaguccuacagcaucaugugcaucaucaaggaggaggugcuggccuacgugguccagcucccccuguacggggugaucgacacgccgugcuggaagcugcacaccagcccccucugcaccaccaacacgaaggagggcuccaacaucugccugacccgcaccgaccgggggugguacugcgacaacgccggcuccgugagcuucuucccccaggcggagaccugcaagguccaguccaaccgcguguucugcgacacgaugaacagccggacccuccccuccgaggucaaccugugcaacguggacaucuucaacccgaaguacgacugcaagaucaugaccagcaagaccgacguguccagcuccgucaucacgagccugggcgccaucguguccugcuacgggaagaccaagugcaccgccagcaacaagaaccggggcaucaucaagaccuucuccaacgggugcgacuacgugagcaacaagggcgucgacacggugagcgugggcaacacccucuacugcgucaacaagcaggaggggaagucccuguacgugaagggcgagcccaucaucaacuucuacgacccccugguguuccccagcgacgaguucgacgccuccaucagccaggucaacgagaagaucaaccagucccucgccuucauccgcaagagcgacgagcugcugcacaacgugaacgcggggaaguccaccaccaacaucaugaucaccacgaucaucaucgugaucaucgucauccuccugagccugaucgccgugggccuccugcuguacugcaaggcccgguccaccccggugacccugagcaaggaccagcucuccgggaucaacaacaucgccuucagcaacugaggacuaguacuggcugcaucucccuuuccucuguccuccauccuucucccaggauggugaagggggaccugguacccagugauccccaccccaggauccuaaaucaugacuuaccugcuaauaaaaacucauuggaaaagugagaagaucuaaaaaaaaaaaaaaaaaaaaaaaaaaaaaaaaaaaaaaaaaaaaaaaaaaaaaaaaaaaaaaaaugcaucccccccccccccccccccccccccccccccaaaggcucuuuucagagccaccagaauu

SEQ ID NO: 4839 - RNA, 1956 nt, Artificial Sequence
  mRNA product Design f-5 comprising derived and/or modified sequence from HRSV(A2)__F_DSCav1_mut4 (opt2)
gggagacuuucccauucuguagcagaauuugguguugccuguggucuuggucccgcggagaagcuuaccauggagcuccucauccucaaggccaacgccaucaccaccauccucaccgccgucaccuucugcuucgccuccggccagaacaucaccgaggaguucuaccaguccaccugcuccgccgucuccaagggcuaccucuccgcccuccgcaccggcugguacaccuccgucaucaccaucgagcucuccaacaucaaggagaacaagugcaacggcaccgacgccaaggucaagcucaucaagcaggagcucgacaaguacaagaacgccgucaccgagcuccagcuccucaugcaguccacccccgccaccggcuccggcuccgccaucugcuccggcgucgccgucugcaagguccuccaccucgagggcgaggucaacaagaucaaguccgcccuccucuccaccaacaaggccgucgucucccucuccaacggcgucuccguccucaccuucaagguccucgaccucaagaacuacaucgacaagcagcuccuccccauccucaacaagcaguccugcuccaucuccaacaucgagaccgucaucgaguuccagcagaagaacaaccgccuccucgagaucacccgcgaguucuccgucaacgccggcgucaccacccccgucuccaccuacaugcucaccaacuccgagcuccucucccucaucaacgacaugcccaucaccaacgaccagaagaagcucauguccaacaacguccagaucguccgccagcaguccuacuccaucaugugcaucaucaaggaggagguccucgccuacgucguccagcucccccucuacggcgucaucgacacccccugcuggaagcuccacaccuccccccucugcaccaccaacaccaaggagggcuccaacaucugccucacccgcaccgaccgcggcugguacugcgacaacgccggcuccgucuccuucuucccccaggccgagaccugcaagguccaguccaaccgcgucuucugcgacaccaugaacucccgcacccuccccuccgaggucaaccucugcaacgucgacaucuucaaccccaaguacgacugcaagaucaugaccuccaagaccgacgucuccuccuccgucaucaccucccucggcgccaucgucuccugcuacggcaagaccaagugcaccgccuccaacaagaaccgcggcaucaucaagaccuucuccaacggcugcgacuacgucuccaacaagggcgucgacaccgucuccgucggcaacacccucuacugcgucaacaagcaggagggcaagucccucuacgucaagggcgagcccaucaucaacuucuacgacccccucgucuuccccuccgacgaguucgacgccuccaucucccaggucaacgagaagaucaaccagucccucgccuucauccgcaaguccgacgagcuccuccacaacgucaacgccggcaaguccaccaccaacaucaugaucaccaccaucaucaucgucaucaucgucauccuccucucccucaucgccgucggccuccuccucuacugcaaggcccgcuccacccccgucacccucuccaaggaccagcucuccggcaucaacaacaucgccuucuccaacugaggacuaguacuggcugcaucucccuuuccucuguccuccauccuucucccaggauggugaagggggaccugguacccagugauccccaccccaggauccuaaaucaugacuuaccugcuaauaaaaacucauuggaaaagugagaagaucuaaaaaaaaaaaaaaaaaaaaaaaaaaaaaaaaaaaaaaaaaaaaaaaaaaaaaaaaaaaaaaaaugcaucccccccccccccccccccccccccccccccaaaggcucuuuucagagccaccagaauu

SEQ ID NO: 4840 - RNA, 1956 nt, Artificial Sequence
  mRNA product Design f-5 comprising derived and/or modified sequence from HRSV(A2)__F_DSCav1_mut4 (opt3)
gggagacuuucccauucuguagcagaauuugguguugccuguggucuuggucccgcggagaagcuuaccauggagcugcucauccuuaaggccaacgcuauuaccacaauacugacugcagugacguucugcuuugccagcggccagaauaucaccgaagaguucuaccaauccacauguucugcggucucaaaaggguauuugagugcuuuaagaacuggaugguacaccagcguuauuacaaucgaacuguccaacauuaaggagaauaaaugcaacgguaccgacgccaaggugaaacuaaucaagcaggaacucgauaaguauaaaaaugcaguaacugagcugcagcuucugaugcagucuacacccgccaccggcucggggucagcuauauguagcggaguggcagucugcaagguguugcaccucgagggcgaaguuaacaaaaucaagagugcccugcuguccacgaauaaagcuguggucucucucagcaacgguguguccguauuaacuuuuaagguucuggaccuuaagaauuacauugauaaacaauugcugccuauccuaaacaagcagucauguaguauuagcaauaucgagaccgugauagaguuccagcagaaaaacaauaggcuccuggaaauuacacgggaguuuucugucaacgccggggugacuaccccaguguccacauauaugcuuaccaauucagaacuguugagccucaucaacgacaugccgauuacgaacgaucaaaagaaacugaugaguaauaacguccagaucguucgccagcagucuuacuccaucaugugcauuauaaaggaggaaguguuagcguauguagugcaacugccccucuacggagucaucgacacuccuuguuggaaacuucauacaagcccacugugcaccacuaauacaaaggagggcucgaacauuuguuugacccgaacggaucguggcugguacugcgacaaugcagggucuguguccuucuuuccccaggccgaaaccuguaagguucagucaaacagaguguucugcgauacaaugaauaguagaacucugccuagcgaggucaaccucugcaauguggacaucuuuaacccaaaauaugauuguaagauaaugaccuccaaaacagacguaucuagcucaguuauuaccagucugggagcuaucguguccugcuacgguaagacuaaauguacagccagcaauaagaacaggggcaucauuaagaccuucucuaaugggugcgauuaugucucaaacaaaggaguggacacugucagugugggcaauacgcuuuacuguguuaacaagcaagaggguaaaagccuguaugugaagggggaacccaucauuaacuuuuacgacccuuugguauucccauccgaugaguuugacgcaucuauaucgcaggucaaugagaaaaucaaccagagccucgcuuucauucggaaguccgaugaacuguuacacaaugugaacgccggaaagucaacaaccaauaucaugaucacuaccauuauaaucguuauuaucgugauucugcuaagucucaucgcggucggccugcuuuuguauugcaaagcccgcucuacaccggugacccugagcaaggaccagcucuccggcauaaacaauaucgcauucucaaacugaggacuaguacuggcugcaucucccuuuccucuguccuccauccuucucccaggauggugaagggggaccugguacccagugauccccaccccaggauccuaaaucaugacuuaccugcuaauaaaaacucauuggaaaagugagaagaucuaaaaaaaaaaaaaaaaaaaaaaaaaaaaaaaaaaaaaaaaaaaaaaaaaaaaaaaaaaaaaaaaugcaucccccccccccccccccccccccccccccccaaaggcucuuuucagagccaccagaauu

SEQ ID NO: 4841 - RNA, 1956 nt, Artificial Sequence
  mRNA product Design f-5 comprising derived and/or modified sequence from HRSV(A2)__F_DSCav1_mut4 (opt4)
gggagacuuucccauucuguagcagaauuugguguugccuguggucuuggucccgcggagaagcuuaccauggagcugcugauccugaaggccaacgccaucaccaccauccugaccgccgugaccuucugcuucgccagcggccagaacaucaccgaggaguucuaccagagcaccugcagcgccgugagcaagggcuaccugagcgcccugagaaccggcugguacaccagcgugaucaccaucgagcugagcaacaucaaggagaacaagugcaacggcaccgacgccaaggugaagcugaucaagcaggagcuggacaaguacaagaacgccgugaccgagcugcagcugcugaugcagagcacccccgccaccggcagcggcagcgccaucugcagcggcguggccgugugcaaggugcugcaccuggagggcgaggugaacaagaucaagagcgcccugcugagcaccaacaaggccguggugagccugagcaacggcgugagcgugcugaccuucaaggugcuggaccugaagaacuacaucgacaagcagcugcugcccauccugaacaagcagagcugcagcaucagcaacaucgagaccgugaucgaguuccagcagaagaacaacagacugcuggagaucaccagagaguucagcgugaacgccggcgugaccacccccgugagcaccuacaugcugaccaacagcgagcugcugagccugaucaacgacaugcccaucaccaacgaccagaagaagcugaugagcaacaacgugcagaucgugagacagcagagcuacagcaucaugugcaucaucaaggaggaggugcuggccuacguggugcagcugccccuguacggcgugaucgacacccccugcuggaagcugcacaccagcccccugugcaccaccaacaccaaggagggcagcaacaucugccugaccagaaccgacagaggcugguacugcgacaacgccggcagcgugagcuucuucccccaggccgagaccugcaaggugcagagcaacagaguguucugcgacaccaugaacagcagaacccugcccagcgaggugaaccugugcaacguggacaucuucaaccccaaguacgacugcaagaucaugaccagcaagaccgacgugagcagcagcgugaucaccagccugggcgccaucgugagcugcuacggcaagaccaagugcaccgccagcaacaagaacagaggcaucaucaagaccuucagcaacggcugcgacuacgugagcaacaagggcguggacaccgugagcgugggcaacacccuguacugcgugaacaagcaggagggcaagagccuguacgugaagggcgagcccaucaucaacuucuacgacccccugguguuccccagcgacgaguucgacgccagcaucagccaggugaacgagaagaucaaccagagccuggccuucaucagaaagagcgacgagcugcugcacaacgugaacgccggcaagagcaccaccaacaucaugaucaccaccaucaucaucgugaucaucgugauccugcugagccugaucgccgugggccugcugcuguacugcaaggccagaagcacccccgugacccugagcaaggaccagcugagcggcaucaacaacaucgccuucagcaacugaggacuaguacuggcugcaucucccuuuccucuguccuccauccuucucccaggauggugaagggggaccugguacccagugauccccaccccaggauccuaaaucaugacuuaccugcuaauaaaaacucauuggaaaagugagaagaucuaaaaaaaaaaaaaaaaaaaaaaaaaaaaaaaaaaaaaaaaaaaaaaaaaaaaaaaaaaaaaaaaugcaucccccccccccccccccccccccccccccccaaaggcucuuuucagagccaccagaauu

SEQ ID NO: 4842 - RNA, 1956 nt, Artificial Sequence
  mRNA product Design f-5 comprising derived and/or modified sequence from HRSV(A2)__F_DSCav1_mut4 (opt5)
gggagacuuucccauucuguagcagaauuugguguugccuguggucuuggucccgcggagaagcuuaccauggagcugcucauccugaaggccaacgcuauuaccacaauccuuacggccgugaccuucugcuuugcgagcggccagaauauuacagaagaguucuaccaauccaccuguucugcugucagcaaaggguaucuguccgcccucagaacaggaugguacaccucuguuaucacaauugaacugagcaacaucaaggagaauaaaugcaacggcaccgacgccaaggugaaacuuaucaagcaggaacuggauaaguauaaaaaugcugugacggagcuccagcugcugaugcaguccacccccgccacagggucuggaagcgcuauuuguuccggcgucgccgugugcaagguucuccaccuggagggggaagugaacaaaaucaagagcgcgcuucugucuaccaauaaagccgucgugucccucagcaacggaguuucugugcugacauuuaagguccuugaccugaagaauuacauugauaaacaacuccugccuauccugaacaagcaguccuguagcauuucuaauaucgagaccgugauugaguuccagcagaaaaacaaucggcuccuggaaaucacgcgcgaguuuuccgugaacgcuggcgucacaaccccgguuagcacauauaugcuuaccaauuccgaacugcucucucugaucaacgacaugcccauuaccaacgaucaaaagaaacuuaugagcaauaacgugcagaucgugagacagcaguccuacagcauuaugugcaucauuaaggaggaaguccuggccuaugugguucaacucccucuguacggcgugaucgacacacccuguuggaaacugcauacgucuccucucugcaccacaaauaccaaggagggguccaacaucugucugacacggaccgaucgcggaugguacugcgacaaugcuggcagcgucucuuucuuuccccaggccgaaacguguaaggugcagagcaacagaguuuucugcgauacaaugaacuccagaacccugccuucugaggugaaucucugcaaugucgacauuuuuaacccgaaauaugauuguaagaucaugaccagcaaaacagacguguccagcucugucauuaccucccugggggcgaucgugagcugcuacggaaagacaaaauguacggccucuaauaagaaccggggcauuaucaagaccuucuccaaugggugcgauuauguuagcaacaaaggaguggacacagucuccgugggcaauacccuuuacuguguuaacaagcaagagggcaaaucucuguaugugaagggggaacccaucauuaacuuuuacgacccucucgucuuccccagcgaugaguuugacgcuuccaucucucaggugaaugagaaaauuaaccagagccuggccuucauccgcaaguccgaugaacugcuccacaaugugaacgcuggaaagagcacaaccaauauuaugaucacgaccauuaucaucguuauuaucgucauucugcuuucucugaucgccgugggccuccugcuguauugcaaagccagauccacaccugugacccuuagcaaggaccagcucucugggauuaacaauaucgcuuucuccaacugaggacuaguacuggcugcaucucccuuuccucuguccuccauccuucucccaggauggugaagggggaccugguacccagugauccccaccccaggauccuaaaucaugacuuaccugcuaauaaaaacucauuggaaaagugagaagaucuaaaaaaaaaaaaaaaaaaaaaaaaaaaaaaaaaaaaaaaaaaaaaaaaaaaaaaaaaaaaaaaaugcaucccccccccccccccccccccccccccccccaaaggcucuuuucagagccaccagaauu

SEQ ID NO: 4843 - RNA, 1956 nt, Artificial Sequence
  mRNA product Design f-5 comprising derived and/or modified sequence from HRSV(A2)__F_DSCav1_mut4 (opt6)
gggagacuuucccauucuguagcagaauuugguguugccuguggucuuggucccgcggagaagcuuaccauggaacuucuaauacucaaagccaacgcaauaacaacaauauuaacagccguaacauuuugcuucgcaucaggucaaaacauaacagaagaguucuaccaauccacaugcucagcaguaucaaaaggauauuuaagugcucuaagaacaggaugguacacauccguaauaacaaucgaacuaucaaacauaaaagaaaauaaauguaauggaacagacgccaaaguaaaauuaaucaaacaagaacuagacaaauacaaaaacgcaguuacugaauuacaauuauuaaugcaaucaacaccggccacaggaucuggaucagcaauaugcucaggaguagcagucugcaaaguauuacaccuagaaggggaaguuaauaaaaucaaaucagcauuacuauccaccaacaaagcgguaguuucacucuccaacggcguaucugucuuaacauucaaaguauuagaccuaaaaaacuacauugacaaacaacuacuaccaauccuaaacaaacaaucauguuccauaagcaauauagaaacaguaauagaauuucaacaaaaaaacaacagacuauuagaaauaacaagagaauuuuccgucaaugcaggaguuacuaccccugucuccaccuauaugcuaaccaauuccgaacucuuaucauuaauaaacgacaugccuaucacaaaugaccaaaaaaaauuaaugagcaacaacguacaaauaguacgacaacaaucauacucaaucaugugcauaauaaaagaagaaguccuagcauacguuguacaacuaccacuauacggagucauagauaccccaugcuggaaacuccauacaagcccacuaugcacuacaaacacaaaagaaggcucuaauauaugucuaacaagaacagaccgaggaugguacugcgauaaugccggcucagucucauucuuuccgcaagccgaaacuuguaaaguacaaaguaacagaguauuuugugacaccaugaacucaagaacccucccaagcgaagucaaucuaugcaacguugauauauucaaucccaaauacgacugcaaaaucaugaccucaaaaacagacgucagcucauccguuauaacaucacuaggagccaucguaucuugcuauggaaaaacaaaaugcacagcaagcaauaaaaacagaggcauaauaaaaacauucucaaauggaugcgacuacguaucaaacaaaggagucgacacaguuuccguaggaaacacuuuauacugcguaaacaaacaagaaggaaaaucauuauacgucaaaggugaaccaauaauaaacuucuacgauccacuuguauucccaucagacgaauuugacgcaucaauuucacaaguaaacgaaaaaauaaaccaaucacucgcauucauaagaaaaucagaugaacuacuacauaacguaaacgcaggaaaauccacaacaaacaucaugauaacaaccaucauaaucguaauaaucguaauacuauuaucccuaauugcaguaggauuacucuuauauugcaaagcaagaucaacaccaguaacccucaguaaagaccaacuauccggaauaaauaacaucgcauucucaaacuaaggacuaguacuggcugcaucucccuuuccucuguccuccauccuucucccaggauggugaagggggaccugguacccagugauccccaccccaggauccuaaaucaugacuuaccugcuaauaaaaacucauuggaaaagugagaagaucuaaaaaaaaaaaaaaaaaaaaaaaaaaaaaaaaaaaaaaaaaaaaaaaaaaaaaaaaaaaaaaaaugcaucccccccccccccccccccccccccccccccaaaggcucuuuucagagccaccagaauu

SEQ ID NO: 4844 - RNA, 1956 nt, Artificial Sequence
  mRNA product Design f-5 comprising derived and/or modified sequence from HRSV(A2)__F_DSCav1_mut4 (opt11)
gggagacuuucccauucuguagcagaauuugguguugccuguggucuuggucccgcggagaagcuuaccauggaacugcucauccucaaagccaacgccaucaccaccauucuuaccgccgucacauucugcuucgccucaggccaaaacaucaccgaagaauuuuaccaauccacuuguucagccgucucaaaaggauaccuaucagcccuccguaccggcugguacaccucggucauaacaauagaacucuccaacauaaaagaaaacaaaugcaacggcaccgacgccaaggucaaacugauaaaacaagaacuugauaaauacaaaaacgccgucacugaacuccaacuccucaugcaauccacucccgcuacuggcucuggcuccgccaucugcucuggcgucgccgucuguaaaguacuccaccucgaaggggaagucaacaaaaucaaaucagcccuccuuagcaccaacaaggccgucgucucccucucaaacggagucagcguccucaccuucaagguccucgaccucaagaacuacaucgacaaacaacuccugcccauccuaaauaaacaauccugcucuaucuccaauaucgaaaccguuauagaguuccaacagaaaaacaaccgacuccucgaaaucacccgcgaguucuccgucaacgcaggcgucaccaccccugugucaaccuacaugcucaccaacagcgaacuacucucacucaucaaugacaugcccaucaccaacgaccaaaagaaacucauguccaacaacguccaaaucguacgucaacaauccuacagcaucaugugcaucauaaaagaagaaguccucgccuacgucguccaacuuccccucuacggcgucauagacacccccugcuggaaacugcauaccucaccccuaugcaccaccaacacuaaagaaggcuccaacaucugccucacccgcacggaccgcggcugguacugcgacaacgccggcuccgucuccuucuucccccaagccgaaacuuguaaaguccaauccaacagagucuucugcgacaccaugaacucuagaacgcugccauccgagguaaaccuaugcaacgucgacaucuucaaucccaaauacgacugcaagaucaugaccucaaaaaccgacguauccuccucaguaaucaccagucucggagcuaucgucuccugcuacggcaaaaccaaaugcacggccucuaacaaaaaccgcggcaucaucaaaaccuucucaaacggaugcgacuacgucagcaacaaaggcguagauaccgucucugucggcaacacacuguacugcguaaacaagcaagaaggaaaaucccucuacguaaaaggcgaacccaucaucaacuucuacgacccccucguuuuccccucagaugaauuugacgccucgauaucacaagucaacgaaaagauaaaucagucccucgccuucauccgaaaauccgacgaacuccuccacaacguuaacgcaggaaaguccaccacaaacaucaugauaacuacaaucauaauagucauuaucgucauacuccucucccuaaucgccguaggccugcuacucuacugcaaagcccgcucaacccccgucacucucucaaaagaccaacucuccggcaucaauaacaucgccuucucaaacuaaggacuaguacuggcugcaucucccuuuccucuguccuccauccuucucccaggauggugaagggggaccugguacccagugauccccaccccaggauccuaaaucaugacuuaccugcuaauaaaaacucauuggaaaagugagaagaucuaaaaaaaaaaaaaaaaaaaaaaaaaaaaaaaaaaaaaaaaaaaaaaaaaaaaaaaaaaaaaaaaugcaucccccccccccccccccccccccccccccccaaaggcucuuuucagagccaccagaauu

SEQ ID NO: 4845 - RNA, 1952 nt, Artificial Sequence
  mRNA product Design g-1 comprising derived and/or modified sequence from HRSV(A2)__F_DSCav1_mut4 (opt1)
gggagacuuucccauucuguagcagaauuugguguugccuguggucuuggucccgcggagaagcuuaccauggagcugcucauccugaaggccaacgccaucaccaccauccugacggcggugaccuucugcuucgccagcggccagaacaucaccgaggaguucuaccaguccacgugcagcgccgucuccaagggguaccucagcgcccugcggaccggcugguacaccuccgugaucaccaucgagcugagcaacaucaaggagaacaagugcaacgggaccgacgccaaggugaagcucaucaagcaggagcuggacaaguacaagaacgcggucacggagcugcagcuccugaugcaguccaccccggcaaccggcuccggcuccgccaucugcagcggcgucgccgugugcaaggugcugcaccucgagggggaggucaacaagaucaagagcgcccugcuguccaccaacaaggccguggugagccucuccaacggcgucagcgugcugaccuucaaggugcuggaccucaagaacuacaucgacaagcagcugcugcccauccugaacaagcagagcugcuccaucagcaacaucgagacggugaucgaguuccagcagaagaacaaccggcuccuggagaucacccgcgaguucagcgugaacgccggggucaccacccccguguccacguacaugcugaccaacagcgagcuccugucccugaucaacgacaugccgaucaccaacgaccagaagaagcucaugagcaacaacgugcagaucguccggcagcaguccuacagcaucaugugcaucaucaaggaggaggugcuggcguacgugguccagcugccccucuacggcgugaucgacacccccugcuggaagcugcacacgagcccccugugcaccaccaacaccaaggagggguccaacaucugccucacgcgcaccgaccggggcugguacugcgacaacgccggcagcgucuccuucuucccgcaggccgagaccugcaaggugcagagcaaccgcguguucugcgacaccaugaacucccggacgcugcccagcgagguaaaccucugcaacgucgacaucuucaaccccaaguacgacugcaagaucaugaccuccaagaccgacgugagcuccagcgugaucaccucccugggggccaucgucagcugcuacggcaagacgaagugcaccgccagcaacaagaaccgggggaucaucaagaccuucuccaacggcugcgacuacgugagcaacaagggcguggacaccguguccgucgggaacacccuguacugcgugaacaagcaggagggcaagagccucuacgugaagggggagcccaucaucaacuucuacgacccgcuggucuuccccuccgacgaguucgacgcgagcaucucccaggugaacgagaagaucaaccagagccuggccuucauccgcaaguccgacgagcugcuccacaacgugaacgccggcaagagcacgaccaacaucaugaucaccaccaucaucaucgucaucaucgugauccugcugucccucaucgccguggggcugcugcucuacugcaaggcccggagcacgcccgucacccuguccaaggaccagcugagcggcaucaacaacaucgcguucuccaacugaggacuaguggaagcauuuuccuggcugauuaaaagaaauuacucagcuauggucaucuguuccuguuagaaggcuaugcagcauauuauauacuaugcgcauguuaugaaaugcauaauaaaaaauuuuaaaaaaucuaaaagaucuaaaaaaaaaaaaaaaaaaaaaaaaaaaaaaaaaaaaaaaaaaaaaaaaaaaaaaaaaaaaaaaaugcaucccccccccccccccccccccccccccccccaaaggcucuuuucagagccaccagaauu

SEQ ID NO: 4846 - RNA, 1952 nt, Artificial Sequence
  mRNA product Design g-1 comprising derived and/or modified sequence from HRSV(A2)__F_DSCav1_mut4 (opt1)
gggagacuuucccauucuguagcagaauuugguguugccuguggucuuggucccgcggagaagcuuaccauggagcugcucauccugaaggccaacgccaucaccaccauccugacggcggugaccuucugcuucgccagcggccagaacaucaccgaggaguucuaccaguccacgugcagcgccgucuccaagggguaccucagcgcccugcgcaccggcugguacaccuccgugaucaccaucgagcugagcaacaucaaggagaacaagugcaacgggaccgacgccaaggugaagcucaucaagcaggagcuggacaaguacaagaacgcggucacggagcugcagcuccugaugcaguccacccccgccaccggcagcggguccgccaucugcagcggcguggccgugugcaagguccugcaccucgagggcgaggugaacaagaucaaguccgcgcugcugagcaccaacaaggccguggucucccucagcaacgggguguccgugcugacguucaagguccuggaccucaagaacuacaucgacaagcagcugcugccgauccucaacaagcagagcugcuccaucagcaacaucgagaccgugaucgaguuccagcagaagaacaaccggcugcuggagaucacccgcgaguucuccgugaacgccggcgucaccacgcccgugagcaccuacaugcucaccaacagcgagcugcugucccucaucaacgacaugcccaucaccaacgaccagaagaagcugaugagcaacaacgugcagaucguccggcagcaguccuacagcaucaugugcaucaucaaggaggaggugcuggccuacgugguccagcucccccuguacggggugaucgacacgccgugcuggaagcugcacaccagcccccucugcaccaccaacacgaaggagggcuccaacaucugccugacccgcaccgaccgggggugguacugcgacaacgccggcuccgugagcuucuucccccaggcggagaccugcaagguccaguccaaccgcguguucugcgacacgaugaacagccggacccuccccuccgaggucaaccugugcaacguggacaucuucaacccgaaguacgacugcaagaucaugaccagcaagaccgacguguccagcuccgucaucacgagccugggcgccaucguguccugcuacgggaagaccaagugcaccgccagcaacaagaaccggggcaucaucaagaccuucuccaacgggugcgacuacgugagcaacaagggcgucgacacggugagcgugggcaacacccucuacugcgucaacaagcaggaggggaagucccuguacgugaagggcgagcccaucaucaacuucuacgacccccugguguuccccagcgacgaguucgacgccuccaucagccaggucaacgagaagaucaaccagucccucgccuucauccgcaagagcgacgagcugcugcacaacgugaacgcggggaaguccaccaccaacaucaugaucaccacgaucaucaucgugaucaucgucauccuccugagccugaucgccgugggccuccugcuguacugcaaggcccgguccaccccggugacccugagcaaggaccagcucuccgggaucaacaacaucgccuucagcaacugaggacuaguggaagcauuuuccuggcugauuaaaagaaauuacucagcuauggucaucuguuccuguuagaaggcuaugcagcauauuauauacuaugcgcauguuaugaaaugcauaauaaaaaauuuuaaaaaaucuaaaagaucuaaaaaaaaaaaaaaaaaaaaaaaaaaaaaaaaaaaaaaaaaaaaaaaaaaaaaaaaaaaaaaaaugcaucccccccccccccccccccccccccccccccaaaggcucuuuucagagccaccagaauu

SEQ ID NO: 4847 - RNA, 1952 nt, Artificial Sequence
  mRNA product Design g-1 comprising derived and/or modified sequence from HRSV(A2)__F_DSCav1_mut4 (opt2)
gggagacuuucccauucuguagcagaauuugguguugccuguggucuuggucccgcggagaagcuuaccauggagcuccucauccucaaggccaacgccaucaccaccauccucaccgccgucaccuucugcuucgccuccggccagaacaucaccgaggaguucuaccaguccaccugcuccgccgucuccaagggcuaccucuccgcccuccgcaccggcugguacaccuccgucaucaccaucgagcucuccaacaucaaggagaacaagugcaacggcaccgacgccaaggucaagcucaucaagcaggagcucgacaaguacaagaacgccgucaccgagcuccagcuccucaugcaguccacccccgccaccggcuccggcuccgccaucugcuccggcgucgccgucugcaagguccuccaccucgagggcgaggucaacaagaucaaguccgcccuccucuccaccaacaaggccgucgucucccucuccaacggcgucuccguccucaccuucaagguccucgaccucaagaacuacaucgacaagcagcuccuccccauccucaacaagcaguccugcuccaucuccaacaucgagaccgucaucgaguuccagcagaagaacaaccgccuccucgagaucacccgcgaguucuccgucaacgccggcgucaccacccccgucuccaccuacaugcucaccaacuccgagcuccucucccucaucaacgacaugcccaucaccaacgaccagaagaagcucauguccaacaacguccagaucguccgccagcaguccuacuccaucaugugcaucaucaaggaggagguccucgccuacgucguccagcucccccucuacggcgucaucgacacccccugcuggaagcuccacaccuccccccucugcaccaccaacaccaaggagggcuccaacaucugccucacccgcaccgaccgcggcugguacugcgacaacgccggcuccgucuccuucuucccccaggccgagaccugcaagguccaguccaaccgcgucuucugcgacaccaugaacucccgcacccuccccuccgaggucaaccucugcaacgucgacaucuucaaccccaaguacgacugcaagaucaugaccuccaagaccgacgucuccuccuccgucaucaccucccucggcgccaucgucuccugcuacggcaagaccaagugcaccgccuccaacaagaaccgcggcaucaucaagaccuucuccaacggcugcgacuacgucuccaacaagggcgucgacaccgucuccgucggcaacacccucuacugcgucaacaagcaggagggcaagucccucuacgucaagggcgagcccaucaucaacuucuacgacccccucgucuuccccuccgacgaguucgacgccuccaucucccaggucaacgagaagaucaaccagucccucgccuucauccgcaaguccgacgagcuccuccacaacgucaacgccggcaaguccaccaccaacaucaugaucaccaccaucaucaucgucaucaucgucauccuccucucccucaucgccgucggccuccuccucuacugcaaggcccgcuccacccccgucacccucuccaaggaccagcucuccggcaucaacaacaucgccuucuccaacugaggacuaguggaagcauuuuccuggcugauuaaaagaaauuacucagcuauggucaucuguuccuguuagaaggcuaugcagcauauuauauacuaugcgcauguuaugaaaugcauaauaaaaaauuuuaaaaaaucuaaaagaucuaaaaaaaaaaaaaaaaaaaaaaaaaaaaaaaaaaaaaaaaaaaaaaaaaaaaaaaaaaaaaaaaugcaucccccccccccccccccccccccccccccccaaaggcucuuuucagagccaccagaauu

SEQ ID NO: 4848 - RNA, 1952 nt, Artificial Sequence
  mRNA product Design g-1 comprising derived and/or modified sequence from HRSV(A2)__F_DSCav1_mut4 (opt3)
gggagacuuucccauucuguagcagaauuugguguugccuguggucuuggucccgcggagaagcuuaccauggagcugcucauccuuaaggccaacgcuauuaccacaauacugacugcagugacguucugcuuugccagcggccagaauaucaccgaagaguucuaccaauccacauguucugcggucucaaaaggguauuugagugcuuuaagaacuggaugguacaccagcguuauuacaaucgaacuguccaacauuaaggagaauaaaugcaacgguaccgacgccaaggugaaacuaaucaagcaggaacucgauaaguauaaaaaugcaguaacugagcugcagcuucugaugcagucuacacccgccaccggcucggggucagcuauauguagcggaguggcagucugcaagguguugcaccucgagggcgaaguuaacaaaaucaagagugcccugcuguccacgaauaaagcuguggucucucucagcaacgguguguccguauuaacuuuuaagguucuggaccuuaagaauuacauugauaaacaauugcugccuauccuaaacaagcagucauguaguauuagcaauaucgagaccgugauagaguuccagcagaaaaacaauaggcuccuggaaauuacacgggaguuuucugucaacgccggggugacuaccccaguguccacauauaugcuuaccaauucagaacuguugagccucaucaacgacaugccgauuacgaacgaucaaaagaaacugaugaguaauaacguccagaucguucgccagcagucuuacuccaucaugugcauuauaaaggaggaaguguuagcguauguagugcaacugccccucuacggagucaucgacacuccuuguuggaaacuucauacaagcccacugugcaccacuaauacaaaggagggcucgaacauuuguuugacccgaacggaucguggcugguacugcgacaaugcagggucuguguccuucuuuccccaggccgaaaccuguaagguucagucaaacagaguguucugcgauacaaugaauaguagaacucugccuagcgaggucaaccucugcaauguggacaucuuuaacccaaaauaugauuguaagauaaugaccuccaaaacagacguaucuagcucaguuauuaccagucugggagcuaucguguccugcuacgguaagacuaaauguacagccagcaauaagaacaggggcaucauuaagaccuucucuaaugggugcgauuaugucucaaacaaaggaguggacacugucagugugggcaauacgcuuuacuguguuaacaagcaagaggguaaaagccuguaugugaagggggaacccaucauuaacuuuuacgacccuuugguauucccauccgaugaguuugacgcaucuauaucgcaggucaaugagaaaaucaaccagagccucgcuuucauucggaaguccgaugaacuguuacacaaugugaacgccggaaagucaacaaccaauaucaugaucacuaccauuauaaucguuauuaucgugauucugcuaagucucaucgcggucggccugcuuuuguauugcaaagcccgcucuacaccggugacccugagcaaggaccagcucuccggcauaaacaauaucgcauucucaaacugaggacuaguggaagcauuuuccuggcugauuaaaagaaauuacucagcuauggucaucuguuccuguuagaaggcuaugcagcauauuauauacuaugcgcauguuaugaaaugcauaauaaaaaauuuuaaaaaaucuaaaagaucuaaaaaaaaaaaaaaaaaaaaaaaaaaaaaaaaaaaaaaaaaaaaaaaaaaaaaaaaaaaaaaaaugcaucccccccccccccccccccccccccccccccaaaggcucuuuucagagccaccagaauu

SEQ ID NO: 4849 - RNA, 1952 nt, Artificial Sequence
  mRNA product Design g-1 comprising derived and/or modified sequence from HRSV(A2)__F_DSCav1_mut4 (opt4)
gggagacuuucccauucuguagcagaauuugguguugccuguggucuuggucccgcggagaagcuuaccauggagcugcugauccugaaggccaacgccaucaccaccauccugaccgccgugaccuucugcuucgccagcggccagaacaucaccgaggaguucuaccagagcaccugcagcgccgugagcaagggcuaccugagcgcccugagaaccggcugguacaccagcgugaucaccaucgagcugagcaacaucaaggagaacaagugcaacggcaccgacgccaaggugaagcugaucaagcaggagcuggacaaguacaagaacgccgugaccgagcugcagcugcugaugcagagcacccccgccaccggcagcggcagcgccaucugcagcggcguggccgugugcaaggugcugcaccuggagggcgaggugaacaagaucaagagcgcccugcugagcaccaacaaggccguggugagccugagcaacggcgugagcgugcugaccuucaaggugcuggaccugaagaacuacaucgacaagcagcugcugcccauccugaacaagcagagcugcagcaucagcaacaucgagaccgugaucgaguuccagcagaagaacaacagacugcuggagaucaccagagaguucagcgugaacgccggcgugaccacccccgugagcaccuacaugcugaccaacagcgagcugcugagccugaucaacgacaugcccaucaccaacgaccagaagaagcugaugagcaacaacgugcagaucgugagacagcagagcuacagcaucaugugcaucaucaaggaggaggugcuggccuacguggugcagcugccccuguacggcgugaucgacacccccugcuggaagcugcacaccagcccccugugcaccaccaacaccaaggagggcagcaacaucugccugaccagaaccgacagaggcugguacugcgacaacgccggcagcgugagcuucuucccccaggccgagaccugcaaggugcagagcaacagaguguucugcgacaccaugaacagcagaacccugcccagcgaggugaaccugugcaacguggacaucuucaaccccaaguacgacugcaagaucaugaccagcaagaccgacgugagcagcagcgugaucaccagccugggcgccaucgugagcugcuacggcaagaccaagugcaccgccagcaacaagaacagaggcaucaucaagaccuucagcaacggcugcgacuacgugagcaacaagggcguggacaccgugagcgugggcaacacccuguacugcgugaacaagcaggagggcaagagccuguacgugaagggcgagcccaucaucaacuucuacgacccccugguguuccccagcgacgaguucgacgccagcaucagccaggugaacgagaagaucaaccagagccuggccuucaucagaaagagcgacgagcugcugcacaacgugaacgccggcaagagcaccaccaacaucaugaucaccaccaucaucaucgugaucaucgugauccugcugagccugaucgccgugggccugcugcuguacugcaaggccagaagcacccccgugacccugagcaaggaccagcugagcggcaucaacaacaucgccuucagcaacugaggacuaguggaagcauuuuccuggcugauuaaaagaaauuacucagcuauggucaucuguuccuguuagaaggcuaugcagcauauuauauacuaugcgcauguuaugaaaugcauaauaaaaaauuuuaaaaaaucuaaaagaucuaaaaaaaaaaaaaaaaaaaaaaaaaaaaaaaaaaaaaaaaaaaaaaaaaaaaaaaaaaaaaaaaugcaucccccccccccccccccccccccccccccccaaaggcucuuuucagagccaccagaauu

SEQ ID NO: 4850 - RNA, 1952 nt, Artificial Sequence
  mRNA product Design g-1 comprising derived and/or modified sequence from HRSV(A2)__F_DSCav1_mut4 (opt5)
gggagacuuucccauucuguagcagaauuugguguugccuguggucuuggucccgcggagaagcuuaccauggagcugcucauccugaaggccaacgcuauuaccacaauccuuacggccgugaccuucugcuuugcgagcggccagaauauuacagaagaguucuaccaauccaccuguucugcugucagcaaaggguaucuguccgcccucagaacaggaugguacaccucuguuaucacaauugaacugagcaacaucaaggagaauaaaugcaacggcaccgacgccaaggugaaacuuaucaagcaggaacuggauaaguauaaaaaugcugugacggagcuccagcugcugaugcaguccacccccgccacagggucuggaagcgcuauuuguuccggcgucgccgugugcaagguucuccaccuggagggggaagugaacaaaaucaagagcgcgcuucugucuaccaauaaagccgucgugucccucagcaacggaguuucugugcugacauuuaagguccuugaccugaagaauuacauugauaaacaacuccugccuauccugaacaagcaguccuguagcauuucuaauaucgagaccgugauugaguuccagcagaaaaacaaucggcuccuggaaaucacgcgcgaguuuuccgugaacgcuggcgucacaaccccgguuagcacauauaugcuuaccaauuccgaacugcucucucugaucaacgacaugcccauuaccaacgaucaaaagaaacuuaugagcaauaacgugcagaucgugagacagcaguccuacagcauuaugugcaucauuaaggaggaaguccuggccuaugugguucaacucccucuguacggcgugaucgacacacccuguuggaaacugcauacgucuccucucugcaccacaaauaccaaggagggguccaacaucugucugacacggaccgaucgcggaugguacugcgacaaugcuggcagcgucucuuucuuuccccaggccgaaacguguaaggugcagagcaacagaguuuucugcgauacaaugaacuccagaacccugccuucugaggugaaucucugcaaugucgacauuuuuaacccgaaauaugauuguaagaucaugaccagcaaaacagacguguccagcucugucauuaccucccugggggcgaucgugagcugcuacggaaagacaaaauguacggccucuaauaagaaccggggcauuaucaagaccuucuccaaugggugcgauuauguuagcaacaaaggaguggacacagucuccgugggcaauacccuuuacuguguuaacaagcaagagggcaaaucucuguaugugaagggggaacccaucauuaacuuuuacgacccucucgucuuccccagcgaugaguuugacgcuuccaucucucaggugaaugagaaaauuaaccagagccuggccuucauccgcaaguccgaugaacugcuccacaaugugaacgcuggaaagagcacaaccaauauuaugaucacgaccauuaucaucguuauuaucgucauucugcuuucucugaucgccgugggccuccugcuguauugcaaagccagauccacaccugugacccuuagcaaggaccagcucucugggauuaacaauaucgcuuucuccaacugaggacuaguggaagcauuuuccuggcugauuaaaagaaauuacucagcuauggucaucuguuccuguuagaaggcuaugcagcauauuauauacuaugcgcauguuaugaaaugcauaauaaaaaauuuuaaaaaaucuaaaagaucuaaaaaaaaaaaaaaaaaaaaaaaaaaaaaaaaaaaaaaaaaaaaaaaaaaaaaaaaaaaaaaaaugcaucccccccccccccccccccccccccccccccaaaggcucuuuucagagccaccagaauu

SEQ ID NO: 4851 - RNA, 1952 nt, Artificial Sequence
  mRNA product Design g-1 comprising derived and/or modified sequence from HRSV(A2)__F_DSCav1_mut4 (opt6)
gggagacuuucccauucuguagcagaauuugguguugccuguggucuuggucccgcggagaagcuuaccauggaacuucuaauacucaaagccaacgcaauaacaacaauauuaacagccguaacauuuugcuucgcaucaggucaaaacauaacagaagaguucuaccaauccacaugcucagcaguaucaaaaggauauuuaagugcucuaagaacaggaugguacacauccguaauaacaaucgaacuaucaaacauaaaagaaaauaaauguaauggaacagacgccaaaguaaaauuaaucaaacaagaacuagacaaauacaaaaacgcaguuacugaauuacaauuauuaaugcaaucaacaccggccacaggaucuggaucagcaauaugcucaggaguagcagucugcaaaguauuacaccuagaaggggaaguuaauaaaaucaaaucagcauuacuauccaccaacaaagcgguaguuucacucuccaacggcguaucugucuuaacauucaaaguauuagaccuaaaaaacuacauugacaaacaacuacuaccaauccuaaacaaacaaucauguuccauaagcaauauagaaacaguaauagaauuucaacaaaaaaacaacagacuauuagaaauaacaagagaauuuuccgucaaugcaggaguuacuaccccugucuccaccuauaugcuaaccaauuccgaacucuuaucauuaauaaacgacaugccuaucacaaaugaccaaaaaaaauuaaugagcaacaacguacaaauaguacgacaacaaucauacucaaucaugugcauaauaaaagaagaaguccuagcauacguuguacaacuaccacuauacggagucauagauaccccaugcuggaaacuccauacaagcccacuaugcacuacaaacacaaaagaaggcucuaauauaugucuaacaagaacagaccgaggaugguacugcgauaaugccggcucagucucauucuuuccgcaagccgaaacuuguaaaguacaaaguaacagaguauuuugugacaccaugaacucaagaacccucccaagcgaagucaaucuaugcaacguugauauauucaaucccaaauacgacugcaaaaucaugaccucaaaaacagacgucagcucauccguuauaacaucacuaggagccaucguaucuugcuauggaaaaacaaaaugcacagcaagcaauaaaaacagaggcauaauaaaaacauucucaaauggaugcgacuacguaucaaacaaaggagucgacacaguuuccguaggaaacacuuuauacugcguaaacaaacaagaaggaaaaucauuauacgucaaaggugaaccaauaauaaacuucuacgauccacuuguauucccaucagacgaauuugacgcaucaauuucacaaguaaacgaaaaaauaaaccaaucacucgcauucauaagaaaaucagaugaacuacuacauaacguaaacgcaggaaaauccacaacaaacaucaugauaacaaccaucauaaucguaauaaucguaauacuauuaucccuaauugcaguaggauuacucuuauauugcaaagcaagaucaacaccaguaacccucaguaaagaccaacuauccggaauaaauaacaucgcauucucaaacuaaggacuaguggaagcauuuuccuggcugauuaaaagaaauuacucagcuauggucaucuguuccuguuagaaggcuaugcagcauauuauauacuaugcgcauguuaugaaaugcauaauaaaaaauuuuaaaaaaucuaaaagaucuaaaaaaaaaaaaaaaaaaaaaaaaaaaaaaaaaaaaaaaaaaaaaaaaaaaaaaaaaaaaaaaaugcaucccccccccccccccccccccccccccccccaaaggcucuuuucagagccaccagaauu

SEQ ID NO: 4852 - RNA, 1952 nt, Artificial Sequence
  mRNA product Design g-1 comprising derived and/or modified sequence from HRSV(A2)__F_DSCav1_mut4 (opt11)
gggagacuuucccauucuguagcagaauuugguguugccuguggucuuggucccgcggagaagcuuaccauggaacugcucauccucaaagccaacgccaucaccaccauucuuaccgccgucacauucugcuucgccucaggccaaaacaucaccgaagaauuuuaccaauccacuuguucagccgucucaaaaggauaccuaucagcccuccguaccggcugguacaccucggucauaacaauagaacucuccaacauaaaagaaaacaaaugcaacggcaccgacgccaaggucaaacugauaaaacaagaacuugauaaauacaaaaacgccgucacugaacuccaacuccucaugcaauccacucccgcuacuggcucuggcuccgccaucugcucuggcgucgccgucuguaaaguacuccaccucgaaggggaagucaacaaaaucaaaucagcccuccuuagcaccaacaaggccgucgucucccucucaaacggagucagcguccucaccuucaagguccucgaccucaagaacuacaucgacaaacaacuccugcccauccuaaauaaacaauccugcucuaucuccaauaucgaaaccguuauagaguuccaacagaaaaacaaccgacuccucgaaaucacccgcgaguucuccgucaacgcaggcgucaccaccccugugucaaccuacaugcucaccaacagcgaacuacucucacucaucaaugacaugcccaucaccaacgaccaaaagaaacucauguccaacaacguccaaaucguacgucaacaauccuacagcaucaugugcaucauaaaagaagaaguccucgccuacgucguccaacuuccccucuacggcgucauagacacccccugcuggaaacugcauaccucaccccuaugcaccaccaacacuaaagaaggcuccaacaucugccucacccgcacggaccgcggcugguacugcgacaacgccggcuccgucuccuucuucccccaagccgaaacuuguaaaguccaauccaacagagucuucugcgacaccaugaacucuagaacgcugccauccgagguaaaccuaugcaacgucgacaucuucaaucccaaauacgacugcaagaucaugaccucaaaaaccgacguauccuccucaguaaucaccagucucggagcuaucgucuccugcuacggcaaaaccaaaugcacggccucuaacaaaaaccgcggcaucaucaaaaccuucucaaacggaugcgacuacgucagcaacaaaggcguagauaccgucucugucggcaacacacuguacugcguaaacaagcaagaaggaaaaucccucuacguaaaaggcgaacccaucaucaacuucuacgacccccucguuuuccccucagaugaauuugacgccucgauaucacaagucaacgaaaagauaaaucagucccucgccuucauccgaaaauccgacgaacuccuccacaacguuaacgcaggaaaguccaccacaaacaucaugauaacuacaaucauaauagucauuaucgucauacuccucucccuaaucgccguaggccugcuacucuacugcaaagcccgcucaacccccgucacucucucaaaagaccaacucuccggcaucaauaacaucgccuucucaaacuaaggacuaguggaagcauuuuccuggcugauuaaaagaaauuacucagcuauggucaucuguuccuguuagaaggcuaugcagcauauuauauacuaugcgcauguuaugaaaugcauaauaaaaaauuuuaaaaaaucuaaaagaucuaaaaaaaaaaaaaaaaaaaaaaaaaaaaaaaaaaaaaaaaaaaaaaaaaaaaaaaaaaaaaaaaugcaucccccccccccccccccccccccccccccccaaaggcucuuuucagagccaccagaauu

SEQ ID NO: 4853 - RNA, 1967 nt, Artificial Sequence
  mRNA product Design g-2 comprising derived and/or modified sequence from HRSV(A2)__F_DSCav1_mut4 (opt1)
gggagaguccgcucagccagguugcagaagcggcuuagcguguguccuaaucuucucucugcguguagguaggccugugccgcaaacaagcuuaccauggagcugcucauccugaaggccaacgccaucaccaccauccugacggcggugaccuucugcuucgccagcggccagaacaucaccgaggaguucuaccaguccacgugcagcgccgucuccaagggguaccucagcgcccugcggaccggcugguacaccuccgugaucaccaucgagcugagcaacaucaaggagaacaagugcaacgggaccgacgccaaggugaagcucaucaagcaggagcuggacaaguacaagaacgcggucacggagcugcagcuccugaugcaguccaccccggcaaccggcuccggcuccgccaucugcagcggcgucgccgugugcaaggugcugcaccucgagggggaggucaacaagaucaagagcgcccugcuguccaccaacaaggccguggugagccucuccaacggcgucagcgugcugaccuucaaggugcuggaccucaagaacuacaucgacaagcagcugcugcccauccugaacaagcagagcugcuccaucagcaacaucgagacggugaucgaguuccagcagaagaacaaccggcuccuggagaucacccgcgaguucagcgugaacgccggggucaccacccccguguccacguacaugcugaccaacagcgagcuccugucccugaucaacgacaugccgaucaccaacgaccagaagaagcucaugagcaacaacgugcagaucguccggcagcaguccuacagcaucaugugcaucaucaaggaggaggugcuggcguacgugguccagcugccccucuacggcgugaucgacacccccugcuggaagcugcacacgagcccccugugcaccaccaacaccaaggagggguccaacaucugccucacgcgcaccgaccggggcugguacugcgacaacgccggcagcgucuccuucuucccgcaggccgagaccugcaaggugcagagcaaccgcguguucugcgacaccaugaacucccggacgcugcccagcgagguaaaccucugcaacgucgacaucuucaaccccaaguacgacugcaagaucaugaccuccaagaccgacgugagcuccagcgugaucaccucccugggggccaucgucagcugcuacggcaagacgaagugcaccgccagcaacaagaaccgggggaucaucaagaccuucuccaacggcugcgacuacgugagcaacaagggcguggacaccguguccgucgggaacacccuguacugcgugaacaagcaggagggcaagagccucuacgugaagggggagcccaucaucaacuucuacgacccgcuggucuuccccuccgacgaguucgacgcgagcaucucccaggugaacgagaagaucaaccagagccuggccuucauccgcaaguccgacgagcugcuccacaacgugaacgccggcaagagcacgaccaacaucaugaucaccaccaucaucaucgucaucaucgugauccugcugucccucaucgccguggggcugcugcucuacugcaaggcccggagcacgcccgucacccuguccaaggaccagcugagcggcaucaacaacaucgcguucuccaacugaggacuaguaauaaggaaacuguaugaaugucugugggcaggaagugaagagauccuucuguaaagguuuuuggaauuaugucugcugaauaauaaacuuuuuugaaauaauaaaucugguagaaaaaugagaucuaaaaaaaaaaaaaaaaaaaaaaaaaaaaaaaaaaaaaaaaaaaaaaaaaaaaaaaaaaaaaaaaugcaucccccccccccccccccccccccccccccccaaaggcucuuuucagagccaccagaauu

SEQ ID NO: 4854 - RNA, 1967 nt, Artificial Sequence
  mRNA product Design g-2 comprising derived and/or modified sequence from HRSV(A2)__F_DSCav1_mut4 (opt1)
gggagaguccgcucagccagguugcagaagcggcuuagcguguguccuaaucuucucucugcguguagguaggccugugccgcaaacaagcuuaccauggagcugcucauccugaaggccaacgccaucaccaccauccugacggcggugaccuucugcuucgccagcggccagaacaucaccgaggaguucuaccaguccacgugcagcgccgucuccaagggguaccucagcgcccugcgcaccggcugguacaccuccgugaucaccaucgagcugagcaacaucaaggagaacaagugcaacgggaccgacgccaaggugaagcucaucaagcaggagcuggacaaguacaagaacgcggucacggagcugcagcuccugaugcaguccacccccgccaccggcagcggguccgccaucugcagcggcguggccgugugcaagguccugcaccucgagggcgaggugaacaagaucaaguccgcgcugcugagcaccaacaaggccguggucucccucagcaacgggguguccgugcugacguucaagguccuggaccucaagaacuacaucgacaagcagcugcugccgauccucaacaagcagagcugcuccaucagcaacaucgagaccgugaucgaguuccagcagaagaacaaccggcugcuggagaucacccgcgaguucuccgugaacgccggcgucaccacgcccgugagcaccuacaugcucaccaacagcgagcugcugucccucaucaacgacaugcccaucaccaacgaccagaagaagcugaugagcaacaacgugcagaucguccggcagcaguccuacagcaucaugugcaucaucaaggaggaggugcuggccuacgugguccagcucccccuguacggggugaucgacacgccgugcuggaagcugcacaccagcccccucugcaccaccaacacgaaggagggcuccaacaucugccugacccgcaccgaccgggggugguacugcgacaacgccggcuccgugagcuucuucccccaggcggagaccugcaagguccaguccaaccgcguguucugcgacacgaugaacagccggacccuccccuccgaggucaaccugugcaacguggacaucuucaacccgaaguacgacugcaagaucaugaccagcaagaccgacguguccagcuccgucaucacgagccugggcgccaucguguccugcuacgggaagaccaagugcaccgccagcaacaagaaccggggcaucaucaagaccuucuccaacgggugcgacuacgugagcaacaagggcgucgacacggugagcgugggcaacacccucuacugcgucaacaagcaggaggggaagucccuguacgugaagggcgagcccaucaucaacuucuacgacccccugguguuccccagcgacgaguucgacgccuccaucagccaggucaacgagaagaucaaccagucccucgccuucauccgcaagagcgacgagcugcugcacaacgugaacgcggggaaguccaccaccaacaucaugaucaccacgaucaucaucgugaucaucgucauccuccugagccugaucgccgugggccuccugcuguacugcaaggcccgguccaccccggugacccugagcaaggaccagcucuccgggaucaacaacaucgccuucagcaacugaggacuaguaauaaggaaacuguaugaaugucugugggcaggaagugaagagauccuucuguaaagguuuuuggaauuaugucugcugaauaauaaacuuuuuugaaauaauaaaucugguagaaaaaugagaucuaaaaaaaaaaaaaaaaaaaaaaaaaaaaaaaaaaaaaaaaaaaaaaaaaaaaaaaaaaaaaaaaugcaucccccccccccccccccccccccccccccccaaaggcucuuuucagagccaccagaauu

SEQ ID NO: 4855 - RNA, 1967 nt, Artificial Sequence
  mRNA product Design g-2 comprising derived and/or modified sequence from HRSV(A2)__F_DSCav1_mut4 (opt2)
gggagaguccgcucagccagguugcagaagcggcuuagcguguguccuaaucuucucucugcguguagguaggccugugccgcaaacaagcuuaccauggagcuccucauccucaaggccaacgccaucaccaccauccucaccgccgucaccuucugcuucgccuccggccagaacaucaccgaggaguucuaccaguccaccugcuccgccgucuccaagggcuaccucuccgcccuccgcaccggcugguacaccuccgucaucaccaucgagcucuccaacaucaaggagaacaagugcaacggcaccgacgccaaggucaagcucaucaagcaggagcucgacaaguacaagaacgccgucaccgagcuccagcuccucaugcaguccacccccgccaccggcuccggcuccgccaucugcuccggcgucgccgucugcaagguccuccaccucgagggcgaggucaacaagaucaaguccgcccuccucuccaccaacaaggccgucgucucccucuccaacggcgucuccguccucaccuucaagguccucgaccucaagaacuacaucgacaagcagcuccuccccauccucaacaagcaguccugcuccaucuccaacaucgagaccgucaucgaguuccagcagaagaacaaccgccuccucgagaucacccgcgaguucuccgucaacgccggcgucaccacccccgucuccaccuacaugcucaccaacuccgagcuccucucccucaucaacgacaugcccaucaccaacgaccagaagaagcucauguccaacaacguccagaucguccgccagcaguccuacuccaucaugugcaucaucaaggaggagguccucgccuacgucguccagcucccccucuacggcgucaucgacacccccugcuggaagcuccacaccuccccccucugcaccaccaacaccaaggagggcuccaacaucugccucacccgcaccgaccgcggcugguacugcgacaacgccggcuccgucuccuucuucccccaggccgagaccugcaagguccaguccaaccgcgucuucugcgacaccaugaacucccgcacccuccccuccgaggucaaccucugcaacgucgacaucuucaaccccaaguacgacugcaagaucaugaccuccaagaccgacgucuccuccuccgucaucaccucccucggcgccaucgucuccugcuacggcaagaccaagugcaccgccuccaacaagaaccgcggcaucaucaagaccuucuccaacggcugcgacuacgucuccaacaagggcgucgacaccgucuccgucggcaacacccucuacugcgucaacaagcaggagggcaagucccucuacgucaagggcgagcccaucaucaacuucuacgacccccucgucuuccccuccgacgaguucgacgccuccaucucccaggucaacgagaagaucaaccagucccucgccuucauccgcaaguccgacgagcuccuccacaacgucaacgccggcaaguccaccaccaacaucaugaucaccaccaucaucaucgucaucaucgucauccuccucucccucaucgccgucggccuccuccucuacugcaaggcccgcuccacccccgucacccucuccaaggaccagcucuccggcaucaacaacaucgccuucuccaacugaggacuaguaauaaggaaacuguaugaaugucugugggcaggaagugaagagauccuucuguaaagguuuuuggaauuaugucugcugaauaauaaacuuuuuugaaauaauaaaucugguagaaaaaugagaucuaaaaaaaaaaaaaaaaaaaaaaaaaaaaaaaaaaaaaaaaaaaaaaaaaaaaaaaaaaaaaaaaugcaucccccccccccccccccccccccccccccccaaaggcucuuuucagagccaccagaauu

SEQ ID NO: 4856 - RNA, 1967 nt, Artificial Sequence
  mRNA product Design g-2 comprising derived and/or modified sequence from HRSV(A2)__F_DSCav1_mut4 (opt3)
gggagaguccgcucagccagguugcagaagcggcuuagcguguguccuaaucuucucucugcguguagguaggccugugccgcaaacaagcuuaccauggagcugcucauccuuaaggccaacgcuauuaccacaauacugacugcagugacguucugcuuugccagcggccagaauaucaccgaagaguucuaccaauccacauguucugcggucucaaaaggguauuugagugcuuuaagaacuggaugguacaccagcguuauuacaaucgaacuguccaacauuaaggagaauaaaugcaacgguaccgacgccaaggugaaacuaaucaagcaggaacucgauaaguauaaaaaugcaguaacugagcugcagcuucugaugcagucuacacccgccaccggcucggggucagcuauauguagcggaguggcagucugcaagguguugcaccucgagggcgaaguuaacaaaaucaagagugcccugcuguccacgaauaaagcuguggucucucucagcaacgguguguccguauuaacuuuuaagguucuggaccuuaagaauuacauugauaaacaauugcugccuauccuaaacaagcagucauguaguauuagcaauaucgagaccgugauagaguuccagcagaaaaacaauaggcuccuggaaauuacacgggaguuuucugucaacgccggggugacuaccccaguguccacauauaugcuuaccaauucagaacuguugagccucaucaacgacaugccgauuacgaacgaucaaaagaaacugaugaguaauaacguccagaucguucgccagcagucuuacuccaucaugugcauuauaaaggaggaaguguuagcguauguagugcaacugccccucuacggagucaucgacacuccuuguuggaaacuucauacaagcccacugugcaccacuaauacaaaggagggcucgaacauuuguuugacccgaacggaucguggcugguacugcgacaaugcagggucuguguccuucuuuccccaggccgaaaccuguaagguucagucaaacagaguguucugcgauacaaugaauaguagaacucugccuagcgaggucaaccucugcaauguggacaucuuuaacccaaaauaugauuguaagauaaugaccuccaaaacagacguaucuagcucaguuauuaccagucugggagcuaucguguccugcuacgguaagacuaaauguacagccagcaauaagaacaggggcaucauuaagaccuucucuaaugggugcgauuaugucucaaacaaaggaguggacacugucagugugggcaauacgcuuuacuguguuaacaagcaagaggguaaaagccuguaugugaagggggaacccaucauuaacuuuuacgacccuuugguauucccauccgaugaguuugacgcaucuauaucgcaggucaaugagaaaaucaaccagagccucgcuuucauucggaaguccgaugaacuguuacacaaugugaacgccggaaagucaacaaccaauaucaugaucacuaccauuauaaucguuauuaucgugauucugcuaagucucaucgcggucggccugcuuuuguauugcaaagcccgcucuacaccggugacccugagcaaggaccagcucuccggcauaaacaauaucgcauucucaaacugaggacuaguaauaaggaaacuguaugaaugucugugggcaggaagugaagagauccuucuguaaagguuuuuggaauuaugucugcugaauaauaaacuuuuuugaaauaauaaaucugguagaaaaaugagaucuaaaaaaaaaaaaaaaaaaaaaaaaaaaaaaaaaaaaaaaaaaaaaaaaaaaaaaaaaaaaaaaaugcaucccccccccccccccccccccccccccccccaaaggcucuuuucagagccaccagaauu

SEQ ID NO: 4857 - RNA, 1967 nt, Artificial Sequence
  mRNA product Design g-2 comprising derived and/or modified sequence from HRSV(A2)__F_DSCav1_mut4 (opt4)
gggagaguccgcucagccagguugcagaagcggcuuagcguguguccuaaucuucucucugcguguagguaggccugugccgcaaacaagcuuaccauggagcugcugauccugaaggccaacgccaucaccaccauccugaccgccgugaccuucugcuucgccagcggccagaacaucaccgaggaguucuaccagagcaccugcagcgccgugagcaagggcuaccugagcgcccugagaaccggcugguacaccagcgugaucaccaucgagcugagcaacaucaaggagaacaagugcaacggcaccgacgccaaggugaagcugaucaagcaggagcuggacaaguacaagaacgccgugaccgagcugcagcugcugaugcagagcacccccgccaccggcagcggcagcgccaucugcagcggcguggccgugugcaaggugcugcaccuggagggcgaggugaacaagaucaagagcgcccugcugagcaccaacaaggccguggugagccugagcaacggcgugagcgugcugaccuucaaggugcuggaccugaagaacuacaucgacaagcagcugcugcccauccugaacaagcagagcugcagcaucagcaacaucgagaccgugaucgaguuccagcagaagaacaacagacugcuggagaucaccagagaguucagcgugaacgccggcgugaccacccccgugagcaccuacaugcugaccaacagcgagcugcugagccugaucaacgacaugcccaucaccaacgaccagaagaagcugaugagcaacaacgugcagaucgugagacagcagagcuacagcaucaugugcaucaucaaggaggaggugcuggccuacguggugcagcugccccuguacggcgugaucgacacccccugcuggaagcugcacaccagcccccugugcaccaccaacaccaaggagggcagcaacaucugccugaccagaaccgacagaggcugguacugcgacaacgccggcagcgugagcuucuucccccaggccgagaccugcaaggugcagagcaacagaguguucugcgacaccaugaacagcagaacccugcccagcgaggugaaccugugcaacguggacaucuucaaccccaaguacgacugcaagaucaugaccagcaagaccgacgugagcagcagcgugaucaccagccugggcgccaucgugagcugcuacggcaagaccaagugcaccgccagcaacaagaacagaggcaucaucaagaccuucagcaacggcugcgacuacgugagcaacaagggcguggacaccgugagcgugggcaacacccuguacugcgugaacaagcaggagggcaagagccuguacgugaagggcgagcccaucaucaacuucuacgacccccugguguuccccagcgacgaguucgacgccagcaucagccaggugaacgagaagaucaaccagagccuggccuucaucagaaagagcgacgagcugcugcacaacgugaacgccggcaagagcaccaccaacaucaugaucaccaccaucaucaucgugaucaucgugauccugcugagccugaucgccgugggccugcugcuguacugcaaggccagaagcacccccgugacccugagcaaggaccagcugagcggcaucaacaacaucgccuucagcaacugaggacuaguaauaaggaaacuguaugaaugucugugggcaggaagugaagagauccuucuguaaagguuuuuggaauuaugucugcugaauaauaaacuuuuuugaaauaauaaaucugguagaaaaaugagaucuaaaaaaaaaaaaaaaaaaaaaaaaaaaaaaaaaaaaaaaaaaaaaaaaaaaaaaaaaaaaaaaaugcaucccccccccccccccccccccccccccccccaaaggcucuuuucagagccaccagaauu

SEQ ID NO: 4858 - RNA, 1967 nt, Artificial Sequence
  mRNA product Design g-2 comprising derived and/or modified sequence from HRSV(A2)__F_DSCav1_mut4 (opt5)
gggagaguccgcucagccagguugcagaagcggcuuagcguguguccuaaucuucucucugcguguagguaggccugugccgcaaacaagcuuaccauggagcugcucauccugaaggccaacgcuauuaccacaauccuuacggccgugaccuucugcuuugcgagcggccagaauauuacagaagaguucuaccaauccaccuguucugcugucagcaaaggguaucuguccgcccucagaacaggaugguacaccucuguuaucacaauugaacugagcaacaucaaggagaauaaaugcaacggcaccgacgccaaggugaaacuuaucaagcaggaacuggauaaguauaaaaaugcugugacggagcuccagcugcugaugcaguccacccccgccacagggucuggaagcgcuauuuguuccggcgucgccgugugcaagguucuccaccuggagggggaagugaacaaaaucaagagcgcgcuucugucuaccaauaaagccgucgugucccucagcaacggaguuucugugcugacauuuaagguccuugaccugaagaauuacauugauaaacaacuccugccuauccugaacaagcaguccuguagcauuucuaauaucgagaccgugauugaguuccagcagaaaaacaaucggcuccuggaaaucacgcgcgaguuuuccgugaacgcuggcgucacaaccccgguuagcacauauaugcuuaccaauuccgaacugcucucucugaucaacgacaugcccauuaccaacgaucaaaagaaacuuaugagcaauaacgugcagaucgugagacagcaguccuacagcauuaugugcaucauuaaggaggaaguccuggccuaugugguucaacucccucuguacggcgugaucgacacacccuguuggaaacugcauacgucuccucucugcaccacaaauaccaaggagggguccaacaucugucugacacggaccgaucgcggaugguacugcgacaaugcuggcagcgucucuuucuuuccccaggccgaaacguguaaggugcagagcaacagaguuuucugcgauacaaugaacuccagaacccugccuucugaggugaaucucugcaaugucgacauuuuuaacccgaaauaugauuguaagaucaugaccagcaaaacagacguguccagcucugucauuaccucccugggggcgaucgugagcugcuacggaaagacaaaauguacggccucuaauaagaaccggggcauuaucaagaccuucuccaaugggugcgauuauguuagcaacaaaggaguggacacagucuccgugggcaauacccuuuacuguguuaacaagcaagagggcaaaucucuguaugugaagggggaacccaucauuaacuuuuacgacccucucgucuuccccagcgaugaguuugacgcuuccaucucucaggugaaugagaaaauuaaccagagccuggccuucauccgcaaguccgaugaacugcuccacaaugugaacgcuggaaagagcacaaccaauauuaugaucacgaccauuaucaucguuauuaucgucauucugcuuucucugaucgccgugggccuccugcuguauugcaaagccagauccacaccugugacccuuagcaaggaccagcucucugggauuaacaauaucgcuuucuccaacugaggacuaguaauaaggaaacuguaugaaugucugugggcaggaagugaagagauccuucuguaaagguuuuuggaauuaugucugcugaauaauaaacuuuuuugaaauaauaaaucugguagaaaaaugagaucuaaaaaaaaaaaaaaaaaaaaaaaaaaaaaaaaaaaaaaaaaaaaaaaaaaaaaaaaaaaaaaaaugcaucccccccccccccccccccccccccccccccaaaggcucuuuucagagccaccagaauu

SEQ ID NO: 4859 - RNA, 1967 nt, Artificial Sequence
  mRNA product Design g-2 comprising derived and/or modified sequence from HRSV(A2)__F_DSCav1_mut4 (opt6)
gggagaguccgcucagccagguugcagaagcggcuuagcguguguccuaaucuucucucugcguguagguaggccugugccgcaaacaagcuuaccauggaacuucuaauacucaaagccaacgcaauaacaacaauauuaacagccguaacauuuugcuucgcaucaggucaaaacauaacagaagaguucuaccaauccacaugcucagcaguaucaaaaggauauuuaagugcucuaagaacaggaugguacacauccguaauaacaaucgaacuaucaaacauaaaagaaaauaaauguaauggaacagacgccaaaguaaaauuaaucaaacaagaacuagacaaauacaaaaacgcaguuacugaauuacaauuauuaaugcaaucaacaccggccacaggaucuggaucagcaauaugcucaggaguagcagucugcaaaguauuacaccuagaaggggaaguuaauaaaaucaaaucagcauuacuauccaccaacaaagcgguaguuucacucuccaacggcguaucugucuuaacauucaaaguauuagaccuaaaaaacuacauugacaaacaacuacuaccaauccuaaacaaacaaucauguuccauaagcaauauagaaacaguaauagaauuucaacaaaaaaacaacagacuauuagaaauaacaagagaauuuuccgucaaugcaggaguuacuaccccugucuccaccuauaugcuaaccaauuccgaacucuuaucauuaauaaacgacaugccuaucacaaaugaccaaaaaaaauuaaugagcaacaacguacaaauaguacgacaacaaucauacucaaucaugugcauaauaaaagaagaaguccuagcauacguuguacaacuaccacuauacggagucauagauaccccaugcuggaaacuccauacaagcccacuaugcacuacaaacacaaaagaaggcucuaauauaugucuaacaagaacagaccgaggaugguacugcgauaaugccggcucagucucauucuuuccgcaagccgaaacuuguaaaguacaaaguaacagaguauuuugugacaccaugaacucaagaacccucccaagcgaagucaaucuaugcaacguugauauauucaaucccaaauacgacugcaaaaucaugaccucaaaaacagacgucagcucauccguuauaacaucacuaggagccaucguaucuugcuauggaaaaacaaaaugcacagcaagcaauaaaaacagaggcauaauaaaaacauucucaaauggaugcgacuacguaucaaacaaaggagucgacacaguuuccguaggaaacacuuuauacugcguaaacaaacaagaaggaaaaucauuauacgucaaaggugaaccaauaauaaacuucuacgauccacuuguauucccaucagacgaauuugacgcaucaauuucacaaguaaacgaaaaaauaaaccaaucacucgcauucauaagaaaaucagaugaacuacuacauaacguaaacgcaggaaaauccacaacaaacaucaugauaacaaccaucauaaucguaauaaucguaauacuauuaucccuaauugcaguaggauuacucuuauauugcaaagcaagaucaacaccaguaacccucaguaaagaccaacuauccggaauaaauaacaucgcauucucaaacuaaggacuaguaauaaggaaacuguaugaaugucugugggcaggaagugaagagauccuucuguaaagguuuuuggaauuaugucugcugaauaauaaacuuuuuugaaauaauaaaucugguagaaaaaugagaucuaaaaaaaaaaaaaaaaaaaaaaaaaaaaaaaaaaaaaaaaaaaaaaaaaaaaaaaaaaaaaaaaugcaucccccccccccccccccccccccccccccccaaaggcucuuuucagagccaccagaauu

SEQ ID NO: 4860 - RNA, 1967 nt, Artificial Sequence
  mRNA product Design g-2 comprising derived and/or modified sequence from HRSV(A2)__F_DSCav1_mut4 (opt11)
gggagaguccgcucagccagguugcagaagcggcuuagcguguguccuaaucuucucucugcguguagguaggccugugccgcaaacaagcuuaccauggaacugcucauccucaaagccaacgccaucaccaccauucuuaccgccgucacauucugcuucgccucaggccaaaacaucaccgaagaauuuuaccaauccacuuguucagccgucucaaaaggauaccuaucagcccuccguaccggcugguacaccucggucauaacaauagaacucuccaacauaaaagaaaacaaaugcaacggcaccgacgccaaggucaaacugauaaaacaagaacuugauaaauacaaaaacgccgucacugaacuccaacuccucaugcaauccacucccgcuacuggcucuggcuccgccaucugcucuggcgucgccgucuguaaaguacuccaccucgaaggggaagucaacaaaaucaaaucagcccuccuuagcaccaacaaggccgucgucucccucucaaacggagucagcguccucaccuucaagguccucgaccucaagaacuacaucgacaaacaacuccugcccauccuaaauaaacaauccugcucuaucuccaauaucgaaaccguuauagaguuccaacagaaaaacaaccgacuccucgaaaucacccgcgaguucuccgucaacgcaggcgucaccaccccugugucaaccuacaugcucaccaacagcgaacuacucucacucaucaaugacaugcccaucaccaacgaccaaaagaaacucauguccaacaacguccaaaucguacgucaacaauccuacagcaucaugugcaucauaaaagaagaaguccucgccuacgucguccaacuuccccucuacggcgucauagacacccccugcuggaaacugcauaccucaccccuaugcaccaccaacacuaaagaaggcuccaacaucugccucacccgcacggaccgcggcugguacugcgacaacgccggcuccgucuccuucuucccccaagccgaaacuuguaaaguccaauccaacagagucuucugcgacaccaugaacucuagaacgcugccauccgagguaaaccuaugcaacgucgacaucuucaaucccaaauacgacugcaagaucaugaccucaaaaaccgacguauccuccucaguaaucaccagucucggagcuaucgucuccugcuacggcaaaaccaaaugcacggccucuaacaaaaaccgcggcaucaucaaaaccuucucaaacggaugcgacuacgucagcaacaaaggcguagauaccgucucugucggcaacacacuguacugcguaaacaagcaagaaggaaaaucccucuacguaaaaggcgaacccaucaucaacuucuacgacccccucguuuuccccucagaugaauuugacgccucgauaucacaagucaacgaaaagauaaaucagucccucgccuucauccgaaaauccgacgaacuccuccacaacguuaacgcaggaaaguccaccacaaacaucaugauaacuacaaucauaauagucauuaucgucauacuccucucccuaaucgccguaggccugcuacucuacugcaaagcccgcucaacccccgucacucucucaaaagaccaacucuccggcaucaauaacaucgccuucucaaacuaaggacuaguaauaaggaaacuguaugaaugucugugggcaggaagugaagagauccuucuguaaagguuuuuggaauuaugucugcugaauaauaaacuuuuuugaaauaauaaaucugguagaaaaaugagaucuaaaaaaaaaaaaaaaaaaaaaaaaaaaaaaaaaaaaaaaaaaaaaaaaaaaaaaaaaaaaaaaaugcaucccccccccccccccccccccccccccccccaaaggcucuuuucagagccaccagaauu

SEQ ID NO: 4861 - RNA, 2199 nt, Artificial Sequence
  mRNA product Design g-3 comprising derived and/or modified sequence from HRSV(A2)__F_DSCav1_mut4 (opt1)
gggagaguccgcucagccagguugcagaagcggcuuagcguguguccuaaucuucucucugcguguagguaggccugugccgcaaacaagcuuaccauggagcugcucauccugaaggccaacgccaucaccaccauccugacggcggugaccuucugcuucgccagcggccagaacaucaccgaggaguucuaccaguccacgugcagcgccgucuccaagggguaccucagcgcccugcggaccggcugguacaccuccgugaucaccaucgagcugagcaacaucaaggagaacaagugcaacgggaccgacgccaaggugaagcucaucaagcaggagcuggacaaguacaagaacgcggucacggagcugcagcuccugaugcaguccaccccggcaaccggcuccggcuccgccaucugcagcggcgucgccgugugcaaggugcugcaccucgagggggaggucaacaagaucaagagcgcccugcuguccaccaacaaggccguggugagccucuccaacggcgucagcgugcugaccuucaaggugcuggaccucaagaacuacaucgacaagcagcugcugcccauccugaacaagcagagcugcuccaucagcaacaucgagacggugaucgaguuccagcagaagaacaaccggcuccuggagaucacccgcgaguucagcgugaacgccggggucaccacccccguguccacguacaugcugaccaacagcgagcuccugucccugaucaacgacaugccgaucaccaacgaccagaagaagcucaugagcaacaacgugcagaucguccggcagcaguccuacagcaucaugugcaucaucaaggaggaggugcuggcguacgugguccagcugccccucuacggcgugaucgacacccccugcuggaagcugcacacgagcccccugugcaccaccaacaccaaggagggguccaacaucugccucacgcgcaccgaccggggcugguacugcgacaacgccggcagcgucuccuucuucccgcaggccgagaccugcaaggugcagagcaaccgcguguucugcgacaccaugaacucccggacgcugcccagcgagguaaaccucugcaacgucgacaucuucaaccccaaguacgacugcaagaucaugaccuccaagaccgacgugagcuccagcgugaucaccucccugggggccaucgucagcugcuacggcaagacgaagugcaccgccagcaacaagaaccgggggaucaucaagaccuucuccaacggcugcgacuacgugagcaacaagggcguggacaccguguccgucgggaacacccuguacugcgugaacaagcaggagggcaagagccucuacgugaagggggagcccaucaucaacuucuacgacccgcuggucuuccccuccgacgaguucgacgcgagcaucucccaggugaacgagaagaucaaccagagccuggccuucauccgcaaguccgacgagcugcuccacaacgugaacgccggcaagagcacgaccaacaucaugaucaccaccaucaucaucgucaucaucgugauccugcugucccucaucgccguggggcugcugcucuacugcaaggcccggagcacgcccgucacccuguccaaggaccagcugagcggcaucaacaacaucgcguucuccaacugaggacuagugaagggaacacccaaauuuaauucagccuuaagcacaauuaauuaagagugaaacguaauuguacaagcaguuggucacccaccauagggcaugaucaacaccgcaaccuuuccuuuuucccccagugauucugaaaaaccccucuucccuucagcuugcuuagauguuccaaauuuaguaagcuuaaggcggccuacagaagaaaaagaaaaaaaaggccacaaaaguucccucucacuuucaguaaauaaaauaaaagcagcaacagaaauaaagaaauaaaugaaauucaaaaugaaauaaauauuguguugugcagcauuaaaaaaucaauaaaaauuaaaaaugagcaagaucuaaaaaaaaaaaaaaaaaaaaaaaaaaaaaaaaaaaaaaaaaaaaaaaaaaaaaaaaaaaaaaaaugcaucccccccccccccccccccccccccccccccaaaggcucuuuucagagccaccagaauu

SEQ ID NO: 4862 - RNA, 2199 nt, Artificial Sequence
  mRNA product Design g-3 comprising derived and/or modified sequence from HRSV(A2)__F_DSCav1_mut4 (opt1)
gggagaguccgcucagccagguugcagaagcggcuuagcguguguccuaaucuucucucugcguguagguaggccugugccgcaaacaagcuuaccauggagcugcucauccugaaggccaacgccaucaccaccauccugacggcggugaccuucugcuucgccagcggccagaacaucaccgaggaguucuaccaguccacgugcagcgccgucuccaagggguaccucagcgcccugcgcaccggcugguacaccuccgugaucaccaucgagcugagcaacaucaaggagaacaagugcaacgggaccgacgccaaggugaagcucaucaagcaggagcuggacaaguacaagaacgcggucacggagcugcagcuccugaugcaguccacccccgccaccggcagcggguccgccaucugcagcggcguggccgugugcaagguccugcaccucgagggcgaggugaacaagaucaaguccgcgcugcugagcaccaacaaggccguggucucccucagcaacgggguguccgugcugacguucaagguccuggaccucaagaacuacaucgacaagcagcugcugccgauccucaacaagcagagcugcuccaucagcaacaucgagaccgugaucgaguuccagcagaagaacaaccggcugcuggagaucacccgcgaguucuccgugaacgccggcgucaccacgcccgugagcaccuacaugcucaccaacagcgagcugcugucccucaucaacgacaugcccaucaccaacgaccagaagaagcugaugagcaacaacgugcagaucguccggcagcaguccuacagcaucaugugcaucaucaaggaggaggugcuggccuacgugguccagcucccccuguacggggugaucgacacgccgugcuggaagcugcacaccagcccccucugcaccaccaacacgaaggagggcuccaacaucugccugacccgcaccgaccgggggugguacugcgacaacgccggcuccgugagcuucuucccccaggcggagaccugcaagguccaguccaaccgcguguucugcgacacgaugaacagccggacccuccccuccgaggucaaccugugcaacguggacaucuucaacccgaaguacgacugcaagaucaugaccagcaagaccgacguguccagcuccgucaucacgagccugggcgccaucguguccugcuacgggaagaccaagugcaccgccagcaacaagaaccggggcaucaucaagaccuucuccaacgggugcgacuacgugagcaacaagggcgucgacacggugagcgugggcaacacccucuacugcgucaacaagcaggaggggaagucccuguacgugaagggcgagcccaucaucaacuucuacgacccccugguguuccccagcgacgaguucgacgccuccaucagccaggucaacgagaagaucaaccagucccucgccuucauccgcaagagcgacgagcugcugcacaacgugaacgcggggaaguccaccaccaacaucaugaucaccacgaucaucaucgugaucaucgucauccuccugagccugaucgccgugggccuccugcuguacugcaaggcccgguccaccccggugacccugagcaaggaccagcucuccgggaucaacaacaucgccuucagcaacugaggacuagugaagggaacacccaaauuuaauucagccuuaagcacaauuaauuaagagugaaacguaauuguacaagcaguuggucacccaccauagggcaugaucaacaccgcaaccuuuccuuuuucccccagugauucugaaaaaccccucuucccuucagcuugcuuagauguuccaaauuuaguaagcuuaaggcggccuacagaagaaaaagaaaaaaaaggccacaaaaguucccucucacuuucaguaaauaaaauaaaagcagcaacagaaauaaagaaauaaaugaaauucaaaaugaaauaaauauuguguugugcagcauuaaaaaaucaauaaaaauuaaaaaugagcaagaucuaaaaaaaaaaaaaaaaaaaaaaaaaaaaaaaaaaaaaaaaaaaaaaaaaaaaaaaaaaaaaaaaugcaucccccccccccccccccccccccccccccccaaaggcucuuuucagagccaccagaauu

SEQ ID NO: 4863 - RNA, 2199 nt, Artificial Sequence
  mRNA product Design g-3 comprising derived and/or modified sequence from HRSV(A2)__F_DSCav1_mut4 (opt2)
gggagaguccgcucagccagguugcagaagcggcuuagcguguguccuaaucuucucucugcguguagguaggccugugccgcaaacaagcuuaccauggagcuccucauccucaaggccaacgccaucaccaccauccucaccgccgucaccuucugcuucgccuccggccagaacaucaccgaggaguucuaccaguccaccugcuccgccgucuccaagggcuaccucuccgcccuccgcaccggcugguacaccuccgucaucaccaucgagcucuccaacaucaaggagaacaagugcaacggcaccgacgccaaggucaagcucaucaagcaggagcucgacaaguacaagaacgccgucaccgagcuccagcuccucaugcaguccacccccgccaccggcuccggcuccgccaucugcuccggcgucgccgucugcaagguccuccaccucgagggcgaggucaacaagaucaaguccgcccuccucuccaccaacaaggccgucgucucccucuccaacggcgucuccguccucaccuucaagguccucgaccucaagaacuacaucgacaagcagcuccuccccauccucaacaagcaguccugcuccaucuccaacaucgagaccgucaucgaguuccagcagaagaacaaccgccuccucgagaucacccgcgaguucuccgucaacgccggcgucaccacccccgucuccaccuacaugcucaccaacuccgagcuccucucccucaucaacgacaugcccaucaccaacgaccagaagaagcucauguccaacaacguccagaucguccgccagcaguccuacuccaucaugugcaucaucaaggaggagguccucgccuacgucguccagcucccccucuacggcgucaucgacacccccugcuggaagcuccacaccuccccccucugcaccaccaacaccaaggagggcuccaacaucugccucacccgcaccgaccgcggcugguacugcgacaacgccggcuccgucuccuucuucccccaggccgagaccugcaagguccaguccaaccgcgucuucugcgacaccaugaacucccgcacccuccccuccgaggucaaccucugcaacgucgacaucuucaaccccaaguacgacugcaagaucaugaccuccaagaccgacgucuccuccuccgucaucaccucccucggcgccaucgucuccugcuacggcaagaccaagugcaccgccuccaacaagaaccgcggcaucaucaagaccuucuccaacggcugcgacuacgucuccaacaagggcgucgacaccgucuccgucggcaacacccucuacugcgucaacaagcaggagggcaagucccucuacgucaagggcgagcccaucaucaacuucuacgacccccucgucuuccccuccgacgaguucgacgccuccaucucccaggucaacgagaagaucaaccagucccucgccuucauccgcaaguccgacgagcuccuccacaacgucaacgccggcaaguccaccaccaacaucaugaucaccaccaucaucaucgucaucaucgucauccuccucucccucaucgccgucggccuccuccucuacugcaaggcccgcuccacccccgucacccucuccaaggaccagcucuccggcaucaacaacaucgccuucuccaacugaggacuagugaagggaacacccaaauuuaauucagccuuaagcacaauuaauuaagagugaaacguaauuguacaagcaguuggucacccaccauagggcaugaucaacaccgcaaccuuuccuuuuucccccagugauucugaaaaaccccucuucccuucagcuugcuuagauguuccaaauuuaguaagcuuaaggcggccuacagaagaaaaagaaaaaaaaggccacaaaaguucccucucacuuucaguaaauaaaauaaaagcagcaacagaaauaaagaaauaaaugaaauucaaaaugaaauaaauauuguguugugcagcauuaaaaaaucaauaaaaauuaaaaaugagcaagaucuaaaaaaaaaaaaaaaaaaaaaaaaaaaaaaaaaaaaaaaaaaaaaaaaaaaaaaaaaaaaaaaaugcaucccccccccccccccccccccccccccccccaaaggcucuuuucagagccaccagaauu

SEQ ID NO: 4864 - RNA, 2199 nt, Artificial Sequence
  mRNA product Design g-3 comprising derived and/or modified sequence from HRSV(A2)__F_DSCav1_mut4 (opt3)
gggagaguccgcucagccagguugcagaagcggcuuagcguguguccuaaucuucucucugcguguagguaggccugugccgcaaacaagcuuaccauggagcugcucauccuuaaggccaacgcuauuaccacaauacugacugcagugacguucugcuuugccagcggccagaauaucaccgaagaguucuaccaauccacauguucugcggucucaaaaggguauuugagugcuuuaagaacuggaugguacaccagcguuauuacaaucgaacuguccaacauuaaggagaauaaaugcaacgguaccgacgccaaggugaaacuaaucaagcaggaacucgauaaguauaaaaaugcaguaacugagcugcagcuucugaugcagucuacacccgccaccggcucggggucagcuauauguagcggaguggcagucugcaagguguugcaccucgagggcgaaguuaacaaaaucaagagugcccugcuguccacgaauaaagcuguggucucucucagcaacgguguguccguauuaacuuuuaagguucuggaccuuaagaauuacauugauaaacaauugcugccuauccuaaacaagcagucauguaguauuagcaauaucgagaccgugauagaguuccagcagaaaaacaauaggcuccuggaaauuacacgggaguuuucugucaacgccggggugacuaccccaguguccacauauaugcuuaccaauucagaacuguugagccucaucaacgacaugccgauuacgaacgaucaaaagaaacugaugaguaauaacguccagaucguucgccagcagucuuacuccaucaugugcauuauaaaggaggaaguguuagcguauguagugcaacugccccucuacggagucaucgacacuccuuguuggaaacuucauacaagcccacugugcaccacuaauacaaaggagggcucgaacauuuguuugacccgaacggaucguggcugguacugcgacaaugcagggucuguguccuucuuuccccaggccgaaaccuguaagguucagucaaacagaguguucugcgauacaaugaauaguagaacucugccuagcgaggucaaccucugcaauguggacaucuuuaacccaaaauaugauuguaagauaaugaccuccaaaacagacguaucuagcucaguuauuaccagucugggagcuaucguguccugcuacgguaagacuaaauguacagccagcaauaagaacaggggcaucauuaagaccuucucuaaugggugcgauuaugucucaaacaaaggaguggacacugucagugugggcaauacgcuuuacuguguuaacaagcaagaggguaaaagccuguaugugaagggggaacccaucauuaacuuuuacgacccuuugguauucccauccgaugaguuugacgcaucuauaucgcaggucaaugagaaaaucaaccagagccucgcuuucauucggaaguccgaugaacuguuacacaaugugaacgccggaaagucaacaaccaauaucaugaucacuaccauuauaaucguuauuaucgugauucugcuaagucucaucgcggucggccugcuuuuguauugcaaagcccgcucuacaccggugacccugagcaaggaccagcucuccggcauaaacaauaucgcauucucaaacugaggacuagugaagggaacacccaaauuuaauucagccuuaagcacaauuaauuaagagugaaacguaauuguacaagcaguuggucacccaccauagggcaugaucaacaccgcaaccuuuccuuuuucccccagugauucugaaaaaccccucuucccuucagcuugcuuagauguuccaaauuuaguaagcuuaaggcggccuacagaagaaaaagaaaaaaaaggccacaaaaguucccucucacuuucaguaaauaaaauaaaagcagcaacagaaauaaagaaauaaaugaaauucaaaaugaaauaaauauuguguugugcagcauuaaaaaaucaauaaaaauuaaaaaugagcaagaucuaaaaaaaaaaaaaaaaaaaaaaaaaaaaaaaaaaaaaaaaaaaaaaaaaaaaaaaaaaaaaaaaugcaucccccccccccccccccccccccccccccccaaaggcucuuuucagagccaccagaauu

SEQ ID NO: 4865 - RNA, 2199 nt, Artificial Sequence
  mRNA product Design g-3 comprising derived and/or modified sequence from HRSV(A2)__F_DSCav1_mut4 (opt4)
gggagaguccgcucagccagguugcagaagcggcuuagcguguguccuaaucuucucucugcguguagguaggccugugccgcaaacaagcuuaccauggagcugcugauccugaaggccaacgccaucaccaccauccugaccgccgugaccuucugcuucgccagcggccagaacaucaccgaggaguucuaccagagcaccugcagcgccgugagcaagggcuaccugagcgcccugagaaccggcugguacaccagcgugaucaccaucgagcugagcaacaucaaggagaacaagugcaacggcaccgacgccaaggugaagcugaucaagcaggagcuggacaaguacaagaacgccgugaccgagcugcagcugcugaugcagagcacccccgccaccggcagcggcagcgccaucugcagcggcguggccgugugcaaggugcugcaccuggagggcgaggugaacaagaucaagagcgcccugcugagcaccaacaaggccguggugagccugagcaacggcgugagcgugcugaccuucaaggugcuggaccugaagaacuacaucgacaagcagcugcugcccauccugaacaagcagagcugcagcaucagcaacaucgagaccgugaucgaguuccagcagaagaacaacagacugcuggagaucaccagagaguucagcgugaacgccggcgugaccacccccgugagcaccuacaugcugaccaacagcgagcugcugagccugaucaacgacaugcccaucaccaacgaccagaagaagcugaugagcaacaacgugcagaucgugagacagcagagcuacagcaucaugugcaucaucaaggaggaggugcuggccuacguggugcagcugccccuguacggcgugaucgacacccccugcuggaagcugcacaccagcccccugugcaccaccaacaccaaggagggcagcaacaucugccugaccagaaccgacagaggcugguacugcgacaacgccggcagcgugagcuucuucccccaggccgagaccugcaaggugcagagcaacagaguguucugcgacaccaugaacagcagaacccugcccagcgaggugaaccugugcaacguggacaucuucaaccccaaguacgacugcaagaucaugaccagcaagaccgacgugagcagcagcgugaucaccagccugggcgccaucgugagcugcuacggcaagaccaagugcaccgccagcaacaagaacagaggcaucaucaagaccuucagcaacggcugcgacuacgugagcaacaagggcguggacaccgugagcgugggcaacacccuguacugcgugaacaagcaggagggcaagagccuguacgugaagggcgagcccaucaucaacuucuacgacccccugguguuccccagcgacgaguucgacgccagcaucagccaggugaacgagaagaucaaccagagccuggccuucaucagaaagagcgacgagcugcugcacaacgugaacgccggcaagagcaccaccaacaucaugaucaccaccaucaucaucgugaucaucgugauccugcugagccugaucgccgugggccugcugcuguacugcaaggccagaagcacccccgugacccugagcaaggaccagcugagcggcaucaacaacaucgccuucagcaacugaggacuagugaagggaacacccaaauuuaauucagccuuaagcacaauuaauuaagagugaaacguaauuguacaagcaguuggucacccaccauagggcaugaucaacaccgcaaccuuuccuuuuucccccagugauucugaaaaaccccucuucccuucagcuugcuuagauguuccaaauuuaguaagcuuaaggcggccuacagaagaaaaagaaaaaaaaggccacaaaaguucccucucacuuucaguaaauaaaauaaaagcagcaacagaaauaaagaaauaaaugaaauucaaaaugaaauaaauauuguguugugcagcauuaaaaaaucaauaaaaauuaaaaaugagcaagaucuaaaaaaaaaaaaaaaaaaaaaaaaaaaaaaaaaaaaaaaaaaaaaaaaaaaaaaaaaaaaaaaaugcaucccccccccccccccccccccccccccccccaaaggcucuuuucagagccaccagaauu

SEQ ID NO: 4866 - RNA, 2199 nt, Artificial Sequence
  mRNA product Design g-3 comprising derived and/or modified sequence from HRSV(A2)__F_DSCav1_mut4 (opt5)
gggagaguccgcucagccagguugcagaagcggcuuagcguguguccuaaucuucucucugcguguagguaggccugugccgcaaacaagcuuaccauggagcugcucauccugaaggccaacgcuauuaccacaauccuuacggccgugaccuucugcuuugcgagcggccagaauauuacagaagaguucuaccaauccaccuguucugcugucagcaaaggguaucuguccgcccucagaacaggaugguacaccucuguuaucacaauugaacugagcaacaucaaggagaauaaaugcaacggcaccgacgccaaggugaaacuuaucaagcaggaacuggauaaguauaaaaaugcugugacggagcuccagcugcugaugcaguccacccccgccacagggucuggaagcgcuauuuguuccggcgucgccgugugcaagguucuccaccuggagggggaagugaacaaaaucaagagcgcgcuucugucuaccaauaaagccgucgugucccucagcaacggaguuucugugcugacauuuaagguccuugaccugaagaauuacauugauaaacaacuccugccuauccugaacaagcaguccuguagcauuucuaauaucgagaccgugauugaguuccagcagaaaaacaaucggcuccuggaaaucacgcgcgaguuuuccgugaacgcuggcgucacaaccccgguuagcacauauaugcuuaccaauuccgaacugcucucucugaucaacgacaugcccauuaccaacgaucaaaagaaacuuaugagcaauaacgugcagaucgugagacagcaguccuacagcauuaugugcaucauuaaggaggaaguccuggccuaugugguucaacucccucuguacggcgugaucgacacacccuguuggaaacugcauacgucuccucucugcaccacaaauaccaaggagggguccaacaucugucugacacggaccgaucgcggaugguacugcgacaaugcuggcagcgucucuuucuuuccccaggccgaaacguguaaggugcagagcaacagaguuuucugcgauacaaugaacuccagaacccugccuucugaggugaaucucugcaaugucgacauuuuuaacccgaaauaugauuguaagaucaugaccagcaaaacagacguguccagcucugucauuaccucccugggggcgaucgugagcugcuacggaaagacaaaauguacggccucuaauaagaaccggggcauuaucaagaccuucuccaaugggugcgauuauguuagcaacaaaggaguggacacagucuccgugggcaauacccuuuacuguguuaacaagcaagagggcaaaucucuguaugugaagggggaacccaucauuaacuuuuacgacccucucgucuuccccagcgaugaguuugacgcuuccaucucucaggugaaugagaaaauuaaccagagccuggccuucauccgcaaguccgaugaacugcuccacaaugugaacgcuggaaagagcacaaccaauauuaugaucacgaccauuaucaucguuauuaucgucauucugcuuucucugaucgccgugggccuccugcuguauugcaaagccagauccacaccugugacccuuagcaaggaccagcucucugggauuaacaauaucgcuuucuccaacugaggacuagugaagggaacacccaaauuuaauucagccuuaagcacaauuaauuaagagugaaacguaauuguacaagcaguuggucacccaccauagggcaugaucaacaccgcaaccuuuccuuuuucccccagugauucugaaaaaccccucuucccuucagcuugcuuagauguuccaaauuuaguaagcuuaaggcggccuacagaagaaaaagaaaaaaaaggccacaaaaguucccucucacuuucaguaaauaaaauaaaagcagcaacagaaauaaagaaauaaaugaaauucaaaaugaaauaaauauuguguugugcagcauuaaaaaaucaauaaaaauuaaaaaugagcaagaucuaaaaaaaaaaaaaaaaaaaaaaaaaaaaaaaaaaaaaaaaaaaaaaaaaaaaaaaaaaaaaaaaugcaucccccccccccccccccccccccccccccccaaaggcucuuuucagagccaccagaauu

SEQ ID NO: 4867 - RNA, 2199 nt, Artificial Sequence
  mRNA product Design g-3 comprising derived and/or modified sequence from HRSV(A2)__F_DSCav1_mut4 (opt6)
gggagaguccgcucagccagguugcagaagcggcuuagcguguguccuaaucuucucucugcguguagguaggccugugccgcaaacaagcuuaccauggaacuucuaauacucaaagccaacgcaauaacaacaauauuaacagccguaacauuuugcuucgcaucaggucaaaacauaacagaagaguucuaccaauccacaugcucagcaguaucaaaaggauauuuaagugcucuaagaacaggaugguacacauccguaauaacaaucgaacuaucaaacauaaaagaaaauaaauguaauggaacagacgccaaaguaaaauuaaucaaacaagaacuagacaaauacaaaaacgcaguuacugaauuacaauuauuaaugcaaucaacaccggccacaggaucuggaucagcaauaugcucaggaguagcagucugcaaaguauuacaccuagaaggggaaguuaauaaaaucaaaucagcauuacuauccaccaacaaagcgguaguuucacucuccaacggcguaucugucuuaacauucaaaguauuagaccuaaaaaacuacauugacaaacaacuacuaccaauccuaaacaaacaaucauguuccauaagcaauauagaaacaguaauagaauuucaacaaaaaaacaacagacuauuagaaauaacaagagaauuuuccgucaaugcaggaguuacuaccccugucuccaccuauaugcuaaccaauuccgaacucuuaucauuaauaaacgacaugccuaucacaaaugaccaaaaaaaauuaaugagcaacaacguacaaauaguacgacaacaaucauacucaaucaugugcauaauaaaagaagaaguccuagcauacguuguacaacuaccacuauacggagucauagauaccccaugcuggaaacuccauacaagcccacuaugcacuacaaacacaaaagaaggcucuaauauaugucuaacaagaacagaccgaggaugguacugcgauaaugccggcucagucucauucuuuccgcaagccgaaacuuguaaaguacaaaguaacagaguauuuugugacaccaugaacucaagaacccucccaagcgaagucaaucuaugcaacguugauauauucaaucccaaauacgacugcaaaaucaugaccucaaaaacagacgucagcucauccguuauaacaucacuaggagccaucguaucuugcuauggaaaaacaaaaugcacagcaagcaauaaaaacagaggcauaauaaaaacauucucaaauggaugcgacuacguaucaaacaaaggagucgacacaguuuccguaggaaacacuuuauacugcguaaacaaacaagaaggaaaaucauuauacgucaaaggugaaccaauaauaaacuucuacgauccacuuguauucccaucagacgaauuugacgcaucaauuucacaaguaaacgaaaaaauaaaccaaucacucgcauucauaagaaaaucagaugaacuacuacauaacguaaacgcaggaaaauccacaacaaacaucaugauaacaaccaucauaaucguaauaaucguaauacuauuaucccuaauugcaguaggauuacucuuauauugcaaagcaagaucaacaccaguaacccucaguaaagaccaacuauccggaauaaauaacaucgcauucucaaacuaaggacuagugaagggaacacccaaauuuaauucagccuuaagcacaauuaauuaagagugaaacguaauuguacaagcaguuggucacccaccauagggcaugaucaacaccgcaaccuuuccuuuuucccccagugauucugaaaaaccccucuucccuucagcuugcuuagauguuccaaauuuaguaagcuuaaggcggccuacagaagaaaaagaaaaaaaaggccacaaaaguucccucucacuuucaguaaauaaaauaaaagcagcaacagaaauaaagaaauaaaugaaauucaaaaugaaauaaauauuguguugugcagcauuaaaaaaucaauaaaaauuaaaaaugagcaagaucuaaaaaaaaaaaaaaaaaaaaaaaaaaaaaaaaaaaaaaaaaaaaaaaaaaaaaaaaaaaaaaaaugcaucccccccccccccccccccccccccccccccaaaggcucuuuucagagccaccagaauu

SEQ ID NO: 4868 - RNA, 2199 nt, Artificial Sequence
  mRNA product Design g-3 comprising derived and/or modified sequence from HRSV(A2)__F_DSCav1_mut4 (opt11)
gggagaguccgcucagccagguugcagaagcggcuuagcguguguccuaaucuucucucugcguguagguaggccugugccgcaaacaagcuuaccauggaacugcucauccucaaagccaacgccaucaccaccauucuuaccgccgucacauucugcuucgccucaggccaaaacaucaccgaagaauuuuaccaauccacuuguucagccgucucaaaaggauaccuaucagcccuccguaccggcugguacaccucggucauaacaauagaacucuccaacauaaaagaaaacaaaugcaacggcaccgacgccaaggucaaacugauaaaacaagaacuugauaaauacaaaaacgccgucacugaacuccaacuccucaugcaauccacucccgcuacuggcucuggcuccgccaucugcucuggcgucgccgucuguaaaguacuccaccucgaaggggaagucaacaaaaucaaaucagcccuccuuagcaccaacaaggccgucgucucccucucaaacggagucagcguccucaccuucaagguccucgaccucaagaacuacaucgacaaacaacuccugcccauccuaaauaaacaauccugcucuaucuccaauaucgaaaccguuauagaguuccaacagaaaaacaaccgacuccucgaaaucacccgcgaguucuccgucaacgcaggcgucaccaccccugugucaaccuacaugcucaccaacagcgaacuacucucacucaucaaugacaugcccaucaccaacgaccaaaagaaacucauguccaacaacguccaaaucguacgucaacaauccuacagcaucaugugcaucauaaaagaagaaguccucgccuacgucguccaacuuccccucuacggcgucauagacacccccugcuggaaacugcauaccucaccccuaugcaccaccaacacuaaagaaggcuccaacaucugccucacccgcacggaccgcggcugguacugcgacaacgccggcuccgucuccuucuucccccaagccgaaacuuguaaaguccaauccaacagagucuucugcgacaccaugaacucuagaacgcugccauccgagguaaaccuaugcaacgucgacaucuucaaucccaaauacgacugcaagaucaugaccucaaaaaccgacguauccuccucaguaaucaccagucucggagcuaucgucuccugcuacggcaaaaccaaaugcacggccucuaacaaaaaccgcggcaucaucaaaaccuucucaaacggaugcgacuacgucagcaacaaaggcguagauaccgucucugucggcaacacacuguacugcguaaacaagcaagaaggaaaaucccucuacguaaaaggcgaacccaucaucaacuucuacgacccccucguuuuccccucagaugaauuugacgccucgauaucacaagucaacgaaaagauaaaucagucccucgccuucauccgaaaauccgacgaacuccuccacaacguuaacgcaggaaaguccaccacaaacaucaugauaacuacaaucauaauagucauuaucgucauacuccucucccuaaucgccguaggccugcuacucuacugcaaagcccgcucaacccccgucacucucucaaaagaccaacucuccggcaucaauaacaucgccuucucaaacuaaggacuagugaagggaacacccaaauuuaauucagccuuaagcacaauuaauuaagagugaaacguaauuguacaagcaguuggucacccaccauagggcaugaucaacaccgcaaccuuuccuuuuucccccagugauucugaaaaaccccucuucccuucagcuugcuuagauguuccaaauuuaguaagcuuaaggcggccuacagaagaaaaagaaaaaaaaggccacaaaaguucccucucacuuucaguaaauaaaauaaaagcagcaacagaaauaaagaaauaaaugaaauucaaaaugaaauaaauauuguguugugcagcauuaaaaaaucaauaaaaauuaaaaaugagcaagaucuaaaaaaaaaaaaaaaaaaaaaaaaaaaaaaaaaaaaaaaaaaaaaaaaaaaaaaaaaaaaaaaaugcaucccccccccccccccccccccccccccccccaaaggcucuuuucagagccaccagaauu

SEQ ID NO: 4869 - RNA, 1994 nt, Artificial Sequence
  mRNA product Design g-4 comprising derived and/or modified sequence from HRSV(A2)__F_DSCav1_mut4 (opt1)
gggagacuccugucgggcggaaguaggaggaguagaguuuaaaaacaguacucuuuuuccgguucgggacguaguugaagcaacgacaagccggauaaccgcucuugagacaggaagcuuaccauggagcugcucauccugaaggccaacgccaucaccaccauccugacggcggugaccuucugcuucgccagcggccagaacaucaccgaggaguucuaccaguccacgugcagcgccgucuccaagggguaccucagcgcccugcggaccggcugguacaccuccgugaucaccaucgagcugagcaacaucaaggagaacaagugcaacgggaccgacgccaaggugaagcucaucaagcaggagcuggacaaguacaagaacgcggucacggagcugcagcuccugaugcaguccaccccggcaaccggcuccggcuccgccaucugcagcggcgucgccgugugcaaggugcugcaccucgagggggaggucaacaagaucaagagcgcccugcuguccaccaacaaggccguggugagccucuccaacggcgucagcgugcugaccuucaaggugcuggaccucaagaacuacaucgacaagcagcugcugcccauccugaacaagcagagcugcuccaucagcaacaucgagacggugaucgaguuccagcagaagaacaaccggcuccuggagaucacccgcgaguucagcgugaacgccggggucaccacccccguguccacguacaugcugaccaacagcgagcuccugucccugaucaacgacaugccgaucaccaacgaccagaagaagcucaugagcaacaacgugcagaucguccggcagcaguccuacagcaucaugugcaucaucaaggaggaggugcuggcguacgugguccagcugccccucuacggcgugaucgacacccccugcuggaagcugcacacgagcccccugugcaccaccaacaccaaggagggguccaacaucugccucacgcgcaccgaccggggcugguacugcgacaacgccggcagcgucuccuucuucccgcaggccgagaccugcaaggugcagagcaaccgcguguucugcgacaccaugaacucccggacgcugcccagcgagguaaaccucugcaacgucgacaucuucaaccccaaguacgacugcaagaucaugaccuccaagaccgacgugagcuccagcgugaucaccucccugggggccaucgucagcugcuacggcaagacgaagugcaccgccagcaacaagaaccgggggaucaucaagaccuucuccaacggcugcgacuacgugagcaacaagggcguggacaccguguccgucgggaacacccuguacugcgugaacaagcaggagggcaagagccucuacgugaagggggagcccaucaucaacuucuacgacccgcuggucuuccccuccgacgaguucgacgcgagcaucucccaggugaacgagaagaucaaccagagccuggccuucauccgcaaguccgacgagcugcuccacaacgugaacgccggcaagagcacgaccaacaucaugaucaccaccaucaucaucgucaucaucgugauccugcugucccucaucgccguggggcugcugcucuacugcaaggcccggagcacgcccgucacccuguccaaggaccagcugagcggcaucaacaacaucgcguucuccaacugaggacuaguaauaaggaaacuguaugaaugucugugggcaggaagugaagagauccuucuguaaagguuuuuggaauuaugucugcugaauaauaaacuuuuuugaaauaauaaaucugguagaaaaaugagaucuaaaaaaaaaaaaaaaaaaaaaaaaaaaaaaaaaaaaaaaaaaaaaaaaaaaaaaaaaaaaaaaaugcaucccccccccccccccccccccccccccccccaaaggcucuuuucagagccaccagaauu

SEQ ID NO: 4870 - RNA, 1994 nt, Artificial Sequence
  mRNA product Design g-4 comprising derived and/or modified sequence from HRSV(A2)__F_DSCav1_mut4 (opt1)
gggagacuccugucgggcggaaguaggaggaguagaguuuaaaaacaguacucuuuuuccgguucgggacguaguugaagcaacgacaagccggauaaccgcucuugagacaggaagcuuaccauggagcugcucauccugaaggccaacgccaucaccaccauccugacggcggugaccuucugcuucgccagcggccagaacaucaccgaggaguucuaccaguccacgugcagcgccgucuccaagggguaccucagcgcccugcgcaccggcugguacaccuccgugaucaccaucgagcugagcaacaucaaggagaacaagugcaacgggaccgacgccaaggugaagcucaucaagcaggagcuggacaaguacaagaacgcggucacggagcugcagcuccugaugcaguccacccccgccaccggcagcggguccgccaucugcagcggcguggccgugugcaagguccugcaccucgagggcgaggugaacaagaucaaguccgcgcugcugagcaccaacaaggccguggucucccucagcaacgggguguccgugcugacguucaagguccuggaccucaagaacuacaucgacaagcagcugcugccgauccucaacaagcagagcugcuccaucagcaacaucgagaccgugaucgaguuccagcagaagaacaaccggcugcuggagaucacccgcgaguucuccgugaacgccggcgucaccacgcccgugagcaccuacaugcucaccaacagcgagcugcugucccucaucaacgacaugcccaucaccaacgaccagaagaagcugaugagcaacaacgugcagaucguccggcagcaguccuacagcaucaugugcaucaucaaggaggaggugcuggccuacgugguccagcucccccuguacggggugaucgacacgccgugcuggaagcugcacaccagcccccucugcaccaccaacacgaaggagggcuccaacaucugccugacccgcaccgaccgggggugguacugcgacaacgccggcuccgugagcuucuucccccaggcggagaccugcaagguccaguccaaccgcguguucugcgacacgaugaacagccggacccuccccuccgaggucaaccugugcaacguggacaucuucaacccgaaguacgacugcaagaucaugaccagcaagaccgacguguccagcuccgucaucacgagccugggcgccaucguguccugcuacgggaagaccaagugcaccgccagcaacaagaaccggggcaucaucaagaccuucuccaacgggugcgacuacgugagcaacaagggcgucgacacggugagcgugggcaacacccucuacugcgucaacaagcaggaggggaagucccuguacgugaagggcgagcccaucaucaacuucuacgacccccugguguuccccagcgacgaguucgacgccuccaucagccaggucaacgagaagaucaaccagucccucgccuucauccgcaagagcgacgagcugcugcacaacgugaacgcggggaaguccaccaccaacaucaugaucaccacgaucaucaucgugaucaucgucauccuccugagccugaucgccgugggccuccugcuguacugcaaggcccgguccaccccggugacccugagcaaggaccagcucuccgggaucaacaacaucgccuucagcaacugaggacuaguaauaaggaaacuguaugaaugucugugggcaggaagugaagagauccuucuguaaagguuuuuggaauuaugucugcugaauaauaaacuuuuuugaaauaauaaaucugguagaaaaaugagaucuaaaaaaaaaaaaaaaaaaaaaaaaaaaaaaaaaaaaaaaaaaaaaaaaaaaaaaaaaaaaaaaaugcaucccccccccccccccccccccccccccccccaaaggcucuuuucagagccaccagaauu

SEQ ID NO: 4871 - RNA, 1994 nt, Artificial Sequence
  mRNA product Design g-4 comprising derived and/or modified sequence from HRSV(A2)__F_DSCav1_mut4 (opt2)
gggagacuccugucgggcggaaguaggaggaguagaguuuaaaaacaguacucuuuuuccgguucgggacguaguugaagcaacgacaagccggauaaccgcucuugagacaggaagcuuaccauggagcuccucauccucaaggccaacgccaucaccaccauccucaccgccgucaccuucugcuucgccuccggccagaacaucaccgaggaguucuaccaguccaccugcuccgccgucuccaagggcuaccucuccgcccuccgcaccggcugguacaccuccgucaucaccaucgagcucuccaacaucaaggagaacaagugcaacggcaccgacgccaaggucaagcucaucaagcaggagcucgacaaguacaagaacgccgucaccgagcuccagcuccucaugcaguccacccccgccaccggcuccggcuccgccaucugcuccggcgucgccgucugcaagguccuccaccucgagggcgaggucaacaagaucaaguccgcccuccucuccaccaacaaggccgucgucucccucuccaacggcgucuccguccucaccuucaagguccucgaccucaagaacuacaucgacaagcagcuccuccccauccucaacaagcaguccugcuccaucuccaacaucgagaccgucaucgaguuccagcagaagaacaaccgccuccucgagaucacccgcgaguucuccgucaacgccggcgucaccacccccgucuccaccuacaugcucaccaacuccgagcuccucucccucaucaacgacaugcccaucaccaacgaccagaagaagcucauguccaacaacguccagaucguccgccagcaguccuacuccaucaugugcaucaucaaggaggagguccucgccuacgucguccagcucccccucuacggcgucaucgacacccccugcuggaagcuccacaccuccccccucugcaccaccaacaccaaggagggcuccaacaucugccucacccgcaccgaccgcggcugguacugcgacaacgccggcuccgucuccuucuucccccaggccgagaccugcaagguccaguccaaccgcgucuucugcgacaccaugaacucccgcacccuccccuccgaggucaaccucugcaacgucgacaucuucaaccccaaguacgacugcaagaucaugaccuccaagaccgacgucuccuccuccgucaucaccucccucggcgccaucgucuccugcuacggcaagaccaagugcaccgccuccaacaagaaccgcggcaucaucaagaccuucuccaacggcugcgacuacgucuccaacaagggcgucgacaccgucuccgucggcaacacccucuacugcgucaacaagcaggagggcaagucccucuacgucaagggcgagcccaucaucaacuucuacgacccccucgucuuccccuccgacgaguucgacgccuccaucucccaggucaacgagaagaucaaccagucccucgccuucauccgcaaguccgacgagcuccuccacaacgucaacgccggcaaguccaccaccaacaucaugaucaccaccaucaucaucgucaucaucgucauccuccucucccucaucgccgucggccuccuccucuacugcaaggcccgcuccacccccgucacccucuccaaggaccagcucuccggcaucaacaacaucgccuucuccaacugaggacuaguaauaaggaaacuguaugaaugucugugggcaggaagugaagagauccuucuguaaagguuuuuggaauuaugucugcugaauaauaaacuuuuuugaaauaauaaaucugguagaaaaaugagaucuaaaaaaaaaaaaaaaaaaaaaaaaaaaaaaaaaaaaaaaaaaaaaaaaaaaaaaaaaaaaaaaaugcaucccccccccccccccccccccccccccccccaaaggcucuuuucagagccaccagaauu

SEQ ID NO: 4872 - RNA, 1994 nt, Artificial Sequence
  mRNA product Design g-4 comprising derived and/or modified sequence from HRSV(A2)__F_DSCav1_mut4 (opt3)
gggagacuccugucgggcggaaguaggaggaguagaguuuaaaaacaguacucuuuuuccgguucgggacguaguugaagcaacgacaagccggauaaccgcucuugagacaggaagcuuaccauggagcugcucauccuuaaggccaacgcuauuaccacaauacugacugcagugacguucugcuuugccagcggccagaauaucaccgaagaguucuaccaauccacauguucugcggucucaaaaggguauuugagugcuuuaagaacuggaugguacaccagcguuauuacaaucgaacuguccaacauuaaggagaauaaaugcaacgguaccgacgccaaggugaaacuaaucaagcaggaacucgauaaguauaaaaaugcaguaacugagcugcagcuucugaugcagucuacacccgccaccggcucggggucagcuauauguagcggaguggcagucugcaagguguugcaccucgagggcgaaguuaacaaaaucaagagugcccugcuguccacgaauaaagcuguggucucucucagcaacgguguguccguauuaacuuuuaagguucuggaccuuaagaauuacauugauaaacaauugcugccuauccuaaacaagcagucauguaguauuagcaauaucgagaccgugauagaguuccagcagaaaaacaauaggcuccuggaaauuacacgggaguuuucugucaacgccggggugacuaccccaguguccacauauaugcuuaccaauucagaacuguugagccucaucaacgacaugccgauuacgaacgaucaaaagaaacugaugaguaauaacguccagaucguucgccagcagucuuacuccaucaugugcauuauaaaggaggaaguguuagcguauguagugcaacugccccucuacggagucaucgacacuccuuguuggaaacuucauacaagcccacugugcaccacuaauacaaaggagggcucgaacauuuguuugacccgaacggaucguggcugguacugcgacaaugcagggucuguguccuucuuuccccaggccgaaaccuguaagguucagucaaacagaguguucugcgauacaaugaauaguagaacucugccuagcgaggucaaccucugcaauguggacaucuuuaacccaaaauaugauuguaagauaaugaccuccaaaacagacguaucuagcucaguuauuaccagucugggagcuaucguguccugcuacgguaagacuaaauguacagccagcaauaagaacaggggcaucauuaagaccuucucuaaugggugcgauuaugucucaaacaaaggaguggacacugucagugugggcaauacgcuuuacuguguuaacaagcaagaggguaaaagccuguaugugaagggggaacccaucauuaacuuuuacgacccuuugguauucccauccgaugaguuugacgcaucuauaucgcaggucaaugagaaaaucaaccagagccucgcuuucauucggaaguccgaugaacuguuacacaaugugaacgccggaaagucaacaaccaauaucaugaucacuaccauuauaaucguuauuaucgugauucugcuaagucucaucgcggucggccugcuuuuguauugcaaagcccgcucuacaccggugacccugagcaaggaccagcucuccggcauaaacaauaucgcauucucaaacugaggacuaguaauaaggaaacuguaugaaugucugugggcaggaagugaagagauccuucuguaaagguuuuuggaauuaugucugcugaauaauaaacuuuuuugaaauaauaaaucugguagaaaaaugagaucuaaaaaaaaaaaaaaaaaaaaaaaaaaaaaaaaaaaaaaaaaaaaaaaaaaaaaaaaaaaaaaaaugcaucccccccccccccccccccccccccccccccaaaggcucuuuucagagccaccagaauu

SEQ ID NO: 4873 - RNA, 1994 nt, Artificial Sequence
  mRNA product Design g-4 comprising derived and/or modified sequence from HRSV(A2)__F_DSCav1_mut4 (opt4)
gggagacuccugucgggcggaaguaggaggaguagaguuuaaaaacaguacucuuuuuccgguucgggacguaguugaagcaacgacaagccggauaaccgcucuugagacaggaagcuuaccauggagcugcugauccugaaggccaacgccaucaccaccauccugaccgccgugaccuucugcuucgccagcggccagaacaucaccgaggaguucuaccagagcaccugcagcgccgugagcaagggcuaccugagcgcccugagaaccggcugguacaccagcgugaucaccaucgagcugagcaacaucaaggagaacaagugcaacggcaccgacgccaaggugaagcugaucaagcaggagcuggacaaguacaagaacgccgugaccgagcugcagcugcugaugcagagcacccccgccaccggcagcggcagcgccaucugcagcggcguggccgugugcaaggugcugcaccuggagggcgaggugaacaagaucaagagcgcccugcugagcaccaacaaggccguggugagccugagcaacggcgugagcgugcugaccuucaaggugcuggaccugaagaacuacaucgacaagcagcugcugcccauccugaacaagcagagcugcagcaucagcaacaucgagaccgugaucgaguuccagcagaagaacaacagacugcuggagaucaccagagaguucagcgugaacgccggcgugaccacccccgugagcaccuacaugcugaccaacagcgagcugcugagccugaucaacgacaugcccaucaccaacgaccagaagaagcugaugagcaacaacgugcagaucgugagacagcagagcuacagcaucaugugcaucaucaaggaggaggugcuggccuacguggugcagcugccccuguacggcgugaucgacacccccugcuggaagcugcacaccagcccccugugcaccaccaacaccaaggagggcagcaacaucugccugaccagaaccgacagaggcugguacugcgacaacgccggcagcgugagcuucuucccccaggccgagaccugcaaggugcagagcaacagaguguucugcgacaccaugaacagcagaacccugcccagcgaggugaaccugugcaacguggacaucuucaaccccaaguacgacugcaagaucaugaccagcaagaccgacgugagcagcagcgugaucaccagccugggcgccaucgugagcugcuacggcaagaccaagugcaccgccagcaacaagaacagaggcaucaucaagaccuucagcaacggcugcgacuacgugagcaacaagggcguggacaccgugagcgugggcaacacccuguacugcgugaacaagcaggagggcaagagccuguacgugaagggcgagcccaucaucaacuucuacgacccccugguguuccccagcgacgaguucgacgccagcaucagccaggugaacgagaagaucaaccagagccuggccuucaucagaaagagcgacgagcugcugcacaacgugaacgccggcaagagcaccaccaacaucaugaucaccaccaucaucaucgugaucaucgugauccugcugagccugaucgccgugggccugcugcuguacugcaaggccagaagcacccccgugacccugagcaaggaccagcugagcggcaucaacaacaucgccuucagcaacugaggacuaguaauaaggaaacuguaugaaugucugugggcaggaagugaagagauccuucuguaaagguuuuuggaauuaugucugcugaauaauaaacuuuuuugaaauaauaaaucugguagaaaaaugagaucuaaaaaaaaaaaaaaaaaaaaaaaaaaaaaaaaaaaaaaaaaaaaaaaaaaaaaaaaaaaaaaaaugcaucccccccccccccccccccccccccccccccaaaggcucuuuucagagccaccagaauu

SEQ ID NO: 4874 - RNA, 1994 nt, Artificial Sequence
  mRNA product Design g-4 comprising derived and/or modified sequence from HRSV(A2)__F_DSCav1_mut4 (opt5)
gggagacuccugucgggcggaaguaggaggaguagaguuuaaaaacaguacucuuuuuccgguucgggacguaguugaagcaacgacaagccggauaaccgcucuugagacaggaagcuuaccauggagcugcucauccugaaggccaacgcuauuaccacaauccuuacggccgugaccuucugcuuugcgagcggccagaauauuacagaagaguucuaccaauccaccuguucugcugucagcaaaggguaucuguccgcccucagaacaggaugguacaccucuguuaucacaauugaacugagcaacaucaaggagaauaaaugcaacggcaccgacgccaaggugaaacuuaucaagcaggaacuggauaaguauaaaaaugcugugacggagcuccagcugcugaugcaguccacccccgccacagggucuggaagcgcuauuuguuccggcgucgccgugugcaagguucuccaccuggagggggaagugaacaaaaucaagagcgcgcuucugucuaccaauaaagccgucgugucccucagcaacggaguuucugugcugacauuuaagguccuugaccugaagaauuacauugauaaacaacuccugccuauccugaacaagcaguccuguagcauuucuaauaucgagaccgugauugaguuccagcagaaaaacaaucggcuccuggaaaucacgcgcgaguuuuccgugaacgcuggcgucacaaccccgguuagcacauauaugcuuaccaauuccgaacugcucucucugaucaacgacaugcccauuaccaacgaucaaaagaaacuuaugagcaauaacgugcagaucgugagacagcaguccuacagcauuaugugcaucauuaaggaggaaguccuggccuaugugguucaacucccucuguacggcgugaucgacacacccuguuggaaacugcauacgucuccucucugcaccacaaauaccaaggagggguccaacaucugucugacacggaccgaucgcggaugguacugcgacaaugcuggcagcgucucuuucuuuccccaggccgaaacguguaaggugcagagcaacagaguuuucugcgauacaaugaacuccagaacccugccuucugaggugaaucucugcaaugucgacauuuuuaacccgaaauaugauuguaagaucaugaccagcaaaacagacguguccagcucugucauuaccucccugggggcgaucgugagcugcuacggaaagacaaaauguacggccucuaauaagaaccggggcauuaucaagaccuucuccaaugggugcgauuauguuagcaacaaaggaguggacacagucuccgugggcaauacccuuuacuguguuaacaagcaagagggcaaaucucuguaugugaagggggaacccaucauuaacuuuuacgacccucucgucuuccccagcgaugaguuugacgcuuccaucucucaggugaaugagaaaauuaaccagagccuggccuucauccgcaaguccgaugaacugcuccacaaugugaacgcuggaaagagcacaaccaauauuaugaucacgaccauuaucaucguuauuaucgucauucugcuuucucugaucgccgugggccuccugcuguauugcaaagccagauccacaccugugacccuuagcaaggaccagcucucugggauuaacaauaucgcuuucuccaacugaggacuaguaauaaggaaacuguaugaaugucugugggcaggaagugaagagauccuucuguaaagguuuuuggaauuaugucugcugaauaauaaacuuuuuugaaauaauaaaucugguagaaaaaugagaucuaaaaaaaaaaaaaaaaaaaaaaaaaaaaaaaaaaaaaaaaaaaaaaaaaaaaaaaaaaaaaaaaugcaucccccccccccccccccccccccccccccccaaaggcucuuuucagagccaccagaauu

SEQ ID NO: 4875 - RNA, 1994 nt, Artificial Sequence
  mRNA product Design g-4 comprising derived and/or modified sequence from HRSV(A2)__F_DSCav1_mut4 (opt6)
gggagacuccugucgggcggaaguaggaggaguagaguuuaaaaacaguacucuuuuuccgguucgggacguaguugaagcaacgacaagccggauaaccgcucuugagacaggaagcuuaccauggaacuucuaauacucaaagccaacgcaauaacaacaauauuaacagccguaacauuuugcuucgcaucaggucaaaacauaacagaagaguucuaccaauccacaugcucagcaguaucaaaaggauauuuaagugcucuaagaacaggaugguacacauccguaauaacaaucgaacuaucaaacauaaaagaaaauaaauguaauggaacagacgccaaaguaaaauuaaucaaacaagaacuagacaaauacaaaaacgcaguuacugaauuacaauuauuaaugcaaucaacaccggccacaggaucuggaucagcaauaugcucaggaguagcagucugcaaaguauuacaccuagaaggggaaguuaauaaaaucaaaucagcauuacuauccaccaacaaagcgguaguuucacucuccaacggcguaucugucuuaacauucaaaguauuagaccuaaaaaacuacauugacaaacaacuacuaccaauccuaaacaaacaaucauguuccauaagcaauauagaaacaguaauagaauuucaacaaaaaaacaacagacuauuagaaauaacaagagaauuuuccgucaaugcaggaguuacuaccccugucuccaccuauaugcuaaccaauuccgaacucuuaucauuaauaaacgacaugccuaucacaaaugaccaaaaaaaauuaaugagcaacaacguacaaauaguacgacaacaaucauacucaaucaugugcauaauaaaagaagaaguccuagcauacguuguacaacuaccacuauacggagucauagauaccccaugcuggaaacuccauacaagcccacuaugcacuacaaacacaaaagaaggcucuaauauaugucuaacaagaacagaccgaggaugguacugcgauaaugccggcucagucucauucuuuccgcaagccgaaacuuguaaaguacaaaguaacagaguauuuugugacaccaugaacucaagaacccucccaagcgaagucaaucuaugcaacguugauauauucaaucccaaauacgacugcaaaaucaugaccucaaaaacagacgucagcucauccguuauaacaucacuaggagccaucguaucuugcuauggaaaaacaaaaugcacagcaagcaauaaaaacagaggcauaauaaaaacauucucaaauggaugcgacuacguaucaaacaaaggagucgacacaguuuccguaggaaacacuuuauacugcguaaacaaacaagaaggaaaaucauuauacgucaaaggugaaccaauaauaaacuucuacgauccacuuguauucccaucagacgaauuugacgcaucaauuucacaaguaaacgaaaaaauaaaccaaucacucgcauucauaagaaaaucagaugaacuacuacauaacguaaacgcaggaaaauccacaacaaacaucaugauaacaaccaucauaaucguaauaaucguaauacuauuaucccuaauugcaguaggauuacucuuauauugcaaagcaagaucaacaccaguaacccucaguaaagaccaacuauccggaauaaauaacaucgcauucucaaacuaaggacuaguaauaaggaaacuguaugaaugucugugggcaggaagugaagagauccuucuguaaagguuuuuggaauuaugucugcugaauaauaaacuuuuuugaaauaauaaaucugguagaaaaaugagaucuaaaaaaaaaaaaaaaaaaaaaaaaaaaaaaaaaaaaaaaaaaaaaaaaaaaaaaaaaaaaaaaaugcaucccccccccccccccccccccccccccccccaaaggcucuuuucagagccaccagaauu

SEQ ID NO: 4876 - RNA, 1994 nt, Artificial Sequence
  mRNA product Design g-4 comprising derived and/or modified sequence from HRSV(A2)__F_DSCav1_mut4 (opt11)
gggagacuccugucgggcggaaguaggaggaguagaguuuaaaaacaguacucuuuuuccgguucgggacguaguugaagcaacgacaagccggauaaccgcucuugagacaggaagcuuaccauggaacugcucauccucaaagccaacgccaucaccaccauucuuaccgccgucacauucugcuucgccucaggccaaaacaucaccgaagaauuuuaccaauccacuuguucagccgucucaaaaggauaccuaucagcccuccguaccggcugguacaccucggucauaacaauagaacucuccaacauaaaagaaaacaaaugcaacggcaccgacgccaaggucaaacugauaaaacaagaacuugauaaauacaaaaacgccgucacugaacuccaacuccucaugcaauccacucccgcuacuggcucuggcuccgccaucugcucuggcgucgccgucuguaaaguacuccaccucgaaggggaagucaacaaaaucaaaucagcccuccuuagcaccaacaaggccgucgucucccucucaaacggagucagcguccucaccuucaagguccucgaccucaagaacuacaucgacaaacaacuccugcccauccuaaauaaacaauccugcucuaucuccaauaucgaaaccguuauagaguuccaacagaaaaacaaccgacuccucgaaaucacccgcgaguucuccgucaacgcaggcgucaccaccccugugucaaccuacaugcucaccaacagcgaacuacucucacucaucaaugacaugcccaucaccaacgaccaaaagaaacucauguccaacaacguccaaaucguacgucaacaauccuacagcaucaugugcaucauaaaagaagaaguccucgccuacgucguccaacuuccccucuacggcgucauagacacccccugcuggaaacugcauaccucaccccuaugcaccaccaacacuaaagaaggcuccaacaucugccucacccgcacggaccgcggcugguacugcgacaacgccggcuccgucuccuucuucccccaagccgaaacuuguaaaguccaauccaacagagucuucugcgacaccaugaacucuagaacgcugccauccgagguaaaccuaugcaacgucgacaucuucaaucccaaauacgacugcaagaucaugaccucaaaaaccgacguauccuccucaguaaucaccagucucggagcuaucgucuccugcuacggcaaaaccaaaugcacggccucuaacaaaaaccgcggcaucaucaaaaccuucucaaacggaugcgacuacgucagcaacaaaggcguagauaccgucucugucggcaacacacuguacugcguaaacaagcaagaaggaaaaucccucuacguaaaaggcgaacccaucaucaacuucuacgacccccucguuuuccccucagaugaauuugacgccucgauaucacaagucaacgaaaagauaaaucagucccucgccuucauccgaaaauccgacgaacuccuccacaacguuaacgcaggaaaguccaccacaaacaucaugauaacuacaaucauaauagucauuaucgucauacuccucucccuaaucgccguaggccugcuacucuacugcaaagcccgcucaacccccgucacucucucaaaagaccaacucuccggcaucaauaacaucgccuucucaaacuaaggacuaguaauaaggaaacuguaugaaugucugugggcaggaagugaagagauccuucuguaaagguuuuuggaauuaugucugcugaauaauaaacuuuuuugaaauaauaaaucugguagaaaaaugagaucuaaaaaaaaaaaaaaaaaaaaaaaaaaaaaaaaaaaaaaaaaaaaaaaaaaaaaaaaaaaaaaaaugcaucccccccccccccccccccccccccccccccaaaggcucuuuucagagccaccagaauu

SEQ ID NO: 4877 - RNA, 1970 nt, Artificial Sequence
  mRNA product Design g-5 comprising derived and/or modified sequence from HRSV(A2)__F_DSCav1_mut4 (opt1)
gggagacccgugacccggaaguuguacggcuacgcgacuuucccucccacaaacccucgcgcccuuccuuuccuacuugggcccggcagaaagcuuaccauggagcugcucauccugaaggccaacgccaucaccaccauccugacggcggugaccuucugcuucgccagcggccagaacaucaccgaggaguucuaccaguccacgugcagcgccgucuccaagggguaccucagcgcccugcggaccggcugguacaccuccgugaucaccaucgagcugagcaacaucaaggagaacaagugcaacgggaccgacgccaaggugaagcucaucaagcaggagcuggacaaguacaagaacgcggucacggagcugcagcuccugaugcaguccaccccggcaaccggcuccggcuccgccaucugcagcggcgucgccgugugcaaggugcugcaccucgagggggaggucaacaagaucaagagcgcccugcuguccaccaacaaggccguggugagccucuccaacggcgucagcgugcugaccuucaaggugcuggaccucaagaacuacaucgacaagcagcugcugcccauccugaacaagcagagcugcuccaucagcaacaucgagacggugaucgaguuccagcagaagaacaaccggcuccuggagaucacccgcgaguucagcgugaacgccggggucaccacccccguguccacguacaugcugaccaacagcgagcuccugucccugaucaacgacaugccgaucaccaacgaccagaagaagcucaugagcaacaacgugcagaucguccggcagcaguccuacagcaucaugugcaucaucaaggaggaggugcuggcguacgugguccagcugccccucuacggcgugaucgacacccccugcuggaagcugcacacgagcccccugugcaccaccaacaccaaggagggguccaacaucugccucacgcgcaccgaccggggcugguacugcgacaacgccggcagcgucuccuucuucccgcaggccgagaccugcaaggugcagagcaaccgcguguucugcgacaccaugaacucccggacgcugcccagcgagguaaaccucugcaacgucgacaucuucaaccccaaguacgacugcaagaucaugaccuccaagaccgacgugagcuccagcgugaucaccucccugggggccaucgucagcugcuacggcaagacgaagugcaccgccagcaacaagaaccgggggaucaucaagaccuucuccaacggcugcgacuacgugagcaacaagggcguggacaccguguccgucgggaacacccuguacugcgugaacaagcaggagggcaagagccucuacgugaagggggagcccaucaucaacuucuacgacccgcuggucuuccccuccgacgaguucgacgcgagcaucucccaggugaacgagaagaucaaccagagccuggccuucauccgcaaguccgacgagcugcuccacaacgugaacgccggcaagagcacgaccaacaucaugaucaccaccaucaucaucgucaucaucgugauccugcugucccucaucgccguggggcugcugcucuacugcaaggcccggagcacgcccgucacccuguccaaggaccagcugagcggcaucaacaacaucgcguucuccaacugaggacuaguaauaaggaaacuguaugaaugucugugggcaggaagugaagagauccuucuguaaagguuuuuggaauuaugucugcugaauaauaaacuuuuuugaaauaauaaaucugguagaaaaaugagaucuaaaaaaaaaaaaaaaaaaaaaaaaaaaaaaaaaaaaaaaaaaaaaaaaaaaaaaaaaaaaaaaaugcaucccccccccccccccccccccccccccccccaaaggcucuuuucagagccaccagaauu

SEQ ID NO: 4878 - RNA, 1970 nt, Artificial Sequence
  mRNA product Design g-5 comprising derived and/or modified sequence from HRSV(A2)__F_DSCav1_mut4 (opt1)
gggagacccgugacccggaaguuguacggcuacgcgacuuucccucccacaaacccucgcgcccuuccuuuccuacuugggcccggcagaaagcuuaccauggagcugcucauccugaaggccaacgccaucaccaccauccugacggcggugaccuucugcuucgccagcggccagaacaucaccgaggaguucuaccaguccacgugcagcgccgucuccaagggguaccucagcgcccugcgcaccggcugguacaccuccgugaucaccaucgagcugagcaacaucaaggagaacaagugcaacgggaccgacgccaaggugaagcucaucaagcaggagcuggacaaguacaagaacgcggucacggagcugcagcuccugaugcaguccacccccgccaccggcagcggguccgccaucugcagcggcguggccgugugcaagguccugcaccucgagggcgaggugaacaagaucaaguccgcgcugcugagcaccaacaaggccguggucucccucagcaacgggguguccgugcugacguucaagguccuggaccucaagaacuacaucgacaagcagcugcugccgauccucaacaagcagagcugcuccaucagcaacaucgagaccgugaucgaguuccagcagaagaacaaccggcugcuggagaucacccgcgaguucuccgugaacgccggcgucaccacgcccgugagcaccuacaugcucaccaacagcgagcugcugucccucaucaacgacaugcccaucaccaacgaccagaagaagcugaugagcaacaacgugcagaucguccggcagcaguccuacagcaucaugugcaucaucaaggaggaggugcuggccuacgugguccagcucccccuguacggggugaucgacacgccgugcuggaagcugcacaccagcccccucugcaccaccaacacgaaggagggcuccaacaucugccugacccgcaccgaccgggggugguacugcgacaacgccggcuccgugagcuucuucccccaggcggagaccugcaagguccaguccaaccgcguguucugcgacacgaugaacagccggacccuccccuccgaggucaaccugugcaacguggacaucuucaacccgaaguacgacugcaagaucaugaccagcaagaccgacguguccagcuccgucaucacgagccugggcgccaucguguccugcuacgggaagaccaagugcaccgccagcaacaagaaccggggcaucaucaagaccuucuccaacgggugcgacuacgugagcaacaagggcgucgacacggugagcgugggcaacacccucuacugcgucaacaagcaggaggggaagucccuguacgugaagggcgagcccaucaucaacuucuacgacccccugguguuccccagcgacgaguucgacgccuccaucagccaggucaacgagaagaucaaccagucccucgccuucauccgcaagagcgacgagcugcugcacaacgugaacgcggggaaguccaccaccaacaucaugaucaccacgaucaucaucgugaucaucgucauccuccugagccugaucgccgugggccuccugcuguacugcaaggcccgguccaccccggugacccugagcaaggaccagcucuccgggaucaacaacaucgccuucagcaacugaggacuaguaauaaggaaacuguaugaaugucugugggcaggaagugaagagauccuucuguaaagguuuuuggaauuaugucugcugaauaauaaacuuuuuugaaauaauaaaucugguagaaaaaugagaucuaaaaaaaaaaaaaaaaaaaaaaaaaaaaaaaaaaaaaaaaaaaaaaaaaaaaaaaaaaaaaaaaugcaucccccccccccccccccccccccccccccccaaaggcucuuuucagagccaccagaauu

SEQ ID NO: 4879 - RNA, 1970 nt, Artificial Sequence
  mRNA product Design g-5 comprising derived and/or modified sequence from HRSV(A2)__F_DSCav1_mut4 (opt2)
gggagacccgugacccggaaguuguacggcuacgcgacuuucccucccacaaacccucgcgcccuuccuuuccuacuugggcccggcagaaagcuuaccauggagcuccucauccucaaggccaacgccaucaccaccauccucaccgccgucaccuucugcuucgccuccggccagaacaucaccgaggaguucuaccaguccaccugcuccgccgucuccaagggcuaccucuccgcccuccgcaccggcugguacaccuccgucaucaccaucgagcucuccaacaucaaggagaacaagugcaacggcaccgacgccaaggucaagcucaucaagcaggagcucgacaaguacaagaacgccgucaccgagcuccagcuccucaugcaguccacccccgccaccggcuccggcuccgccaucugcuccggcgucgccgucugcaagguccuccaccucgagggcgaggucaacaagaucaaguccgcccuccucuccaccaacaaggccgucgucucccucuccaacggcgucuccguccucaccuucaagguccucgaccucaagaacuacaucgacaagcagcuccuccccauccucaacaagcaguccugcuccaucuccaacaucgagaccgucaucgaguuccagcagaagaacaaccgccuccucgagaucacccgcgaguucuccgucaacgccggcgucaccacccccgucuccaccuacaugcucaccaacuccgagcuccucucccucaucaacgacaugcccaucaccaacgaccagaagaagcucauguccaacaacguccagaucguccgccagcaguccuacuccaucaugugcaucaucaaggaggagguccucgccuacgucguccagcucccccucuacggcgucaucgacacccccugcuggaagcuccacaccuccccccucugcaccaccaacaccaaggagggcuccaacaucugccucacccgcaccgaccgcggcugguacugcgacaacgccggcuccgucuccuucuucccccaggccgagaccugcaagguccaguccaaccgcgucuucugcgacaccaugaacucccgcacccuccccuccgaggucaaccucugcaacgucgacaucuucaaccccaaguacgacugcaagaucaugaccuccaagaccgacgucuccuccuccgucaucaccucccucggcgccaucgucuccugcuacggcaagaccaagugcaccgccuccaacaagaaccgcggcaucaucaagaccuucuccaacggcugcgacuacgucuccaacaagggcgucgacaccgucuccgucggcaacacccucuacugcgucaacaagcaggagggcaagucccucuacgucaagggcgagcccaucaucaacuucuacgacccccucgucuuccccuccgacgaguucgacgccuccaucucccaggucaacgagaagaucaaccagucccucgccuucauccgcaaguccgacgagcuccuccacaacgucaacgccggcaaguccaccaccaacaucaugaucaccaccaucaucaucgucaucaucgucauccuccucucccucaucgccgucggccuccuccucuacugcaaggcccgcuccacccccgucacccucuccaaggaccagcucuccggcaucaacaacaucgccuucuccaacugaggacuaguaauaaggaaacuguaugaaugucugugggcaggaagugaagagauccuucuguaaagguuuuuggaauuaugucugcugaauaauaaacuuuuuugaaauaauaaaucugguagaaaaaugagaucuaaaaaaaaaaaaaaaaaaaaaaaaaaaaaaaaaaaaaaaaaaaaaaaaaaaaaaaaaaaaaaaaugcaucccccccccccccccccccccccccccccccaaaggcucuuuucagagccaccagaauu

SEQ ID NO: 4880 - RNA, 1970 nt, Artificial Sequence
  mRNA product Design g-5 comprising derived and/or modified sequence from HRSV(A2)__F_DSCav1_mut4 (opt3)
gggagacccgugacccggaaguuguacggcuacgcgacuuucccucccacaaacccucgcgcccuuccuuuccuacuugggcccggcagaaagcuuaccauggagcugcucauccuuaaggccaacgcuauuaccacaauacugacugcagugacguucugcuuugccagcggccagaauaucaccgaagaguucuaccaauccacauguucugcggucucaaaaggguauuugagugcuuuaagaacuggaugguacaccagcguuauuacaaucgaacuguccaacauuaaggagaauaaaugcaacgguaccgacgccaaggugaaacuaaucaagcaggaacucgauaaguauaaaaaugcaguaacugagcugcagcuucugaugcagucuacacccgccaccggcucggggucagcuauauguagcggaguggcagucugcaagguguugcaccucgagggcgaaguuaacaaaaucaagagugcccugcuguccacgaauaaagcuguggucucucucagcaacgguguguccguauuaacuuuuaagguucuggaccuuaagaauuacauugauaaacaauugcugccuauccuaaacaagcagucauguaguauuagcaauaucgagaccgugauagaguuccagcagaaaaacaauaggcuccuggaaauuacacgggaguuuucugucaacgccggggugacuaccccaguguccacauauaugcuuaccaauucagaacuguugagccucaucaacgacaugccgauuacgaacgaucaaaagaaacugaugaguaauaacguccagaucguucgccagcagucuuacuccaucaugugcauuauaaaggaggaaguguuagcguauguagugcaacugccccucuacggagucaucgacacuccuuguuggaaacuucauacaagcccacugugcaccacuaauacaaaggagggcucgaacauuuguuugacccgaacggaucguggcugguacugcgacaaugcagggucuguguccuucuuuccccaggccgaaaccuguaagguucagucaaacagaguguucugcgauacaaugaauaguagaacucugccuagcgaggucaaccucugcaauguggacaucuuuaacccaaaauaugauuguaagauaaugaccuccaaaacagacguaucuagcucaguuauuaccagucugggagcuaucguguccugcuacgguaagacuaaauguacagccagcaauaagaacaggggcaucauuaagaccuucucuaaugggugcgauuaugucucaaacaaaggaguggacacugucagugugggcaauacgcuuuacuguguuaacaagcaagaggguaaaagccuguaugugaagggggaacccaucauuaacuuuuacgacccuuugguauucccauccgaugaguuugacgcaucuauaucgcaggucaaugagaaaaucaaccagagccucgcuuucauucggaaguccgaugaacuguuacacaaugugaacgccggaaagucaacaaccaauaucaugaucacuaccauuauaaucguuauuaucgugauucugcuaagucucaucgcggucggccugcuuuuguauugcaaagcccgcucuacaccggugacccugagcaaggaccagcucuccggcauaaacaauaucgcauucucaaacugaggacuaguaauaaggaaacuguaugaaugucugugggcaggaagugaagagauccuucuguaaagguuuuuggaauuaugucugcugaauaauaaacuuuuuugaaauaauaaaucugguagaaaaaugagaucuaaaaaaaaaaaaaaaaaaaaaaaaaaaaaaaaaaaaaaaaaaaaaaaaaaaaaaaaaaaaaaaaugcaucccccccccccccccccccccccccccccccaaaggcucuuuucagagccaccagaauu

SEQ ID NO: 4881 - RNA, 1970 nt, Artificial Sequence
  mRNA product Design g-5 comprising derived and/or modified sequence from HRSV(A2)__F_DSCav1_mut4 (opt4)
gggagacccgugacccggaaguuguacggcuacgcgacuuucccucccacaaacccucgcgcccuuccuuuccuacuugggcccggcagaaagcuuaccauggagcugcugauccugaaggccaacgccaucaccaccauccugaccgccgugaccuucugcuucgccagcggccagaacaucaccgaggaguucuaccagagcaccugcagcgccgugagcaagggcuaccugagcgcccugagaaccggcugguacaccagcgugaucaccaucgagcugagcaacaucaaggagaacaagugcaacggcaccgacgccaaggugaagcugaucaagcaggagcuggacaaguacaagaacgccgugaccgagcugcagcugcugaugcagagcacccccgccaccggcagcggcagcgccaucugcagcggcguggccgugugcaaggugcugcaccuggagggcgaggugaacaagaucaagagcgcccugcugagcaccaacaaggccguggugagccugagcaacggcgugagcgugcugaccuucaaggugcuggaccugaagaacuacaucgacaagcagcugcugcccauccugaacaagcagagcugcagcaucagcaacaucgagaccgugaucgaguuccagcagaagaacaacagacugcuggagaucaccagagaguucagcgugaacgccggcgugaccacccccgugagcaccuacaugcugaccaacagcgagcugcugagccugaucaacgacaugcccaucaccaacgaccagaagaagcugaugagcaacaacgugcagaucgugagacagcagagcuacagcaucaugugcaucaucaaggaggaggugcuggccuacguggugcagcugccccuguacggcgugaucgacacccccugcuggaagcugcacaccagcccccugugcaccaccaacaccaaggagggcagcaacaucugccugaccagaaccgacagaggcugguacugcgacaacgccggcagcgugagcuucuucccccaggccgagaccugcaaggugcagagcaacagaguguucugcgacaccaugaacagcagaacccugcccagcgaggugaaccugugcaacguggacaucuucaaccccaaguacgacugcaagaucaugaccagcaagaccgacgugagcagcagcgugaucaccagccugggcgccaucgugagcugcuacggcaagaccaagugcaccgccagcaacaagaacagaggcaucaucaagaccuucagcaacggcugcgacuacgugagcaacaagggcguggacaccgugagcgugggcaacacccuguacugcgugaacaagcaggagggcaagagccuguacgugaagggcgagcccaucaucaacuucuacgacccccugguguuccccagcgacgaguucgacgccagcaucagccaggugaacgagaagaucaaccagagccuggccuucaucagaaagagcgacgagcugcugcacaacgugaacgccggcaagagcaccaccaacaucaugaucaccaccaucaucaucgugaucaucgugauccugcugagccugaucgccgugggccugcugcuguacugcaaggccagaagcacccccgugacccugagcaaggaccagcugagcggcaucaacaacaucgccuucagcaacugaggacuaguaauaaggaaacuguaugaaugucugugggcaggaagugaagagauccuucuguaaagguuuuuggaauuaugucugcugaauaauaaacuuuuuugaaauaauaaaucugguagaaaaaugagaucuaaaaaaaaaaaaaaaaaaaaaaaaaaaaaaaaaaaaaaaaaaaaaaaaaaaaaaaaaaaaaaaaugcaucccccccccccccccccccccccccccccccaaaggcucuuuucagagccaccagaauu

SEQ ID NO: 4882 - RNA, 1970 nt, Artificial Sequence
  mRNA product Design g-5 comprising derived and/or modified sequence from HRSV(A2)__F_DSCav1_mut4 (opt5)
gggagacccgugacccggaaguuguacggcuacgcgacuuucccucccacaaacccucgcgcccuuccuuuccuacuugggcccggcagaaagcuuaccauggagcugcucauccugaaggccaacgcuauuaccacaauccuuacggccgugaccuucugcuuugcgagcggccagaauauuacagaagaguucuaccaauccaccuguucugcugucagcaaaggguaucuguccgcccucagaacaggaugguacaccucuguuaucacaauugaacugagcaacaucaaggagaauaaaugcaacggcaccgacgccaaggugaaacuuaucaagcaggaacuggauaaguauaaaaaugcugugacggagcuccagcugcugaugcaguccacccccgccacagggucuggaagcgcuauuuguuccggcgucgccgugugcaagguucuccaccuggagggggaagugaacaaaaucaagagcgcgcuucugucuaccaauaaagccgucgugucccucagcaacggaguuucugugcugacauuuaagguccuugaccugaagaauuacauugauaaacaacuccugccuauccugaacaagcaguccuguagcauuucuaauaucgagaccgugauugaguuccagcagaaaaacaaucggcuccuggaaaucacgcgcgaguuuuccgugaacgcuggcgucacaaccccgguuagcacauauaugcuuaccaauuccgaacugcucucucugaucaacgacaugcccauuaccaacgaucaaaagaaacuuaugagcaauaacgugcagaucgugagacagcaguccuacagcauuaugugcaucauuaaggaggaaguccuggccuaugugguucaacucccucuguacggcgugaucgacacacccuguuggaaacugcauacgucuccucucugcaccacaaauaccaaggagggguccaacaucugucugacacggaccgaucgcggaugguacugcgacaaugcuggcagcgucucuuucuuuccccaggccgaaacguguaaggugcagagcaacagaguuuucugcgauacaaugaacuccagaacccugccuucugaggugaaucucugcaaugucgacauuuuuaacccgaaauaugauuguaagaucaugaccagcaaaacagacguguccagcucugucauuaccucccugggggcgaucgugagcugcuacggaaagacaaaauguacggccucuaauaagaaccggggcauuaucaagaccuucuccaaugggugcgauuauguuagcaacaaaggaguggacacagucuccgugggcaauacccuuuacuguguuaacaagcaagagggcaaaucucuguaugugaagggggaacccaucauuaacuuuuacgacccucucgucuuccccagcgaugaguuugacgcuuccaucucucaggugaaugagaaaauuaaccagagccuggccuucauccgcaaguccgaugaacugcuccacaaugugaacgcuggaaagagcacaaccaauauuaugaucacgaccauuaucaucguuauuaucgucauucugcuuucucugaucgccgugggccuccugcuguauugcaaagccagauccacaccugugacccuuagcaaggaccagcucucugggauuaacaauaucgcuuucuccaacugaggacuaguaauaaggaaacuguaugaaugucugugggcaggaagugaagagauccuucuguaaagguuuuuggaauuaugucugcugaauaauaaacuuuuuugaaauaauaaaucugguagaaaaaugagaucuaaaaaaaaaaaaaaaaaaaaaaaaaaaaaaaaaaaaaaaaaaaaaaaaaaaaaaaaaaaaaaaaugcaucccccccccccccccccccccccccccccccaaaggcucuuuucagagccaccagaauu

SEQ ID NO: 4883 - RNA, 1970 nt, Artificial Sequence
  mRNA product Design g-5 comprising derived and/or modified sequence from HRSV(A2)__F_DSCav1_mut4 (opt6)
gggagacccgugacccggaaguuguacggcuacgcgacuuucccucccacaaacccucgcgcccuuccuuuccuacuugggcccggcagaaagcuuaccauggaacuucuaauacucaaagccaacgcaauaacaacaauauuaacagccguaacauuuugcuucgcaucaggucaaaacauaacagaagaguucuaccaauccacaugcucagcaguaucaaaaggauauuuaagugcucuaagaacaggaugguacacauccguaauaacaaucgaacuaucaaacauaaaagaaaauaaauguaauggaacagacgccaaaguaaaauuaaucaaacaagaacuagacaaauacaaaaacgcaguuacugaauuacaauuauuaaugcaaucaacaccggccacaggaucuggaucagcaauaugcucaggaguagcagucugcaaaguauuacaccuagaaggggaaguuaauaaaaucaaaucagcauuacuauccaccaacaaagcgguaguuucacucuccaacggcguaucugucuuaacauucaaaguauuagaccuaaaaaacuacauugacaaacaacuacuaccaauccuaaacaaacaaucauguuccauaagcaauauagaaacaguaauagaauuucaacaaaaaaacaacagacuauuagaaauaacaagagaauuuuccgucaaugcaggaguuacuaccccugucuccaccuauaugcuaaccaauuccgaacucuuaucauuaauaaacgacaugccuaucacaaaugaccaaaaaaaauuaaugagcaacaacguacaaauaguacgacaacaaucauacucaaucaugugcauaauaaaagaagaaguccuagcauacguuguacaacuaccacuauacggagucauagauaccccaugcuggaaacuccauacaagcccacuaugcacuacaaacacaaaagaaggcucuaauauaugucuaacaagaacagaccgaggaugguacugcgauaaugccggcucagucucauucuuuccgcaagccgaaacuuguaaaguacaaaguaacagaguauuuugugacaccaugaacucaagaacccucccaagcgaagucaaucuaugcaacguugauauauucaaucccaaauacgacugcaaaaucaugaccucaaaaacagacgucagcucauccguuauaacaucacuaggagccaucguaucuugcuauggaaaaacaaaaugcacagcaagcaauaaaaacagaggcauaauaaaaacauucucaaauggaugcgacuacguaucaaacaaaggagucgacacaguuuccguaggaaacacuuuauacugcguaaacaaacaagaaggaaaaucauuauacgucaaaggugaaccaauaauaaacuucuacgauccacuuguauucccaucagacgaauuugacgcaucaauuucacaaguaaacgaaaaaauaaaccaaucacucgcauucauaagaaaaucagaugaacuacuacauaacguaaacgcaggaaaauccacaacaaacaucaugauaacaaccaucauaaucguaauaaucguaauacuauuaucccuaauugcaguaggauuacucuuauauugcaaagcaagaucaacaccaguaacccucaguaaagaccaacuauccggaauaaauaacaucgcauucucaaacuaaggacuaguaauaaggaaacuguaugaaugucugugggcaggaagugaagagauccuucuguaaagguuuuuggaauuaugucugcugaauaauaaacuuuuuugaaauaauaaaucugguagaaaaaugagaucuaaaaaaaaaaaaaaaaaaaaaaaaaaaaaaaaaaaaaaaaaaaaaaaaaaaaaaaaaaaaaaaaugcaucccccccccccccccccccccccccccccccaaaggcucuuuucagagccaccagaauu

SEQ ID NO: 4884 - RNA, 1970 nt, Artificial Sequence
  mRNA product Design g-5 comprising derived and/or modified sequence from HRSV(A2)__F_DSCav1_mut4 (opt11)
gggagacccgugacccggaaguuguacggcuacgcgacuuucccucccacaaacccucgcgcccuuccuuuccuacuugggcccggcagaaagcuuaccauggaacugcucauccucaaagccaacgccaucaccaccauucuuaccgccgucacauucugcuucgccucaggccaaaacaucaccgaagaauuuuaccaauccacuuguucagccgucucaaaaggauaccuaucagcccuccguaccggcugguacaccucggucauaacaauagaacucuccaacauaaaagaaaacaaaugcaacggcaccgacgccaaggucaaacugauaaaacaagaacuugauaaauacaaaaacgccgucacugaacuccaacuccucaugcaauccacucccgcuacuggcucuggcuccgccaucugcucuggcgucgccgucuguaaaguacuccaccucgaaggggaagucaacaaaaucaaaucagcccuccuuagcaccaacaaggccgucgucucccucucaaacggagucagcguccucaccuucaagguccucgaccucaagaacuacaucgacaaacaacuccugcccauccuaaauaaacaauccugcucuaucuccaauaucgaaaccguuauagaguuccaacagaaaaacaaccgacuccucgaaaucacccgcgaguucuccgucaacgcaggcgucaccaccccugugucaaccuacaugcucaccaacagcgaacuacucucacucaucaaugacaugcccaucaccaacgaccaaaagaaacucauguccaacaacguccaaaucguacgucaacaauccuacagcaucaugugcaucauaaaagaagaaguccucgccuacgucguccaacuuccccucuacggcgucauagacacccccugcuggaaacugcauaccucaccccuaugcaccaccaacacuaaagaaggcuccaacaucugccucacccgcacggaccgcggcugguacugcgacaacgccggcuccgucuccuucuucccccaagccgaaacuuguaaaguccaauccaacagagucuucugcgacaccaugaacucuagaacgcugccauccgagguaaaccuaugcaacgucgacaucuucaaucccaaauacgacugcaagaucaugaccucaaaaaccgacguauccuccucaguaaucaccagucucggagcuaucgucuccugcuacggcaaaaccaaaugcacggccucuaacaaaaaccgcggcaucaucaaaaccuucucaaacggaugcgacuacgucagcaacaaaggcguagauaccgucucugucggcaacacacuguacugcguaaacaagcaagaaggaaaaucccucuacguaaaaggcgaacccaucaucaacuucuacgacccccucguuuuccccucagaugaauuugacgccucgauaucacaagucaacgaaaagauaaaucagucccucgccuucauccgaaaauccgacgaacuccuccacaacguuaacgcaggaaaguccaccacaaacaucaugauaacuacaaucauaauagucauuaucgucauacuccucucccuaaucgccguaggccugcuacucuacugcaaagcccgcucaacccccgucacucucucaaaagaccaacucuccggcaucaauaacaucgccuucucaaacuaaggacuaguaauaaggaaacuguaugaaugucugugggcaggaagugaagagauccuucuguaaagguuuuuggaauuaugucugcugaauaauaaacuuuuuugaaauaauaaaucugguagaaaaaugagaucuaaaaaaaaaaaaaaaaaaaaaaaaaaaaaaaaaaaaaaaaaaaaaaaaaaaaaaaaaaaaaaaaugcaucccccccccccccccccccccccccccccccaaaggcucuuuucagagccaccagaauu

SEQ ID NO: 4885 - RNA, 1986 nt, Artificial Sequence
  mRNA product Design h-1 comprising derived and/or modified sequence from HRSV(A2)__F_DSCav1_mut4 (opt1)
gggagacccgugacccggaaguuguacggcuacgcgacuuucccucccacaaacccucgcgcccuuccuuuccuacuugggcccggcagaaagcuuaccauggagcugcucauccugaaggccaacgccaucaccaccauccugacggcggugaccuucugcuucgccagcggccagaacaucaccgaggaguucuaccaguccacgugcagcgccgucuccaagggguaccucagcgcccugcggaccggcugguacaccuccgugaucaccaucgagcugagcaacaucaaggagaacaagugcaacgggaccgacgccaaggugaagcucaucaagcaggagcuggacaaguacaagaacgcggucacggagcugcagcuccugaugcaguccaccccggcaaccggcuccggcuccgccaucugcagcggcgucgccgugugcaaggugcugcaccucgagggggaggucaacaagaucaagagcgcccugcuguccaccaacaaggccguggugagccucuccaacggcgucagcgugcugaccuucaaggugcuggaccucaagaacuacaucgacaagcagcugcugcccauccugaacaagcagagcugcuccaucagcaacaucgagacggugaucgaguuccagcagaagaacaaccggcuccuggagaucacccgcgaguucagcgugaacgccggggucaccacccccguguccacguacaugcugaccaacagcgagcuccugucccugaucaacgacaugccgaucaccaacgaccagaagaagcucaugagcaacaacgugcagaucguccggcagcaguccuacagcaucaugugcaucaucaaggaggaggugcuggcguacgugguccagcugccccucuacggcgugaucgacacccccugcuggaagcugcacacgagcccccugugcaccaccaacaccaaggagggguccaacaucugccucacgcgcaccgaccggggcugguacugcgacaacgccggcagcgucuccuucuucccgcaggccgagaccugcaaggugcagagcaaccgcguguucugcgacaccaugaacucccggacgcugcccagcgagguaaaccucugcaacgucgacaucuucaaccccaaguacgacugcaagaucaugaccuccaagaccgacgugagcuccagcgugaucaccucccugggggccaucgucagcugcuacggcaagacgaagugcaccgccagcaacaagaaccgggggaucaucaagaccuucuccaacggcugcgacuacgugagcaacaagggcguggacaccguguccgucgggaacacccuguacugcgugaacaagcaggagggcaagagccucuacgugaagggggagcccaucaucaacuucuacgacccgcuggucuuccccuccgacgaguucgacgcgagcaucucccaggugaacgagaagaucaaccagagccuggccuucauccgcaaguccgacgagcugcuccacaacgugaacgccggcaagagcacgaccaacaucaugaucaccaccaucaucaucgucaucaucgugauccugcugucccucaucgccguggggcugcugcucuacugcaaggcccggagcacgcccgucacccuguccaaggaccagcugagcggcaucaacaacaucgcguucuccaacugaggacuaguacuggcugcaucucccuuuccucuguccuccauccuucucccaggauggugaagggggaccugguacccagugauccccaccccaggauccuaaaucaugacuuaccugcuaauaaaaacucauuggaaaagugagaagaucuaaaaaaaaaaaaaaaaaaaaaaaaaaaaaaaaaaaaaaaaaaaaaaaaaaaaaaaaaaaaaaaaugcaucccccccccccccccccccccccccccccccaaaggcucuuuucagagccaccagaauu

SEQ ID NO: 4886 - RNA, 1986 nt, Artificial Sequence
  mRNA product Design h-1 comprising derived and/or modified sequence from HRSV(A2)__F_DSCav1_mut4 (opt1)
gggagacccgugacccggaaguuguacggcuacgcgacuuucccucccacaaacccucgcgcccuuccuuuccuacuugggcccggcagaaagcuuaccauggagcugcucauccugaaggccaacgccaucaccaccauccugacggcggugaccuucugcuucgccagcggccagaacaucaccgaggaguucuaccaguccacgugcagcgccgucuccaagggguaccucagcgcccugcgcaccggcugguacaccuccgugaucaccaucgagcugagcaacaucaaggagaacaagugcaacgggaccgacgccaaggugaagcucaucaagcaggagcuggacaaguacaagaacgcggucacggagcugcagcuccugaugcaguccacccccgccaccggcagcggguccgccaucugcagcggcguggccgugugcaagguccugcaccucgagggcgaggugaacaagaucaaguccgcgcugcugagcaccaacaaggccguggucucccucagcaacgggguguccgugcugacguucaagguccuggaccucaagaacuacaucgacaagcagcugcugccgauccucaacaagcagagcugcuccaucagcaacaucgagaccgugaucgaguuccagcagaagaacaaccggcugcuggagaucacccgcgaguucuccgugaacgccggcgucaccacgcccgugagcaccuacaugcucaccaacagcgagcugcugucccucaucaacgacaugcccaucaccaacgaccagaagaagcugaugagcaacaacgugcagaucguccggcagcaguccuacagcaucaugugcaucaucaaggaggaggugcuggccuacgugguccagcucccccuguacggggugaucgacacgccgugcuggaagcugcacaccagcccccucugcaccaccaacacgaaggagggcuccaacaucugccugacccgcaccgaccgggggugguacugcgacaacgccggcuccgugagcuucuucccccaggcggagaccugcaagguccaguccaaccgcguguucugcgacacgaugaacagccggacccuccccuccgaggucaaccugugcaacguggacaucuucaacccgaaguacgacugcaagaucaugaccagcaagaccgacguguccagcuccgucaucacgagccugggcgccaucguguccugcuacgggaagaccaagugcaccgccagcaacaagaaccggggcaucaucaagaccuucuccaacgggugcgacuacgugagcaacaagggcgucgacacggugagcgugggcaacacccucuacugcgucaacaagcaggaggggaagucccuguacgugaagggcgagcccaucaucaacuucuacgacccccugguguuccccagcgacgaguucgacgccuccaucagccaggucaacgagaagaucaaccagucccucgccuucauccgcaagagcgacgagcugcugcacaacgugaacgcggggaaguccaccaccaacaucaugaucaccacgaucaucaucgugaucaucgucauccuccugagccugaucgccgugggccuccugcuguacugcaaggcccgguccaccccggugacccugagcaaggaccagcucuccgggaucaacaacaucgccuucagcaacugaggacuaguacuggcugcaucucccuuuccucuguccuccauccuucucccaggauggugaagggggaccugguacccagugauccccaccccaggauccuaaaucaugacuuaccugcuaauaaaaacucauuggaaaagugagaagaucuaaaaaaaaaaaaaaaaaaaaaaaaaaaaaaaaaaaaaaaaaaaaaaaaaaaaaaaaaaaaaaaaugcaucccccccccccccccccccccccccccccccaaaggcucuuuucagagccaccagaauu

SEQ ID NO: 4887 - RNA, 1986 nt, Artificial Sequence
  mRNA product Design h-1 comprising derived and/or modified sequence from HRSV(A2)__F_DSCav1_mut4 (opt2)
gggagacccgugacccggaaguuguacggcuacgcgacuuucccucccacaaacccucgcgcccuuccuuuccuacuugggcccggcagaaagcuuaccauggagcuccucauccucaaggccaacgccaucaccaccauccucaccgccgucaccuucugcuucgccuccggccagaacaucaccgaggaguucuaccaguccaccugcuccgccgucuccaagggcuaccucuccgcccuccgcaccggcugguacaccuccgucaucaccaucgagcucuccaacaucaaggagaacaagugcaacggcaccgacgccaaggucaagcucaucaagcaggagcucgacaaguacaagaacgccgucaccgagcuccagcuccucaugcaguccacccccgccaccggcuccggcuccgccaucugcuccggcgucgccgucugcaagguccuccaccucgagggcgaggucaacaagaucaaguccgcccuccucuccaccaacaaggccgucgucucccucuccaacggcgucuccguccucaccuucaagguccucgaccucaagaacuacaucgacaagcagcuccuccccauccucaacaagcaguccugcuccaucuccaacaucgagaccgucaucgaguuccagcagaagaacaaccgccuccucgagaucacccgcgaguucuccgucaacgccggcgucaccacccccgucuccaccuacaugcucaccaacuccgagcuccucucccucaucaacgacaugcccaucaccaacgaccagaagaagcucauguccaacaacguccagaucguccgccagcaguccuacuccaucaugugcaucaucaaggaggagguccucgccuacgucguccagcucccccucuacggcgucaucgacacccccugcuggaagcuccacaccuccccccucugcaccaccaacaccaaggagggcuccaacaucugccucacccgcaccgaccgcggcugguacugcgacaacgccggcuccgucuccuucuucccccaggccgagaccugcaagguccaguccaaccgcgucuucugcgacaccaugaacucccgcacccuccccuccgaggucaaccucugcaacgucgacaucuucaaccccaaguacgacugcaagaucaugaccuccaagaccgacgucuccuccuccgucaucaccucccucggcgccaucgucuccugcuacggcaagaccaagugcaccgccuccaacaagaaccgcggcaucaucaagaccuucuccaacggcugcgacuacgucuccaacaagggcgucgacaccgucuccgucggcaacacccucuacugcgucaacaagcaggagggcaagucccucuacgucaagggcgagcccaucaucaacuucuacgacccccucgucuuccccuccgacgaguucgacgccuccaucucccaggucaacgagaagaucaaccagucccucgccuucauccgcaaguccgacgagcuccuccacaacgucaacgccggcaaguccaccaccaacaucaugaucaccaccaucaucaucgucaucaucgucauccuccucucccucaucgccgucggccuccuccucuacugcaaggcccgcuccacccccgucacccucuccaaggaccagcucuccggcaucaacaacaucgccuucuccaacugaggacuaguacuggcugcaucucccuuuccucuguccuccauccuucucccaggauggugaagggggaccugguacccagugauccccaccccaggauccuaaaucaugacuuaccugcuaauaaaaacucauuggaaaagugagaagaucuaaaaaaaaaaaaaaaaaaaaaaaaaaaaaaaaaaaaaaaaaaaaaaaaaaaaaaaaaaaaaaaaugcaucccccccccccccccccccccccccccccccaaaggcucuuuucagagccaccagaauu

SEQ ID NO: 4888 - RNA, 1986 nt, Artificial Sequence
  mRNA product Design h-1 comprising derived and/or modified sequence from HRSV(A2)__F_DSCav1_mut4 (opt3)
gggagacccgugacccggaaguuguacggcuacgcgacuuucccucccacaaacccucgcgcccuuccuuuccuacuugggcccggcagaaagcuuaccauggagcugcucauccuuaaggccaacgcuauuaccacaauacugacugcagugacguucugcuuugccagcggccagaauaucaccgaagaguucuaccaauccacauguucugcggucucaaaaggguauuugagugcuuuaagaacuggaugguacaccagcguuauuacaaucgaacuguccaacauuaaggagaauaaaugcaacgguaccgacgccaaggugaaacuaaucaagcaggaacucgauaaguauaaaaaugcaguaacugagcugcagcuucugaugcagucuacacccgccaccggcucggggucagcuauauguagcggaguggcagucugcaagguguugcaccucgagggcgaaguuaacaaaaucaagagugcccugcuguccacgaauaaagcuguggucucucucagcaacgguguguccguauuaacuuuuaagguucuggaccuuaagaauuacauugauaaacaauugcugccuauccuaaacaagcagucauguaguauuagcaauaucgagaccgugauagaguuccagcagaaaaacaauaggcuccuggaaauuacacgggaguuuucugucaacgccggggugacuaccccaguguccacauauaugcuuaccaauucagaacuguugagccucaucaacgacaugccgauuacgaacgaucaaaagaaacugaugaguaauaacguccagaucguucgccagcagucuuacuccaucaugugcauuauaaaggaggaaguguuagcguauguagugcaacugccccucuacggagucaucgacacuccuuguuggaaacuucauacaagcccacugugcaccacuaauacaaaggagggcucgaacauuuguuugacccgaacggaucguggcugguacugcgacaaugcagggucuguguccuucuuuccccaggccgaaaccuguaagguucagucaaacagaguguucugcgauacaaugaauaguagaacucugccuagcgaggucaaccucugcaauguggacaucuuuaacccaaaauaugauuguaagauaaugaccuccaaaacagacguaucuagcucaguuauuaccagucugggagcuaucguguccugcuacgguaagacuaaauguacagccagcaauaagaacaggggcaucauuaagaccuucucuaaugggugcgauuaugucucaaacaaaggaguggacacugucagugugggcaauacgcuuuacuguguuaacaagcaagaggguaaaagccuguaugugaagggggaacccaucauuaacuuuuacgacccuuugguauucccauccgaugaguuugacgcaucuauaucgcaggucaaugagaaaaucaaccagagccucgcuuucauucggaaguccgaugaacuguuacacaaugugaacgccggaaagucaacaaccaauaucaugaucacuaccauuauaaucguuauuaucgugauucugcuaagucucaucgcggucggccugcuuuuguauugcaaagcccgcucuacaccggugacccugagcaaggaccagcucuccggcauaaacaauaucgcauucucaaacugaggacuaguacuggcugcaucucccuuuccucuguccuccauccuucucccaggauggugaagggggaccugguacccagugauccccaccccaggauccuaaaucaugacuuaccugcuaauaaaaacucauuggaaaagugagaagaucuaaaaaaaaaaaaaaaaaaaaaaaaaaaaaaaaaaaaaaaaaaaaaaaaaaaaaaaaaaaaaaaaugcaucccccccccccccccccccccccccccccccaaaggcucuuuucagagccaccagaauu

SEQ ID NO: 4889 - RNA, 1986 nt, Artificial Sequence
  mRNA product Design h-1 comprising derived and/or modified sequence from HRSV(A2)__F_DSCav1_mut4 (opt4)
gggagacccgugacccggaaguuguacggcuacgcgacuuucccucccacaaacccucgcgcccuuccuuuccuacuugggcccggcagaaagcuuaccauggagcugcugauccugaaggccaacgccaucaccaccauccugaccgccgugaccuucugcuucgccagcggccagaacaucaccgaggaguucuaccagagcaccugcagcgccgugagcaagggcuaccugagcgcccugagaaccggcugguacaccagcgugaucaccaucgagcugagcaacaucaaggagaacaagugcaacggcaccgacgccaaggugaagcugaucaagcaggagcuggacaaguacaagaacgccgugaccgagcugcagcugcugaugcagagcacccccgccaccggcagcggcagcgccaucugcagcggcguggccgugugcaaggugcugcaccuggagggcgaggugaacaagaucaagagcgcccugcugagcaccaacaaggccguggugagccugagcaacggcgugagcgugcugaccuucaaggugcuggaccugaagaacuacaucgacaagcagcugcugcccauccugaacaagcagagcugcagcaucagcaacaucgagaccgugaucgaguuccagcagaagaacaacagacugcuggagaucaccagagaguucagcgugaacgccggcgugaccacccccgugagcaccuacaugcugaccaacagcgagcugcugagccugaucaacgacaugcccaucaccaacgaccagaagaagcugaugagcaacaacgugcagaucgugagacagcagagcuacagcaucaugugcaucaucaaggaggaggugcuggccuacguggugcagcugccccuguacggcgugaucgacacccccugcuggaagcugcacaccagcccccugugcaccaccaacaccaaggagggcagcaacaucugccugaccagaaccgacagaggcugguacugcgacaacgccggcagcgugagcuucuucccccaggccgagaccugcaaggugcagagcaacagaguguucugcgacaccaugaacagcagaacccugcccagcgaggugaaccugugcaacguggacaucuucaaccccaaguacgacugcaagaucaugaccagcaagaccgacgugagcagcagcgugaucaccagccugggcgccaucgugagcugcuacggcaagaccaagugcaccgccagcaacaagaacagaggcaucaucaagaccuucagcaacggcugcgacuacgugagcaacaagggcguggacaccgugagcgugggcaacacccuguacugcgugaacaagcaggagggcaagagccuguacgugaagggcgagcccaucaucaacuucuacgacccccugguguuccccagcgacgaguucgacgccagcaucagccaggugaacgagaagaucaaccagagccuggccuucaucagaaagagcgacgagcugcugcacaacgugaacgccggcaagagcaccaccaacaucaugaucaccaccaucaucaucgugaucaucgugauccugcugagccugaucgccgugggccugcugcuguacugcaaggccagaagcacccccgugacccugagcaaggaccagcugagcggcaucaacaacaucgccuucagcaacugaggacuaguacuggcugcaucucccuuuccucuguccuccauccuucucccaggauggugaagggggaccugguacccagugauccccaccccaggauccuaaaucaugacuuaccugcuaauaaaaacucauuggaaaagugagaagaucuaaaaaaaaaaaaaaaaaaaaaaaaaaaaaaaaaaaaaaaaaaaaaaaaaaaaaaaaaaaaaaaaugcaucccccccccccccccccccccccccccccccaaaggcucuuuucagagccaccagaauu

SEQ ID NO: 4890 - RNA, 1986 nt, Artificial Sequence
  mRNA product Design h-1 comprising derived and/or modified sequence from HRSV(A2)__F_DSCav1_mut4 (opt5)
gggagacccgugacccggaaguuguacggcuacgcgacuuucccucccacaaacccucgcgcccuuccuuuccuacuugggcccggcagaaagcuuaccauggagcugcucauccugaaggccaacgcuauuaccacaauccuuacggccgugaccuucugcuuugcgagcggccagaauauuacagaagaguucuaccaauccaccuguucugcugucagcaaaggguaucuguccgcccucagaacaggaugguacaccucuguuaucacaauugaacugagcaacaucaaggagaauaaaugcaacggcaccgacgccaaggugaaacuuaucaagcaggaacuggauaaguauaaaaaugcugugacggagcuccagcugcugaugcaguccacccccgccacagggucuggaagcgcuauuuguuccggcgucgccgugugcaagguucuccaccuggagggggaagugaacaaaaucaagagcgcgcuucugucuaccaauaaagccgucgugucccucagcaacggaguuucugugcugacauuuaagguccuugaccugaagaauuacauugauaaacaacuccugccuauccugaacaagcaguccuguagcauuucuaauaucgagaccgugauugaguuccagcagaaaaacaaucggcuccuggaaaucacgcgcgaguuuuccgugaacgcuggcgucacaaccccgguuagcacauauaugcuuaccaauuccgaacugcucucucugaucaacgacaugcccauuaccaacgaucaaaagaaacuuaugagcaauaacgugcagaucgugagacagcaguccuacagcauuaugugcaucauuaaggaggaaguccuggccuaugugguucaacucccucuguacggcgugaucgacacacccuguuggaaacugcauacgucuccucucugcaccacaaauaccaaggagggguccaacaucugucugacacggaccgaucgcggaugguacugcgacaaugcuggcagcgucucuuucuuuccccaggccgaaacguguaaggugcagagcaacagaguuuucugcgauacaaugaacuccagaacccugccuucugaggugaaucucugcaaugucgacauuuuuaacccgaaauaugauuguaagaucaugaccagcaaaacagacguguccagcucugucauuaccucccugggggcgaucgugagcugcuacggaaagacaaaauguacggccucuaauaagaaccggggcauuaucaagaccuucuccaaugggugcgauuauguuagcaacaaaggaguggacacagucuccgugggcaauacccuuuacuguguuaacaagcaagagggcaaaucucuguaugugaagggggaacccaucauuaacuuuuacgacccucucgucuuccccagcgaugaguuugacgcuuccaucucucaggugaaugagaaaauuaaccagagccuggccuucauccgcaaguccgaugaacugcuccacaaugugaacgcuggaaagagcacaaccaauauuaugaucacgaccauuaucaucguuauuaucgucauucugcuuucucugaucgccgugggccuccugcuguauugcaaagccagauccacaccugugacccuuagcaaggaccagcucucugggauuaacaauaucgcuuucuccaacugaggacuaguacuggcugcaucucccuuuccucuguccuccauccuucucccaggauggugaagggggaccugguacccagugauccccaccccaggauccuaaaucaugacuuaccugcuaauaaaaacucauuggaaaagugagaagaucuaaaaaaaaaaaaaaaaaaaaaaaaaaaaaaaaaaaaaaaaaaaaaaaaaaaaaaaaaaaaaaaaugcaucccccccccccccccccccccccccccccccaaaggcucuuuucagagccaccagaauu

SEQ ID NO: 4891 - RNA, 1986 nt, Artificial Sequence
  mRNA product Design h-1 comprising derived and/or modified sequence from HRSV(A2)__F_DSCav1_mut4 (opt6)
gggagacccgugacccggaaguuguacggcuacgcgacuuucccucccacaaacccucgcgcccuuccuuuccuacuugggcccggcagaaagcuuaccauggaacuucuaauacucaaagccaacgcaauaacaacaauauuaacagccguaacauuuugcuucgcaucaggucaaaacauaacagaagaguucuaccaauccacaugcucagcaguaucaaaaggauauuuaagugcucuaagaacaggaugguacacauccguaauaacaaucgaacuaucaaacauaaaagaaaauaaauguaauggaacagacgccaaaguaaaauuaaucaaacaagaacuagacaaauacaaaaacgcaguuacugaauuacaauuauuaaugcaaucaacaccggccacaggaucuggaucagcaauaugcucaggaguagcagucugcaaaguauuacaccuagaaggggaaguuaauaaaaucaaaucagcauuacuauccaccaacaaagcgguaguuucacucuccaacggcguaucugucuuaacauucaaaguauuagaccuaaaaaacuacauugacaaacaacuacuaccaauccuaaacaaacaaucauguuccauaagcaauauagaaacaguaauagaauuucaacaaaaaaacaacagacuauuagaaauaacaagagaauuuuccgucaaugcaggaguuacuaccccugucuccaccuauaugcuaaccaauuccgaacucuuaucauuaauaaacgacaugccuaucacaaaugaccaaaaaaaauuaaugagcaacaacguacaaauaguacgacaacaaucauacucaaucaugugcauaauaaaagaagaaguccuagcauacguuguacaacuaccacuauacggagucauagauaccccaugcuggaaacuccauacaagcccacuaugcacuacaaacacaaaagaaggcucuaauauaugucuaacaagaacagaccgaggaugguacugcgauaaugccggcucagucucauucuuuccgcaagccgaaacuuguaaaguacaaaguaacagaguauuuugugacaccaugaacucaagaacccucccaagcgaagucaaucuaugcaacguugauauauucaaucccaaauacgacugcaaaaucaugaccucaaaaacagacgucagcucauccguuauaacaucacuaggagccaucguaucuugcuauggaaaaacaaaaugcacagcaagcaauaaaaacagaggcauaauaaaaacauucucaaauggaugcgacuacguaucaaacaaaggagucgacacaguuuccguaggaaacacuuuauacugcguaaacaaacaagaaggaaaaucauuauacgucaaaggugaaccaauaauaaacuucuacgauccacuuguauucccaucagacgaauuugacgcaucaauuucacaaguaaacgaaaaaauaaaccaaucacucgcauucauaagaaaaucagaugaacuacuacauaacguaaacgcaggaaaauccacaacaaacaucaugauaacaaccaucauaaucguaauaaucguaauacuauuaucccuaauugcaguaggauuacucuuauauugcaaagcaagaucaacaccaguaacccucaguaaagaccaacuauccggaauaaauaacaucgcauucucaaacuaaggacuaguacuggcugcaucucccuuuccucuguccuccauccuucucccaggauggugaagggggaccugguacccagugauccccaccccaggauccuaaaucaugacuuaccugcuaauaaaaacucauuggaaaagugagaagaucuaaaaaaaaaaaaaaaaaaaaaaaaaaaaaaaaaaaaaaaaaaaaaaaaaaaaaaaaaaaaaaaaugcaucccccccccccccccccccccccccccccccaaaggcucuuuucagagccaccagaauu

SEQ ID NO: 4892 - RNA, 1986 nt, Artificial Sequence
  mRNA product Design h-1 comprising derived and/or modified sequence from HRSV(A2)__F_DSCav1_mut4 (opt11)
gggagacccgugacccggaaguuguacggcuacgcgacuuucccucccacaaacccucgcgcccuuccuuuccuacuugggcccggcagaaagcuuaccauggaacugcucauccucaaagccaacgccaucaccaccauucuuaccgccgucacauucugcuucgccucaggccaaaacaucaccgaagaauuuuaccaauccacuuguucagccgucucaaaaggauaccuaucagcccuccguaccggcugguacaccucggucauaacaauagaacucuccaacauaaaagaaaacaaaugcaacggcaccgacgccaaggucaaacugauaaaacaagaacuugauaaauacaaaaacgccgucacugaacuccaacuccucaugcaauccacucccgcuacuggcucuggcuccgccaucugcucuggcgucgccgucuguaaaguacuccaccucgaaggggaagucaacaaaaucaaaucagcccuccuuagcaccaacaaggccgucgucucccucucaaacggagucagcguccucaccuucaagguccucgaccucaagaacuacaucgacaaacaacuccugcccauccuaaauaaacaauccugcucuaucuccaauaucgaaaccguuauagaguuccaacagaaaaacaaccgacuccucgaaaucacccgcgaguucuccgucaacgcaggcgucaccaccccugugucaaccuacaugcucaccaacagcgaacuacucucacucaucaaugacaugcccaucaccaacgaccaaaagaaacucauguccaacaacguccaaaucguacgucaacaauccuacagcaucaugugcaucauaaaagaagaaguccucgccuacgucguccaacuuccccucuacggcgucauagacacccccugcuggaaacugcauaccucaccccuaugcaccaccaacacuaaagaaggcuccaacaucugccucacccgcacggaccgcggcugguacugcgacaacgccggcuccgucuccuucuucccccaagccgaaacuuguaaaguccaauccaacagagucuucugcgacaccaugaacucuagaacgcugccauccgagguaaaccuaugcaacgucgacaucuucaaucccaaauacgacugcaagaucaugaccucaaaaaccgacguauccuccucaguaaucaccagucucggagcuaucgucuccugcuacggcaaaaccaaaugcacggccucuaacaaaaaccgcggcaucaucaaaaccuucucaaacggaugcgacuacgucagcaacaaaggcguagauaccgucucugucggcaacacacuguacugcguaaacaagcaagaaggaaaaucccucuacguaaaaggcgaacccaucaucaacuucuacgacccccucguuuuccccucagaugaauuugacgccucgauaucacaagucaacgaaaagauaaaucagucccucgccuucauccgaaaauccgacgaacuccuccacaacguuaacgcaggaaaguccaccacaaacaucaugauaacuacaaucauaauagucauuaucgucauacuccucucccuaaucgccguaggccugcuacucuacugcaaagcccgcucaacccccgucacucucucaaaagaccaacucuccggcaucaauaacaucgccuucucaaacuaaggacuaguacuggcugcaucucccuuuccucuguccuccauccuucucccaggauggugaagggggaccugguacccagugauccccaccccaggauccuaaaucaugacuuaccugcuaauaaaaacucauuggaaaagugagaagaucuaaaaaaaaaaaaaaaaaaaaaaaaaaaaaaaaaaaaaaaaaaaaaaaaaaaaaaaaaaaaaaaaugcaucccccccccccccccccccccccccccccccaaaggcucuuuucagagccaccagaauu

SEQ ID NO: 4893 - RNA, 2202 nt, Artificial Sequence
  mRNA product Design h-2 comprising derived and/or modified sequence from HRSV(A2)__F_DSCav1_mut4 (opt1)
gggagacccgugacccggaaguuguacggcuacgcgacuuucccucccacaaacccucgcgcccuuccuuuccuacuugggcccggcagaaagcuuaccauggagcugcucauccugaaggccaacgccaucaccaccauccugacggcggugaccuucugcuucgccagcggccagaacaucaccgaggaguucuaccaguccacgugcagcgccgucuccaagggguaccucagcgcccugcggaccggcugguacaccuccgugaucaccaucgagcugagcaacaucaaggagaacaagugcaacgggaccgacgccaaggugaagcucaucaagcaggagcuggacaaguacaagaacgcggucacggagcugcagcuccugaugcaguccaccccggcaaccggcuccggcuccgccaucugcagcggcgucgccgugugcaaggugcugcaccucgagggggaggucaacaagaucaagagcgcccugcuguccaccaacaaggccguggugagccucuccaacggcgucagcgugcugaccuucaaggugcuggaccucaagaacuacaucgacaagcagcugcugcccauccugaacaagcagagcugcuccaucagcaacaucgagacggugaucgaguuccagcagaagaacaaccggcuccuggagaucacccgcgaguucagcgugaacgccggggucaccacccccguguccacguacaugcugaccaacagcgagcuccugucccugaucaacgacaugccgaucaccaacgaccagaagaagcucaugagcaacaacgugcagaucguccggcagcaguccuacagcaucaugugcaucaucaaggaggaggugcuggcguacgugguccagcugccccucuacggcgugaucgacacccccugcuggaagcugcacacgagcccccugugcaccaccaacaccaaggagggguccaacaucugccucacgcgcaccgaccggggcugguacugcgacaacgccggcagcgucuccuucuucccgcaggccgagaccugcaaggugcagagcaaccgcguguucugcgacaccaugaacucccggacgcugcccagcgagguaaaccucugcaacgucgacaucuucaaccccaaguacgacugcaagaucaugaccuccaagaccgacgugagcuccagcgugaucaccucccugggggccaucgucagcugcuacggcaagacgaagugcaccgccagcaacaagaaccgggggaucaucaagaccuucuccaacggcugcgacuacgugagcaacaagggcguggacaccguguccgucgggaacacccuguacugcgugaacaagcaggagggcaagagccucuacgugaagggggagcccaucaucaacuucuacgacccgcuggucuuccccuccgacgaguucgacgcgagcaucucccaggugaacgagaagaucaaccagagccuggccuucauccgcaaguccgacgagcugcuccacaacgugaacgccggcaagagcacgaccaacaucaugaucaccaccaucaucaucgucaucaucgugauccugcugucccucaucgccguggggcugcugcucuacugcaaggcccggagcacgcccgucacccuguccaaggaccagcugagcggcaucaacaacaucgcguucuccaacugaggacuagugaagggaacacccaaauuuaauucagccuuaagcacaauuaauuaagagugaaacguaauuguacaagcaguuggucacccaccauagggcaugaucaacaccgcaaccuuuccuuuuucccccagugauucugaaaaaccccucuucccuucagcuugcuuagauguuccaaauuuaguaagcuuaaggcggccuacagaagaaaaagaaaaaaaaggccacaaaaguucccucucacuuucaguaaauaaaauaaaagcagcaacagaaauaaagaaauaaaugaaauucaaaaugaaauaaauauuguguugugcagcauuaaaaaaucaauaaaaauuaaaaaugagcaagaucuaaaaaaaaaaaaaaaaaaaaaaaaaaaaaaaaaaaaaaaaaaaaaaaaaaaaaaaaaaaaaaaaugcaucccccccccccccccccccccccccccccccaaaggcucuuuucagagccaccagaauu

SEQ ID NO: 4894 - RNA, 2202 nt, Artificial Sequence
  mRNA product Design h-2 comprising derived and/or modified sequence from HRSV(A2)__F_DSCav1_mut4 (opt1)
gggagacccgugacccggaaguuguacggcuacgcgacuuucccucccacaaacccucgcgcccuuccuuuccuacuugggcccggcagaaagcuuaccauggagcugcucauccugaaggccaacgccaucaccaccauccugacggcggugaccuucugcuucgccagcggccagaacaucaccgaggaguucuaccaguccacgugcagcgccgucuccaagggguaccucagcgcccugcgcaccggcugguacaccuccgugaucaccaucgagcugagcaacaucaaggagaacaagugcaacgggaccgacgccaaggugaagcucaucaagcaggagcuggacaaguacaagaacgcggucacggagcugcagcuccugaugcaguccacccccgccaccggcagcggguccgccaucugcagcggcguggccgugugcaagguccugcaccucgagggcgaggugaacaagaucaaguccgcgcugcugagcaccaacaaggccguggucucccucagcaacgggguguccgugcugacguucaagguccuggaccucaagaacuacaucgacaagcagcugcugccgauccucaacaagcagagcugcuccaucagcaacaucgagaccgugaucgaguuccagcagaagaacaaccggcugcuggagaucacccgcgaguucuccgugaacgccggcgucaccacgcccgugagcaccuacaugcucaccaacagcgagcugcugucccucaucaacgacaugcccaucaccaacgaccagaagaagcugaugagcaacaacgugcagaucguccggcagcaguccuacagcaucaugugcaucaucaaggaggaggugcuggccuacgugguccagcucccccuguacggggugaucgacacgccgugcuggaagcugcacaccagcccccucugcaccaccaacacgaaggagggcuccaacaucugccugacccgcaccgaccgggggugguacugcgacaacgccggcuccgugagcuucuucccccaggcggagaccugcaagguccaguccaaccgcguguucugcgacacgaugaacagccggacccuccccuccgaggucaaccugugcaacguggacaucuucaacccgaaguacgacugcaagaucaugaccagcaagaccgacguguccagcuccgucaucacgagccugggcgccaucguguccugcuacgggaagaccaagugcaccgccagcaacaagaaccggggcaucaucaagaccuucuccaacgggugcgacuacgugagcaacaagggcgucgacacggugagcgugggcaacacccucuacugcgucaacaagcaggaggggaagucccuguacgugaagggcgagcccaucaucaacuucuacgacccccugguguuccccagcgacgaguucgacgccuccaucagccaggucaacgagaagaucaaccagucccucgccuucauccgcaagagcgacgagcugcugcacaacgugaacgcggggaaguccaccaccaacaucaugaucaccacgaucaucaucgugaucaucgucauccuccugagccugaucgccgugggccuccugcuguacugcaaggcccgguccaccccggugacccugagcaaggaccagcucuccgggaucaacaacaucgccuucagcaacugaggacuagugaagggaacacccaaauuuaauucagccuuaagcacaauuaauuaagagugaaacguaauuguacaagcaguuggucacccaccauagggcaugaucaacaccgcaaccuuuccuuuuucccccagugauucugaaaaaccccucuucccuucagcuugcuuagauguuccaaauuuaguaagcuuaaggcggccuacagaagaaaaagaaaaaaaaggccacaaaaguucccucucacuuucaguaaauaaaauaaaagcagcaacagaaauaaagaaauaaaugaaauucaaaaugaaauaaauauuguguugugcagcauuaaaaaaucaauaaaaauuaaaaaugagcaagaucuaaaaaaaaaaaaaaaaaaaaaaaaaaaaaaaaaaaaaaaaaaaaaaaaaaaaaaaaaaaaaaaaugcaucccccccccccccccccccccccccccccccaaaggcucuuuucagagccaccagaauu

SEQ ID NO: 4895 - RNA, 2202 nt, Artificial Sequence
  mRNA product Design h-2 comprising derived and/or modified sequence from HRSV(A2)__F_DSCav1_mut4 (opt2)
gggagacccgugacccggaaguuguacggcuacgcgacuuucccucccacaaacccucgcgcccuuccuuuccuacuugggcccggcagaaagcuuaccauggagcuccucauccucaaggccaacgccaucaccaccauccucaccgccgucaccuucugcuucgccuccggccagaacaucaccgaggaguucuaccaguccaccugcuccgccgucuccaagggcuaccucuccgcccuccgcaccggcugguacaccuccgucaucaccaucgagcucuccaacaucaaggagaacaagugcaacggcaccgacgccaaggucaagcucaucaagcaggagcucgacaaguacaagaacgccgucaccgagcuccagcuccucaugcaguccacccccgccaccggcuccggcuccgccaucugcuccggcgucgccgucugcaagguccuccaccucgagggcgaggucaacaagaucaaguccgcccuccucuccaccaacaaggccgucgucucccucuccaacggcgucuccguccucaccuucaagguccucgaccucaagaacuacaucgacaagcagcuccuccccauccucaacaagcaguccugcuccaucuccaacaucgagaccgucaucgaguuccagcagaagaacaaccgccuccucgagaucacccgcgaguucuccgucaacgccggcgucaccacccccgucuccaccuacaugcucaccaacuccgagcuccucucccucaucaacgacaugcccaucaccaacgaccagaagaagcucauguccaacaacguccagaucguccgccagcaguccuacuccaucaugugcaucaucaaggaggagguccucgccuacgucguccagcucccccucuacggcgucaucgacacccccugcuggaagcuccacaccuccccccucugcaccaccaacaccaaggagggcuccaacaucugccucacccgcaccgaccgcggcugguacugcgacaacgccggcuccgucuccuucuucccccaggccgagaccugcaagguccaguccaaccgcgucuucugcgacaccaugaacucccgcacccuccccuccgaggucaaccucugcaacgucgacaucuucaaccccaaguacgacugcaagaucaugaccuccaagaccgacgucuccuccuccgucaucaccucccucggcgccaucgucuccugcuacggcaagaccaagugcaccgccuccaacaagaaccgcggcaucaucaagaccuucuccaacggcugcgacuacgucuccaacaagggcgucgacaccgucuccgucggcaacacccucuacugcgucaacaagcaggagggcaagucccucuacgucaagggcgagcccaucaucaacuucuacgacccccucgucuuccccuccgacgaguucgacgccuccaucucccaggucaacgagaagaucaaccagucccucgccuucauccgcaaguccgacgagcuccuccacaacgucaacgccggcaaguccaccaccaacaucaugaucaccaccaucaucaucgucaucaucgucauccuccucucccucaucgccgucggccuccuccucuacugcaaggcccgcuccacccccgucacccucuccaaggaccagcucuccggcaucaacaacaucgccuucuccaacugaggacuagugaagggaacacccaaauuuaauucagccuuaagcacaauuaauuaagagugaaacguaauuguacaagcaguuggucacccaccauagggcaugaucaacaccgcaaccuuuccuuuuucccccagugauucugaaaaaccccucuucccuucagcuugcuuagauguuccaaauuuaguaagcuuaaggcggccuacagaagaaaaagaaaaaaaaggccacaaaaguucccucucacuuucaguaaauaaaauaaaagcagcaacagaaauaaagaaauaaaugaaauucaaaaugaaauaaauauuguguugugcagcauuaaaaaaucaauaaaaauuaaaaaugagcaagaucuaaaaaaaaaaaaaaaaaaaaaaaaaaaaaaaaaaaaaaaaaaaaaaaaaaaaaaaaaaaaaaaaugcaucccccccccccccccccccccccccccccccaaaggcucuuuucagagccaccagaauu

SEQ ID NO: 4896 - RNA, 2202 nt, Artificial Sequence
  mRNA product Design h-2 comprising derived and/or modified sequence from HRSV(A2)__F_DSCav1_mut4 (opt3)
gggagacccgugacccggaaguuguacggcuacgcgacuuucccucccacaaacccucgcgcccuuccuuuccuacuugggcccggcagaaagcuuaccauggagcugcucauccuuaaggccaacgcuauuaccacaauacugacugcagugacguucugcuuugccagcggccagaauaucaccgaagaguucuaccaauccacauguucugcggucucaaaaggguauuugagugcuuuaagaacuggaugguacaccagcguuauuacaaucgaacuguccaacauuaaggagaauaaaugcaacgguaccgacgccaaggugaaacuaaucaagcaggaacucgauaaguauaaaaaugcaguaacugagcugcagcuucugaugcagucuacacccgccaccggcucggggucagcuauauguagcggaguggcagucugcaagguguugcaccucgagggcgaaguuaacaaaaucaagagugcccugcuguccacgaauaaagcuguggucucucucagcaacgguguguccguauuaacuuuuaagguucuggaccuuaagaauuacauugauaaacaauugcugccuauccuaaacaagcagucauguaguauuagcaauaucgagaccgugauagaguuccagcagaaaaacaauaggcuccuggaaauuacacgggaguuuucugucaacgccggggugacuaccccaguguccacauauaugcuuaccaauucagaacuguugagccucaucaacgacaugccgauuacgaacgaucaaaagaaacugaugaguaauaacguccagaucguucgccagcagucuuacuccaucaugugcauuauaaaggaggaaguguuagcguauguagugcaacugccccucuacggagucaucgacacuccuuguuggaaacuucauacaagcccacugugcaccacuaauacaaaggagggcucgaacauuuguuugacccgaacggaucguggcugguacugcgacaaugcagggucuguguccuucuuuccccaggccgaaaccuguaagguucagucaaacagaguguucugcgauacaaugaauaguagaacucugccuagcgaggucaaccucugcaauguggacaucuuuaacccaaaauaugauuguaagauaaugaccuccaaaacagacguaucuagcucaguuauuaccagucugggagcuaucguguccugcuacgguaagacuaaauguacagccagcaauaagaacaggggcaucauuaagaccuucucuaaugggugcgauuaugucucaaacaaaggaguggacacugucagugugggcaauacgcuuuacuguguuaacaagcaagaggguaaaagccuguaugugaagggggaacccaucauuaacuuuuacgacccuuugguauucccauccgaugaguuugacgcaucuauaucgcaggucaaugagaaaaucaaccagagccucgcuuucauucggaaguccgaugaacuguuacacaaugugaacgccggaaagucaacaaccaauaucaugaucacuaccauuauaaucguuauuaucgugauucugcuaagucucaucgcggucggccugcuuuuguauugcaaagcccgcucuacaccggugacccugagcaaggaccagcucuccggcauaaacaauaucgcauucucaaacugaggacuagugaagggaacacccaaauuuaauucagccuuaagcacaauuaauuaagagugaaacguaauuguacaagcaguuggucacccaccauagggcaugaucaacaccgcaaccuuuccuuuuucccccagugauucugaaaaaccccucuucccuucagcuugcuuagauguuccaaauuuaguaagcuuaaggcggccuacagaagaaaaagaaaaaaaaggccacaaaaguucccucucacuuucaguaaauaaaauaaaagcagcaacagaaauaaagaaauaaaugaaauucaaaaugaaauaaauauuguguugugcagcauuaaaaaaucaauaaaaauuaaaaaugagcaagaucuaaaaaaaaaaaaaaaaaaaaaaaaaaaaaaaaaaaaaaaaaaaaaaaaaaaaaaaaaaaaaaaaugcaucccccccccccccccccccccccccccccccaaaggcucuuuucagagccaccagaauu

SEQ ID NO: 4897 - RNA, 2202 nt, Artificial Sequence
  mRNA product Design h-2 comprising derived and/or modified sequence from HRSV(A2)__F_DSCav1_mut4 (opt4)
gggagacccgugacccggaaguuguacggcuacgcgacuuucccucccacaaacccucgcgcccuuccuuuccuacuugggcccggcagaaagcuuaccauggagcugcugauccugaaggccaacgccaucaccaccauccugaccgccgugaccuucugcuucgccagcggccagaacaucaccgaggaguucuaccagagcaccugcagcgccgugagcaagggcuaccugagcgcccugagaaccggcugguacaccagcgugaucaccaucgagcugagcaacaucaaggagaacaagugcaacggcaccgacgccaaggugaagcugaucaagcaggagcuggacaaguacaagaacgccgugaccgagcugcagcugcugaugcagagcacccccgccaccggcagcggcagcgccaucugcagcggcguggccgugugcaaggugcugcaccuggagggcgaggugaacaagaucaagagcgcccugcugagcaccaacaaggccguggugagccugagcaacggcgugagcgugcugaccuucaaggugcuggaccugaagaacuacaucgacaagcagcugcugcccauccugaacaagcagagcugcagcaucagcaacaucgagaccgugaucgaguuccagcagaagaacaacagacugcuggagaucaccagagaguucagcgugaacgccggcgugaccacccccgugagcaccuacaugcugaccaacagcgagcugcugagccugaucaacgacaugcccaucaccaacgaccagaagaagcugaugagcaacaacgugcagaucgugagacagcagagcuacagcaucaugugcaucaucaaggaggaggugcuggccuacguggugcagcugccccuguacggcgugaucgacacccccugcuggaagcugcacaccagcccccugugcaccaccaacaccaaggagggcagcaacaucugccugaccagaaccgacagaggcugguacugcgacaacgccggcagcgugagcuucuucccccaggccgagaccugcaaggugcagagcaacagaguguucugcgacaccaugaacagcagaacccugcccagcgaggugaaccugugcaacguggacaucuucaaccccaaguacgacugcaagaucaugaccagcaagaccgacgugagcagcagcgugaucaccagccugggcgccaucgugagcugcuacggcaagaccaagugcaccgccagcaacaagaacagaggcaucaucaagaccuucagcaacggcugcgacuacgugagcaacaagggcguggacaccgugagcgugggcaacacccuguacugcgugaacaagcaggagggcaagagccuguacgugaagggcgagcccaucaucaacuucuacgacccccugguguuccccagcgacgaguucgacgccagcaucagccaggugaacgagaagaucaaccagagccuggccuucaucagaaagagcgacgagcugcugcacaacgugaacgccggcaagagcaccaccaacaucaugaucaccaccaucaucaucgugaucaucgugauccugcugagccugaucgccgugggccugcugcuguacugcaaggccagaagcacccccgugacccugagcaaggaccagcugagcggcaucaacaacaucgccuucagcaacugaggacuagugaagggaacacccaaauuuaauucagccuuaagcacaauuaauuaagagugaaacguaauuguacaagcaguuggucacccaccauagggcaugaucaacaccgcaaccuuuccuuuuucccccagugauucugaaaaaccccucuucccuucagcuugcuuagauguuccaaauuuaguaagcuuaaggcggccuacagaagaaaaagaaaaaaaaggccacaaaaguucccucucacuuucaguaaauaaaauaaaagcagcaacagaaauaaagaaauaaaugaaauucaaaaugaaauaaauauuguguugugcagcauuaaaaaaucaauaaaaauuaaaaaugagcaagaucuaaaaaaaaaaaaaaaaaaaaaaaaaaaaaaaaaaaaaaaaaaaaaaaaaaaaaaaaaaaaaaaaugcaucccccccccccccccccccccccccccccccaaaggcucuuuucagagccaccagaauu

SEQ ID NO: 4898 - RNA, 2202 nt, Artificial Sequence
  mRNA product Design h-2 comprising derived and/or modified sequence from HRSV(A2)__F_DSCav1_mut4 (opt5)
gggagacccgugacccggaaguuguacggcuacgcgacuuucccucccacaaacccucgcgcccuuccuuuccuacuugggcccggcagaaagcuuaccauggagcugcucauccugaaggccaacgcuauuaccacaauccuuacggccgugaccuucugcuuugcgagcggccagaauauuacagaagaguucuaccaauccaccuguucugcugucagcaaaggguaucuguccgcccucagaacaggaugguacaccucuguuaucacaauugaacugagcaacaucaaggagaauaaaugcaacggcaccgacgccaaggugaaacuuaucaagcaggaacuggauaaguauaaaaaugcugugacggagcuccagcugcugaugcaguccacccccgccacagggucuggaagcgcuauuuguuccggcgucgccgugugcaagguucuccaccuggagggggaagugaacaaaaucaagagcgcgcuucugucuaccaauaaagccgucgugucccucagcaacggaguuucugugcugacauuuaagguccuugaccugaagaauuacauugauaaacaacuccugccuauccugaacaagcaguccuguagcauuucuaauaucgagaccgugauugaguuccagcagaaaaacaaucggcuccuggaaaucacgcgcgaguuuuccgugaacgcuggcgucacaaccccgguuagcacauauaugcuuaccaauuccgaacugcucucucugaucaacgacaugcccauuaccaacgaucaaaagaaacuuaugagcaauaacgugcagaucgugagacagcaguccuacagcauuaugugcaucauuaaggaggaaguccuggccuaugugguucaacucccucuguacggcgugaucgacacacccuguuggaaacugcauacgucuccucucugcaccacaaauaccaaggagggguccaacaucugucugacacggaccgaucgcggaugguacugcgacaaugcuggcagcgucucuuucuuuccccaggccgaaacguguaaggugcagagcaacagaguuuucugcgauacaaugaacuccagaacccugccuucugaggugaaucucugcaaugucgacauuuuuaacccgaaauaugauuguaagaucaugaccagcaaaacagacguguccagcucugucauuaccucccugggggcgaucgugagcugcuacggaaagacaaaauguacggccucuaauaagaaccggggcauuaucaagaccuucuccaaugggugcgauuauguuagcaacaaaggaguggacacagucuccgugggcaauacccuuuacuguguuaacaagcaagagggcaaaucucuguaugugaagggggaacccaucauuaacuuuuacgacccucucgucuuccccagcgaugaguuugacgcuuccaucucucaggugaaugagaaaauuaaccagagccuggccuucauccgcaaguccgaugaacugcuccacaaugugaacgcuggaaagagcacaaccaauauuaugaucacgaccauuaucaucguuauuaucgucauucugcuuucucugaucgccgugggccuccugcuguauugcaaagccagauccacaccugugacccuuagcaaggaccagcucucugggauuaacaauaucgcuuucuccaacugaggacuagugaagggaacacccaaauuuaauucagccuuaagcacaauuaauuaagagugaaacguaauuguacaagcaguuggucacccaccauagggcaugaucaacaccgcaaccuuuccuuuuucccccagugauucugaaaaaccccucuucccuucagcuugcuuagauguuccaaauuuaguaagcuuaaggcggccuacagaagaaaaagaaaaaaaaggccacaaaaguucccucucacuuucaguaaauaaaauaaaagcagcaacagaaauaaagaaauaaaugaaauucaaaaugaaauaaauauuguguugugcagcauuaaaaaaucaauaaaaauuaaaaaugagcaagaucuaaaaaaaaaaaaaaaaaaaaaaaaaaaaaaaaaaaaaaaaaaaaaaaaaaaaaaaaaaaaaaaaugcaucccccccccccccccccccccccccccccccaaaggcucuuuucagagccaccagaauu

SEQ ID NO: 4899 - RNA, 2202 nt, Artificial Sequence
  mRNA product Design h-2 comprising derived and/or modified sequence from HRSV(A2)__F_DSCav1_mut4 (opt6)
gggagacccgugacccggaaguuguacggcuacgcgacuuucccucccacaaacccucgcgcccuuccuuuccuacuugggcccggcagaaagcuuaccauggaacuucuaauacucaaagccaacgcaauaacaacaauauuaacagccguaacauuuugcuucgcaucaggucaaaacauaacagaagaguucuaccaauccacaugcucagcaguaucaaaaggauauuuaagugcucuaagaacaggaugguacacauccguaauaacaaucgaacuaucaaacauaaaagaaaauaaauguaauggaacagacgccaaaguaaaauuaaucaaacaagaacuagacaaauacaaaaacgcaguuacugaauuacaauuauuaaugcaaucaacaccggccacaggaucuggaucagcaauaugcucaggaguagcagucugcaaaguauuacaccuagaaggggaaguuaauaaaaucaaaucagcauuacuauccaccaacaaagcgguaguuucacucuccaacggcguaucugucuuaacauucaaaguauuagaccuaaaaaacuacauugacaaacaacuacuaccaauccuaaacaaacaaucauguuccauaagcaauauagaaacaguaauagaauuucaacaaaaaaacaacagacuauuagaaauaacaagagaauuuuccgucaaugcaggaguuacuaccccugucuccaccuauaugcuaaccaauuccgaacucuuaucauuaauaaacgacaugccuaucacaaaugaccaaaaaaaauuaaugagcaacaacguacaaauaguacgacaacaaucauacucaaucaugugcauaauaaaagaagaaguccuagcauacguuguacaacuaccacuauacggagucauagauaccccaugcuggaaacuccauacaagcccacuaugcacuacaaacacaaaagaaggcucuaauauaugucuaacaagaacagaccgaggaugguacugcgauaaugccggcucagucucauucuuuccgcaagccgaaacuuguaaaguacaaaguaacagaguauuuugugacaccaugaacucaagaacccucccaagcgaagucaaucuaugcaacguugauauauucaaucccaaauacgacugcaaaaucaugaccucaaaaacagacgucagcucauccguuauaacaucacuaggagccaucguaucuugcuauggaaaaacaaaaugcacagcaagcaauaaaaacagaggcauaauaaaaacauucucaaauggaugcgacuacguaucaaacaaaggagucgacacaguuuccguaggaaacacuuuauacugcguaaacaaacaagaaggaaaaucauuauacgucaaaggugaaccaauaauaaacuucuacgauccacuuguauucccaucagacgaauuugacgcaucaauuucacaaguaaacgaaaaaauaaaccaaucacucgcauucauaagaaaaucagaugaacuacuacauaacguaaacgcaggaaaauccacaacaaacaucaugauaacaaccaucauaaucguaauaaucguaauacuauuaucccuaauugcaguaggauuacucuuauauugcaaagcaagaucaacaccaguaacccucaguaaagaccaacuauccggaauaaauaacaucgcauucucaaacuaaggacuagugaagggaacacccaaauuuaauucagccuuaagcacaauuaauuaagagugaaacguaauuguacaagcaguuggucacccaccauagggcaugaucaacaccgcaaccuuuccuuuuucccccagugauucugaaaaaccccucuucccuucagcuugcuuagauguuccaaauuuaguaagcuuaaggcggccuacagaagaaaaagaaaaaaaaggccacaaaaguucccucucacuuucaguaaauaaaauaaaagcagcaacagaaauaaagaaauaaaugaaauucaaaaugaaauaaauauuguguugugcagcauuaaaaaaucaauaaaaauuaaaaaugagcaagaucuaaaaaaaaaaaaaaaaaaaaaaaaaaaaaaaaaaaaaaaaaaaaaaaaaaaaaaaaaaaaaaaaugcaucccccccccccccccccccccccccccccccaaaggcucuuuucagagccaccagaauu

SEQ ID NO: 4900 - RNA, 2202 nt, Artificial Sequence
  mRNA product Design h-2 comprising derived and/or modified sequence from HRSV(A2)__F_DSCav1_mut4 (opt11)
gggagacccgugacccggaaguuguacggcuacgcgacuuucccucccacaaacccucgcgcccuuccuuuccuacuugggcccggcagaaagcuuaccauggaacugcucauccucaaagccaacgccaucaccaccauucuuaccgccgucacauucugcuucgccucaggccaaaacaucaccgaagaauuuuaccaauccacuuguucagccgucucaaaaggauaccuaucagcccuccguaccggcugguacaccucggucauaacaauagaacucuccaacauaaaagaaaacaaaugcaacggcaccgacgccaaggucaaacugauaaaacaagaacuugauaaauacaaaaacgccgucacugaacuccaacuccucaugcaauccacucccgcuacuggcucuggcuccgccaucugcucuggcgucgccgucuguaaaguacuccaccucgaaggggaagucaacaaaaucaaaucagcccuccuuagcaccaacaaggccgucgucucccucucaaacggagucagcguccucaccuucaagguccucgaccucaagaacuacaucgacaaacaacuccugcccauccuaaauaaacaauccugcucuaucuccaauaucgaaaccguuauagaguuccaacagaaaaacaaccgacuccucgaaaucacccgcgaguucuccgucaacgcaggcgucaccaccccugugucaaccuacaugcucaccaacagcgaacuacucucacucaucaaugacaugcccaucaccaacgaccaaaagaaacucauguccaacaacguccaaaucguacgucaacaauccuacagcaucaugugcaucauaaaagaagaaguccucgccuacgucguccaacuuccccucuacggcgucauagacacccccugcuggaaacugcauaccucaccccuaugcaccaccaacacuaaagaaggcuccaacaucugccucacccgcacggaccgcggcugguacugcgacaacgccggcuccgucuccuucuucccccaagccgaaacuuguaaaguccaauccaacagagucuucugcgacaccaugaacucuagaacgcugccauccgagguaaaccuaugcaacgucgacaucuucaaucccaaauacgacugcaagaucaugaccucaaaaaccgacguauccuccucaguaaucaccagucucggagcuaucgucuccugcuacggcaaaaccaaaugcacggccucuaacaaaaaccgcggcaucaucaaaaccuucucaaacggaugcgacuacgucagcaacaaaggcguagauaccgucucugucggcaacacacuguacugcguaaacaagcaagaaggaaaaucccucuacguaaaaggcgaacccaucaucaacuucuacgacccccucguuuuccccucagaugaauuugacgccucgauaucacaagucaacgaaaagauaaaucagucccucgccuucauccgaaaauccgacgaacuccuccacaacguuaacgcaggaaaguccaccacaaacaucaugauaacuacaaucauaauagucauuaucgucauacuccucucccuaaucgccguaggccugcuacucuacugcaaagcccgcucaacccccgucacucucucaaaagaccaacucuccggcaucaauaacaucgccuucucaaacuaaggacuagugaagggaacacccaaauuuaauucagccuuaagcacaauuaauuaagagugaaacguaauuguacaagcaguuggucacccaccauagggcaugaucaacaccgcaaccuuuccuuuuucccccagugauucugaaaaaccccucuucccuucagcuugcuuagauguuccaaauuuaguaagcuuaaggcggccuacagaagaaaaagaaaaaaaaggccacaaaaguucccucucacuuucaguaaauaaaauaaaagcagcaacagaaauaaagaaauaaaugaaauucaaaaugaaauaaauauuguguugugcagcauuaaaaaaucaauaaaaauuaaaaaugagcaagaucuaaaaaaaaaaaaaaaaaaaaaaaaaaaaaaaaaaaaaaaaaaaaaaaaaaaaaaaaaaaaaaaaugcaucccccccccccccccccccccccccccccccaaaggcucuuuucagagccaccagaauu

SEQ ID NO: 4901 - RNA, 1982 nt, Artificial Sequence
  mRNA product Design h-3 comprising derived and/or modified sequence from HRSV(A2)__F_DSCav1_mut4 (opt1)
gggagacccgugacccggaaguuguacggcuacgcgacuuucccucccacaaacccucgcgcccuuccuuuccuacuugggcccggcagaaagcuuaccauggagcugcucauccugaaggccaacgccaucaccaccauccugacggcggugaccuucugcuucgccagcggccagaacaucaccgaggaguucuaccaguccacgugcagcgccgucuccaagggguaccucagcgcccugcggaccggcugguacaccuccgugaucaccaucgagcugagcaacaucaaggagaacaagugcaacgggaccgacgccaaggugaagcucaucaagcaggagcuggacaaguacaagaacgcggucacggagcugcagcuccugaugcaguccaccccggcaaccggcuccggcuccgccaucugcagcggcgucgccgugugcaaggugcugcaccucgagggggaggucaacaagaucaagagcgcccugcuguccaccaacaaggccguggugagccucuccaacggcgucagcgugcugaccuucaaggugcuggaccucaagaacuacaucgacaagcagcugcugcccauccugaacaagcagagcugcuccaucagcaacaucgagacggugaucgaguuccagcagaagaacaaccggcuccuggagaucacccgcgaguucagcgugaacgccggggucaccacccccguguccacguacaugcugaccaacagcgagcuccugucccugaucaacgacaugccgaucaccaacgaccagaagaagcucaugagcaacaacgugcagaucguccggcagcaguccuacagcaucaugugcaucaucaaggaggaggugcuggcguacgugguccagcugccccucuacggcgugaucgacacccccugcuggaagcugcacacgagcccccugugcaccaccaacaccaaggagggguccaacaucugccucacgcgcaccgaccggggcugguacugcgacaacgccggcagcgucuccuucuucccgcaggccgagaccugcaaggugcagagcaaccgcguguucugcgacaccaugaacucccggacgcugcccagcgagguaaaccucugcaacgucgacaucuucaaccccaaguacgacugcaagaucaugaccuccaagaccgacgugagcuccagcgugaucaccucccugggggccaucgucagcugcuacggcaagacgaagugcaccgccagcaacaagaaccgggggaucaucaagaccuucuccaacggcugcgacuacgugagcaacaagggcguggacaccguguccgucgggaacacccuguacugcgugaacaagcaggagggcaagagccucuacgugaagggggagcccaucaucaacuucuacgacccgcuggucuuccccuccgacgaguucgacgcgagcaucucccaggugaacgagaagaucaaccagagccuggccuucauccgcaaguccgacgagcugcuccacaacgugaacgccggcaagagcacgaccaacaucaugaucaccaccaucaucaucgucaucaucgugauccugcugucccucaucgccguggggcugcugcucuacugcaaggcccggagcacgcccgucacccuguccaaggaccagcugagcggcaucaacaacaucgcguucuccaacugaggacuaguggaagcauuuuccuggcugauuaaaagaaauuacucagcuauggucaucuguuccuguuagaaggcuaugcagcauauuauauacuaugcgcauguuaugaaaugcauaauaaaaaauuuuaaaaaaucuaaaagaucuaaaaaaaaaaaaaaaaaaaaaaaaaaaaaaaaaaaaaaaaaaaaaaaaaaaaaaaaaaaaaaaaugcaucccccccccccccccccccccccccccccccaaaggcucuuuucagagccaccagaauu

SEQ ID NO: 4902 - RNA, 1982 nt, Artificial Sequence
  mRNA product Design h-3 comprising derived and/or modified sequence from HRSV(A2)__F_DSCav1_mut4 (opt1)
gggagacccgugacccggaaguuguacggcuacgcgacuuucccucccacaaacccucgcgcccuuccuuuccuacuugggcccggcagaaagcuuaccauggagcugcucauccugaaggccaacgccaucaccaccauccugacggcggugaccuucugcuucgccagcggccagaacaucaccgaggaguucuaccaguccacgugcagcgccgucuccaagggguaccucagcgcccugcgcaccggcugguacaccuccgugaucaccaucgagcugagcaacaucaaggagaacaagugcaacgggaccgacgccaaggugaagcucaucaagcaggagcuggacaaguacaagaacgcggucacggagcugcagcuccugaugcaguccacccccgccaccggcagcggguccgccaucugcagcggcguggccgugugcaagguccugcaccucgagggcgaggugaacaagaucaaguccgcgcugcugagcaccaacaaggccguggucucccucagcaacgggguguccgugcugacguucaagguccuggaccucaagaacuacaucgacaagcagcugcugccgauccucaacaagcagagcugcuccaucagcaacaucgagaccgugaucgaguuccagcagaagaacaaccggcugcuggagaucacccgcgaguucuccgugaacgccggcgucaccacgcccgugagcaccuacaugcucaccaacagcgagcugcugucccucaucaacgacaugcccaucaccaacgaccagaagaagcugaugagcaacaacgugcagaucguccggcagcaguccuacagcaucaugugcaucaucaaggaggaggugcuggccuacgugguccagcucccccuguacggggugaucgacacgccgugcuggaagcugcacaccagcccccucugcaccaccaacacgaaggagggcuccaacaucugccugacccgcaccgaccgggggugguacugcgacaacgccggcuccgugagcuucuucccccaggcggagaccugcaagguccaguccaaccgcguguucugcgacacgaugaacagccggacccuccccuccgaggucaaccugugcaacguggacaucuucaacccgaaguacgacugcaagaucaugaccagcaagaccgacguguccagcuccgucaucacgagccugggcgccaucguguccugcuacgggaagaccaagugcaccgccagcaacaagaaccggggcaucaucaagaccuucuccaacgggugcgacuacgugagcaacaagggcgucgacacggugagcgugggcaacacccucuacugcgucaacaagcaggaggggaagucccuguacgugaagggcgagcccaucaucaacuucuacgacccccugguguuccccagcgacgaguucgacgccuccaucagccaggucaacgagaagaucaaccagucccucgccuucauccgcaagagcgacgagcugcugcacaacgugaacgcggggaaguccaccaccaacaucaugaucaccacgaucaucaucgugaucaucgucauccuccugagccugaucgccgugggccuccugcuguacugcaaggcccgguccaccccggugacccugagcaaggaccagcucuccgggaucaacaacaucgccuucagcaacugaggacuaguggaagcauuuuccuggcugauuaaaagaaauuacucagcuauggucaucuguuccuguuagaaggcuaugcagcauauuauauacuaugcgcauguuaugaaaugcauaauaaaaaauuuuaaaaaaucuaaaagaucuaaaaaaaaaaaaaaaaaaaaaaaaaaaaaaaaaaaaaaaaaaaaaaaaaaaaaaaaaaaaaaaaugcaucccccccccccccccccccccccccccccccaaaggcucuuuucagagccaccagaauu

SEQ ID NO: 4903 - RNA, 1982 nt, Artificial Sequence
  mRNA product Design h-3 comprising derived and/or modified sequence from HRSV(A2)__F_DSCav1_mut4 (opt2)
gggagacccgugacccggaaguuguacggcuacgcgacuuucccucccacaaacccucgcgcccuuccuuuccuacuugggcccggcagaaagcuuaccauggagcuccucauccucaaggccaacgccaucaccaccauccucaccgccgucaccuucugcuucgccuccggccagaacaucaccgaggaguucuaccaguccaccugcuccgccgucuccaagggcuaccucuccgcccuccgcaccggcugguacaccuccgucaucaccaucgagcucuccaacaucaaggagaacaagugcaacggcaccgacgccaaggucaagcucaucaagcaggagcucgacaaguacaagaacgccgucaccgagcuccagcuccucaugcaguccacccccgccaccggcuccggcuccgccaucugcuccggcgucgccgucugcaagguccuccaccucgagggcgaggucaacaagaucaaguccgcccuccucuccaccaacaaggccgucgucucccucuccaacggcgucuccguccucaccuucaagguccucgaccucaagaacuacaucgacaagcagcuccuccccauccucaacaagcaguccugcuccaucuccaacaucgagaccgucaucgaguuccagcagaagaacaaccgccuccucgagaucacccgcgaguucuccgucaacgccggcgucaccacccccgucuccaccuacaugcucaccaacuccgagcuccucucccucaucaacgacaugcccaucaccaacgaccagaagaagcucauguccaacaacguccagaucguccgccagcaguccuacuccaucaugugcaucaucaaggaggagguccucgccuacgucguccagcucccccucuacggcgucaucgacacccccugcuggaagcuccacaccuccccccucugcaccaccaacaccaaggagggcuccaacaucugccucacccgcaccgaccgcggcugguacugcgacaacgccggcuccgucuccuucuucccccaggccgagaccugcaagguccaguccaaccgcgucuucugcgacaccaugaacucccgcacccuccccuccgaggucaaccucugcaacgucgacaucuucaaccccaaguacgacugcaagaucaugaccuccaagaccgacgucuccuccuccgucaucaccucccucggcgccaucgucuccugcuacggcaagaccaagugcaccgccuccaacaagaaccgcggcaucaucaagaccuucuccaacggcugcgacuacgucuccaacaagggcgucgacaccgucuccgucggcaacacccucuacugcgucaacaagcaggagggcaagucccucuacgucaagggcgagcccaucaucaacuucuacgacccccucgucuuccccuccgacgaguucgacgccuccaucucccaggucaacgagaagaucaaccagucccucgccuucauccgcaaguccgacgagcuccuccacaacgucaacgccggcaaguccaccaccaacaucaugaucaccaccaucaucaucgucaucaucgucauccuccucucccucaucgccgucggccuccuccucuacugcaaggcccgcuccacccccgucacccucuccaaggaccagcucuccggcaucaacaacaucgccuucuccaacugaggacuaguggaagcauuuuccuggcugauuaaaagaaauuacucagcuauggucaucuguuccuguuagaaggcuaugcagcauauuauauacuaugcgcauguuaugaaaugcauaauaaaaaauuuuaaaaaaucuaaaagaucuaaaaaaaaaaaaaaaaaaaaaaaaaaaaaaaaaaaaaaaaaaaaaaaaaaaaaaaaaaaaaaaaugcaucccccccccccccccccccccccccccccccaaaggcucuuuucagagccaccagaauu

SEQ ID NO: 4904 - RNA, 1982 nt, Artificial Sequence
  mRNA product Design h-3 comprising derived and/or modified sequence from HRSV(A2)__F_DSCav1_mut4 (opt3)
gggagacccgugacccggaaguuguacggcuacgcgacuuucccucccacaaacccucgcgcccuuccuuuccuacuugggcccggcagaaagcuuaccauggagcugcucauccuuaaggccaacgcuauuaccacaauacugacugcagugacguucugcuuugccagcggccagaauaucaccgaagaguucuaccaauccacauguucugcggucucaaaaggguauuugagugcuuuaagaacuggaugguacaccagcguuauuacaaucgaacuguccaacauuaaggagaauaaaugcaacgguaccgacgccaaggugaaacuaaucaagcaggaacucgauaaguauaaaaaugcaguaacugagcugcagcuucugaugcagucuacacccgccaccggcucggggucagcuauauguagcggaguggcagucugcaagguguugcaccucgagggcgaaguuaacaaaaucaagagugcccugcuguccacgaauaaagcuguggucucucucagcaacgguguguccguauuaacuuuuaagguucuggaccuuaagaauuacauugauaaacaauugcugccuauccuaaacaagcagucauguaguauuagcaauaucgagaccgugauagaguuccagcagaaaaacaauaggcuccuggaaauuacacgggaguuuucugucaacgccggggugacuaccccaguguccacauauaugcuuaccaauucagaacuguugagccucaucaacgacaugccgauuacgaacgaucaaaagaaacugaugaguaauaacguccagaucguucgccagcagucuuacuccaucaugugcauuauaaaggaggaaguguuagcguauguagugcaacugccccucuacggagucaucgacacuccuuguuggaaacuucauacaagcccacugugcaccacuaauacaaaggagggcucgaacauuuguuugacccgaacggaucguggcugguacugcgacaaugcagggucuguguccuucuuuccccaggccgaaaccuguaagguucagucaaacagaguguucugcgauacaaugaauaguagaacucugccuagcgaggucaaccucugcaauguggacaucuuuaacccaaaauaugauuguaagauaaugaccuccaaaacagacguaucuagcucaguuauuaccagucugggagcuaucguguccugcuacgguaagacuaaauguacagccagcaauaagaacaggggcaucauuaagaccuucucuaaugggugcgauuaugucucaaacaaaggaguggacacugucagugugggcaauacgcuuuacuguguuaacaagcaagaggguaaaagccuguaugugaagggggaacccaucauuaacuuuuacgacccuuugguauucccauccgaugaguuugacgcaucuauaucgcaggucaaugagaaaaucaaccagagccucgcuuucauucggaaguccgaugaacuguuacacaaugugaacgccggaaagucaacaaccaauaucaugaucacuaccauuauaaucguuauuaucgugauucugcuaagucucaucgcggucggccugcuuuuguauugcaaagcccgcucuacaccggugacccugagcaaggaccagcucuccggcauaaacaauaucgcauucucaaacugaggacuaguggaagcauuuuccuggcugauuaaaagaaauuacucagcuauggucaucuguuccuguuagaaggcuaugcagcauauuauauacuaugcgcauguuaugaaaugcauaauaaaaaauuuuaaaaaaucuaaaagaucuaaaaaaaaaaaaaaaaaaaaaaaaaaaaaaaaaaaaaaaaaaaaaaaaaaaaaaaaaaaaaaaaugcaucccccccccccccccccccccccccccccccaaaggcucuuuucagagccaccagaauu

SEQ ID NO: 4905 - RNA, 1982 nt, Artificial Sequence
  mRNA product Design h-3 comprising derived and/or modified sequence from HRSV(A2)__F_DSCav1_mut4 (opt4)
gggagacccgugacccggaaguuguacggcuacgcgacuuucccucccacaaacccucgcgcccuuccuuuccuacuugggcccggcagaaagcuuaccauggagcugcugauccugaaggccaacgccaucaccaccauccugaccgccgugaccuucugcuucgccagcggccagaacaucaccgaggaguucuaccagagcaccugcagcgccgugagcaagggcuaccugagcgcccugagaaccggcugguacaccagcgugaucaccaucgagcugagcaacaucaaggagaacaagugcaacggcaccgacgccaaggugaagcugaucaagcaggagcuggacaaguacaagaacgccgugaccgagcugcagcugcugaugcagagcacccccgccaccggcagcggcagcgccaucugcagcggcguggccgugugcaaggugcugcaccuggagggcgaggugaacaagaucaagagcgcccugcugagcaccaacaaggccguggugagccugagcaacggcgugagcgugcugaccuucaaggugcuggaccugaagaacuacaucgacaagcagcugcugcccauccugaacaagcagagcugcagcaucagcaacaucgagaccgugaucgaguuccagcagaagaacaacagacugcuggagaucaccagagaguucagcgugaacgccggcgugaccacccccgugagcaccuacaugcugaccaacagcgagcugcugagccugaucaacgacaugcccaucaccaacgaccagaagaagcugaugagcaacaacgugcagaucgugagacagcagagcuacagcaucaugugcaucaucaaggaggaggugcuggccuacguggugcagcugccccuguacggcgugaucgacacccccugcuggaagcugcacaccagcccccugugcaccaccaacaccaaggagggcagcaacaucugccugaccagaaccgacagaggcugguacugcgacaacgccggcagcgugagcuucuucccccaggccgagaccugcaaggugcagagcaacagaguguucugcgacaccaugaacagcagaacccugcccagcgaggugaaccugugcaacguggacaucuucaaccccaaguacgacugcaagaucaugaccagcaagaccgacgugagcagcagcgugaucaccagccugggcgccaucgugagcugcuacggcaagaccaagugcaccgccagcaacaagaacagaggcaucaucaagaccuucagcaacggcugcgacuacgugagcaacaagggcguggacaccgugagcgugggcaacacccuguacugcgugaacaagcaggagggcaagagccuguacgugaagggcgagcccaucaucaacuucuacgacccccugguguuccccagcgacgaguucgacgccagcaucagccaggugaacgagaagaucaaccagagccuggccuucaucagaaagagcgacgagcugcugcacaacgugaacgccggcaagagcaccaccaacaucaugaucaccaccaucaucaucgugaucaucgugauccugcugagccugaucgccgugggccugcugcuguacugcaaggccagaagcacccccgugacccugagcaaggaccagcugagcggcaucaacaacaucgccuucagcaacugaggacuaguggaagcauuuuccuggcugauuaaaagaaauuacucagcuauggucaucuguuccuguuagaaggcuaugcagcauauuauauacuaugcgcauguuaugaaaugcauaauaaaaaauuuuaaaaaaucuaaaagaucuaaaaaaaaaaaaaaaaaaaaaaaaaaaaaaaaaaaaaaaaaaaaaaaaaaaaaaaaaaaaaaaaugcaucccccccccccccccccccccccccccccccaaaggcucuuuucagagccaccagaauu

SEQ ID NO: 4906 - RNA, 1982 nt, Artificial Sequence
  mRNA product Design h-3 comprising derived and/or modified sequence from HRSV(A2)__F_DSCav1_mut4 (opt5)
gggagacccgugacccggaaguuguacggcuacgcgacuuucccucccacaaacccucgcgcccuuccuuuccuacuugggcccggcagaaagcuuaccauggagcugcucauccugaaggccaacgcuauuaccacaauccuuacggccgugaccuucugcuuugcgagcggccagaauauuacagaagaguucuaccaauccaccuguucugcugucagcaaaggguaucuguccgcccucagaacaggaugguacaccucuguuaucacaauugaacugagcaacaucaaggagaauaaaugcaacggcaccgacgccaaggugaaacuuaucaagcaggaacuggauaaguauaaaaaugcugugacggagcuccagcugcugaugcaguccacccccgccacagggucuggaagcgcuauuuguuccggcgucgccgugugcaagguucuccaccuggagggggaagugaacaaaaucaagagcgcgcuucugucuaccaauaaagccgucgugucccucagcaacggaguuucugugcugacauuuaagguccuugaccugaagaauuacauugauaaacaacuccugccuauccugaacaagcaguccuguagcauuucuaauaucgagaccgugauugaguuccagcagaaaaacaaucggcuccuggaaaucacgcgcgaguuuuccgugaacgcuggcgucacaaccccgguuagcacauauaugcuuaccaauuccgaacugcucucucugaucaacgacaugcccauuaccaacgaucaaaagaaacuuaugagcaauaacgugcagaucgugagacagcaguccuacagcauuaugugcaucauuaaggaggaaguccuggccuaugugguucaacucccucuguacggcgugaucgacacacccuguuggaaacugcauacgucuccucucugcaccacaaauaccaaggagggguccaacaucugucugacacggaccgaucgcggaugguacugcgacaaugcuggcagcgucucuuucuuuccccaggccgaaacguguaaggugcagagcaacagaguuuucugcgauacaaugaacuccagaacccugccuucugaggugaaucucugcaaugucgacauuuuuaacccgaaauaugauuguaagaucaugaccagcaaaacagacguguccagcucugucauuaccucccugggggcgaucgugagcugcuacggaaagacaaaauguacggccucuaauaagaaccggggcauuaucaagaccuucuccaaugggugcgauuauguuagcaacaaaggaguggacacagucuccgugggcaauacccuuuacuguguuaacaagcaagagggcaaaucucuguaugugaagggggaacccaucauuaacuuuuacgacccucucgucuuccccagcgaugaguuugacgcuuccaucucucaggugaaugagaaaauuaaccagagccuggccuucauccgcaaguccgaugaacugcuccacaaugugaacgcuggaaagagcacaaccaauauuaugaucacgaccauuaucaucguuauuaucgucauucugcuuucucugaucgccgugggccuccugcuguauugcaaagccagauccacaccugugacccuuagcaaggaccagcucucugggauuaacaauaucgcuuucuccaacugaggacuaguggaagcauuuuccuggcugauuaaaagaaauuacucagcuauggucaucuguuccuguuagaaggcuaugcagcauauuauauacuaugcgcauguuaugaaaugcauaauaaaaaauuuuaaaaaaucuaaaagaucuaaaaaaaaaaaaaaaaaaaaaaaaaaaaaaaaaaaaaaaaaaaaaaaaaaaaaaaaaaaaaaaaugcaucccccccccccccccccccccccccccccccaaaggcucuuuucagagccaccagaauu

SEQ ID NO: 4907 - RNA, 1982 nt, Artificial Sequence
  mRNA product Design h-3 comprising derived and/or modified sequence from HRSV(A2)__F_DSCav1_mut4 (opt6)
gggagacccgugacccggaaguuguacggcuacgcgacuuucccucccacaaacccucgcgcccuuccuuuccuacuugggcccggcagaaagcuuaccauggaacuucuaauacucaaagccaacgcaauaacaacaauauuaacagccguaacauuuugcuucgcaucaggucaaaacauaacagaagaguucuaccaauccacaugcucagcaguaucaaaaggauauuuaagugcucuaagaacaggaugguacacauccguaauaacaaucgaacuaucaaacauaaaagaaaauaaauguaauggaacagacgccaaaguaaaauuaaucaaacaagaacuagacaaauacaaaaacgcaguuacugaauuacaauuauuaaugcaaucaacaccggccacaggaucuggaucagcaauaugcucaggaguagcagucugcaaaguauuacaccuagaaggggaaguuaauaaaaucaaaucagcauuacuauccaccaacaaagcgguaguuucacucuccaacggcguaucugucuuaacauucaaaguauuagaccuaaaaaacuacauugacaaacaacuacuaccaauccuaaacaaacaaucauguuccauaagcaauauagaaacaguaauagaauuucaacaaaaaaacaacagacuauuagaaauaacaagagaauuuuccgucaaugcaggaguuacuaccccugucuccaccuauaugcuaaccaauuccgaacucuuaucauuaauaaacgacaugccuaucacaaaugaccaaaaaaaauuaaugagcaacaacguacaaauaguacgacaacaaucauacucaaucaugugcauaauaaaagaagaaguccuagcauacguuguacaacuaccacuauacggagucauagauaccccaugcuggaaacuccauacaagcccacuaugcacuacaaacacaaaagaaggcucuaauauaugucuaacaagaacagaccgaggaugguacugcgauaaugccggcucagucucauucuuuccgcaagccgaaacuuguaaaguacaaaguaacagaguauuuugugacaccaugaacucaagaacccucccaagcgaagucaaucuaugcaacguugauauauucaaucccaaauacgacugcaaaaucaugaccucaaaaacagacgucagcucauccguuauaacaucacuaggagccaucguaucuugcuauggaaaaacaaaaugcacagcaagcaauaaaaacagaggcauaauaaaaacauucucaaauggaugcgacuacguaucaaacaaaggagucgacacaguuuccguaggaaacacuuuauacugcguaaacaaacaagaaggaaaaucauuauacgucaaaggugaaccaauaauaaacuucuacgauccacuuguauucccaucagacgaauuugacgcaucaauuucacaaguaaacgaaaaaauaaaccaaucacucgcauucauaagaaaaucagaugaacuacuacauaacguaaacgcaggaaaauccacaacaaacaucaugauaacaaccaucauaaucguaauaaucguaauacuauuaucccuaauugcaguaggauuacucuuauauugcaaagcaagaucaacaccaguaacccucaguaaagaccaacuauccggaauaaauaacaucgcauucucaaacuaaggacuaguggaagcauuuuccuggcugauuaaaagaaauuacucagcuauggucaucuguuccuguuagaaggcuaugcagcauauuauauacuaugcgcauguuaugaaaugcauaauaaaaaauuuuaaaaaaucuaaaagaucuaaaaaaaaaaaaaaaaaaaaaaaaaaaaaaaaaaaaaaaaaaaaaaaaaaaaaaaaaaaaaaaaugcaucccccccccccccccccccccccccccccccaaaggcucuuuucagagccaccagaauu

SEQ ID NO: 4908 - RNA, 1982 nt, Artificial Sequence
  mRNA product Design h-3 comprising derived and/or modified sequence from HRSV(A2)__F_DSCav1_mut4 (opt11)
gggagacccgugacccggaaguuguacggcuacgcgacuuucccucccacaaacccucgcgcccuuccuuuccuacuugggcccggcagaaagcuuaccauggaacugcucauccucaaagccaacgccaucaccaccauucuuaccgccgucacauucugcuucgccucaggccaaaacaucaccgaagaauuuuaccaauccacuuguucagccgucucaaaaggauaccuaucagcccuccguaccggcugguacaccucggucauaacaauagaacucuccaacauaaaagaaaacaaaugcaacggcaccgacgccaaggucaaacugauaaaacaagaacuugauaaauacaaaaacgccgucacugaacuccaacuccucaugcaauccacucccgcuacuggcucuggcuccgccaucugcucuggcgucgccgucuguaaaguacuccaccucgaaggggaagucaacaaaaucaaaucagcccuccuuagcaccaacaaggccgucgucucccucucaaacggagucagcguccucaccuucaagguccucgaccucaagaacuacaucgacaaacaacuccugcccauccuaaauaaacaauccugcucuaucuccaauaucgaaaccguuauagaguuccaacagaaaaacaaccgacuccucgaaaucacccgcgaguucuccgucaacgcaggcgucaccaccccugugucaaccuacaugcucaccaacagcgaacuacucucacucaucaaugacaugcccaucaccaacgaccaaaagaaacucauguccaacaacguccaaaucguacgucaacaauccuacagcaucaugugcaucauaaaagaagaaguccucgccuacgucguccaacuuccccucuacggcgucauagacacccccugcuggaaacugcauaccucaccccuaugcaccaccaacacuaaagaaggcuccaacaucugccucacccgcacggaccgcggcugguacugcgacaacgccggcuccgucuccuucuucccccaagccgaaacuuguaaaguccaauccaacagagucuucugcgacaccaugaacucuagaacgcugccauccgagguaaaccuaugcaacgucgacaucuucaaucccaaauacgacugcaagaucaugaccucaaaaaccgacguauccuccucaguaaucaccagucucggagcuaucgucuccugcuacggcaaaaccaaaugcacggccucuaacaaaaaccgcggcaucaucaaaaccuucucaaacggaugcgacuacgucagcaacaaaggcguagauaccgucucugucggcaacacacuguacugcguaaacaagcaagaaggaaaaucccucuacguaaaaggcgaacccaucaucaacuucuacgacccccucguuuuccccucagaugaauuugacgccucgauaucacaagucaacgaaaagauaaaucagucccucgccuucauccgaaaauccgacgaacuccuccacaacguuaacgcaggaaaguccaccacaaacaucaugauaacuacaaucauaauagucauuaucgucauacuccucucccuaaucgccguaggccugcuacucuacugcaaagcccgcucaacccccgucacucucucaaaagaccaacucuccggcaucaauaacaucgccuucucaaacuaaggacuaguggaagcauuuuccuggcugauuaaaagaaauuacucagcuauggucaucuguuccuguuagaaggcuaugcagcauauuauauacuaugcgcauguuaugaaaugcauaauaaaaaauuuuaaaaaaucuaaaagaucuaaaaaaaaaaaaaaaaaaaaaaaaaaaaaaaaaaaaaaaaaaaaaaaaaaaaaaaaaaaaaaaaugcaucccccccccccccccccccccccccccccccaaaggcucuuuucagagccaccagaauu

SEQ ID NO: 4909 - RNA, 2045 nt, Artificial Sequence
  mRNA product Design h-4 comprising derived and/or modified sequence from HRSV(A2)__F_DSCav1_mut4 (opt1)
gggagagggcgcuuggcuugcaaggacccugagcugcggcauugaagcacacccaacccaacucgacugaagucagccucacugaaccggaucugagaaucuucucucucugggcuugccagggcucuccgaaccuagcuagcauccucuucaauuccaacuagaaagcuuaccauggagcugcucauccugaaggccaacgccaucaccaccauccugacggcggugaccuucugcuucgccagcggccagaacaucaccgaggaguucuaccaguccacgugcagcgccgucuccaagggguaccucagcgcccugcggaccggcugguacaccuccgugaucaccaucgagcugagcaacaucaaggagaacaagugcaacgggaccgacgccaaggugaagcucaucaagcaggagcuggacaaguacaagaacgcggucacggagcugcagcuccugaugcaguccaccccggcaaccggcuccggcuccgccaucugcagcggcgucgccgugugcaaggugcugcaccucgagggggaggucaacaagaucaagagcgcccugcuguccaccaacaaggccguggugagccucuccaacggcgucagcgugcugaccuucaaggugcuggaccucaagaacuacaucgacaagcagcugcugcccauccugaacaagcagagcugcuccaucagcaacaucgagacggugaucgaguuccagcagaagaacaaccggcuccuggagaucacccgcgaguucagcgugaacgccggggucaccacccccguguccacguacaugcugaccaacagcgagcuccugucccugaucaacgacaugccgaucaccaacgaccagaagaagcucaugagcaacaacgugcagaucguccggcagcaguccuacagcaucaugugcaucaucaaggaggaggugcuggcguacgugguccagcugccccucuacggcgugaucgacacccccugcuggaagcugcacacgagcccccugugcaccaccaacaccaaggagggguccaacaucugccucacgcgcaccgaccggggcugguacugcgacaacgccggcagcgucuccuucuucccgcaggccgagaccugcaaggugcagagcaaccgcguguucugcgacaccaugaacucccggacgcugcccagcgagguaaaccucugcaacgucgacaucuucaaccccaaguacgacugcaagaucaugaccuccaagaccgacgugagcuccagcgugaucaccucccugggggccaucgucagcugcuacggcaagacgaagugcaccgccagcaacaagaaccgggggaucaucaagaccuucuccaacggcugcgacuacgugagcaacaagggcguggacaccguguccgucgggaacacccuguacugcgugaacaagcaggagggcaagagccucuacgugaagggggagcccaucaucaacuucuacgacccgcuggucuuccccuccgacgaguucgacgcgagcaucucccaggugaacgagaagaucaaccagagccuggccuucauccgcaaguccgacgagcugcuccacaacgugaacgccggcaagagcacgaccaacaucaugaucaccaccaucaucaucgucaucaucgugauccugcugucccucaucgccguggggcugcugcucuacugcaaggcccggagcacgcccgucacccuguccaaggaccagcugagcggcaucaacaacaucgcguucuccaacugaggacuaguaauaaggaaacuguaugaaugucugugggcaggaagugaagagauccuucuguaaagguuuuuggaauuaugucugcugaauaauaaacuuuuuugaaauaauaaaucugguagaaaaaugagaucuaaaaaaaaaaaaaaaaaaaaaaaaaaaaaaaaaaaaaaaaaaaaaaaaaaaaaaaaaaaaaaaaugcaucccccccccccccccccccccccccccccccaaaggcucuuuucagagccaccagaauu

SEQ ID NO: 4910 - RNA, 2045 nt, Artificial Sequence
  mRNA product Design h-4 comprising derived and/or modified sequence from HRSV(A2)__F_DSCav1_mut4 (opt1)
gggagagggcgcuuggcuugcaaggacccugagcugcggcauugaagcacacccaacccaacucgacugaagucagccucacugaaccggaucugagaaucuucucucucugggcuugccagggcucuccgaaccuagcuagcauccucuucaauuccaacuagaaagcuuaccauggagcugcucauccugaaggccaacgccaucaccaccauccugacggcggugaccuucugcuucgccagcggccagaacaucaccgaggaguucuaccaguccacgugcagcgccgucuccaagggguaccucagcgcccugcgcaccggcugguacaccuccgugaucaccaucgagcugagcaacaucaaggagaacaagugcaacgggaccgacgccaaggugaagcucaucaagcaggagcuggacaaguacaagaacgcggucacggagcugcagcuccugaugcaguccacccccgccaccggcagcggguccgccaucugcagcggcguggccgugugcaagguccugcaccucgagggcgaggugaacaagaucaaguccgcgcugcugagcaccaacaaggccguggucucccucagcaacgggguguccgugcugacguucaagguccuggaccucaagaacuacaucgacaagcagcugcugccgauccucaacaagcagagcugcuccaucagcaacaucgagaccgugaucgaguuccagcagaagaacaaccggcugcuggagaucacccgcgaguucuccgugaacgccggcgucaccacgcccgugagcaccuacaugcucaccaacagcgagcugcugucccucaucaacgacaugcccaucaccaacgaccagaagaagcugaugagcaacaacgugcagaucguccggcagcaguccuacagcaucaugugcaucaucaaggaggaggugcuggccuacgugguccagcucccccuguacggggugaucgacacgccgugcuggaagcugcacaccagcccccucugcaccaccaacacgaaggagggcuccaacaucugccugacccgcaccgaccgggggugguacugcgacaacgccggcuccgugagcuucuucccccaggcggagaccugcaagguccaguccaaccgcguguucugcgacacgaugaacagccggacccuccccuccgaggucaaccugugcaacguggacaucuucaacccgaaguacgacugcaagaucaugaccagcaagaccgacguguccagcuccgucaucacgagccugggcgccaucguguccugcuacgggaagaccaagugcaccgccagcaacaagaaccggggcaucaucaagaccuucuccaacgggugcgacuacgugagcaacaagggcgucgacacggugagcgugggcaacacccucuacugcgucaacaagcaggaggggaagucccuguacgugaagggcgagcccaucaucaacuucuacgacccccugguguuccccagcgacgaguucgacgccuccaucagccaggucaacgagaagaucaaccagucccucgccuucauccgcaagagcgacgagcugcugcacaacgugaacgcggggaaguccaccaccaacaucaugaucaccacgaucaucaucgugaucaucgucauccuccugagccugaucgccgugggccuccugcuguacugcaaggcccgguccaccccggugacccugagcaaggaccagcucuccgggaucaacaacaucgccuucagcaacugaggacuaguaauaaggaaacuguaugaaugucugugggcaggaagugaagagauccuucuguaaagguuuuuggaauuaugucugcugaauaauaaacuuuuuugaaauaauaaaucugguagaaaaaugagaucuaaaaaaaaaaaaaaaaaaaaaaaaaaaaaaaaaaaaaaaaaaaaaaaaaaaaaaaaaaaaaaaaugcaucccccccccccccccccccccccccccccccaaaggcucuuuucagagccaccagaauu

SEQ ID NO: 4911 - RNA, 2045 nt, Artificial Sequence
  mRNA product Design h-4 comprising derived and/or modified sequence from HRSV(A2)__F_DSCav1_mut4 (opt2)
gggagagggcgcuuggcuugcaaggacccugagcugcggcauugaagcacacccaacccaacucgacugaagucagccucacugaaccggaucugagaaucuucucucucugggcuugccagggcucuccgaaccuagcuagcauccucuucaauuccaacuagaaagcuuaccauggagcuccucauccucaaggccaacgccaucaccaccauccucaccgccgucaccuucugcuucgccuccggccagaacaucaccgaggaguucuaccaguccaccugcuccgccgucuccaagggcuaccucuccgcccuccgcaccggcugguacaccuccgucaucaccaucgagcucuccaacaucaaggagaacaagugcaacggcaccgacgccaaggucaagcucaucaagcaggagcucgacaaguacaagaacgccgucaccgagcuccagcuccucaugcaguccacccccgccaccggcuccggcuccgccaucugcuccggcgucgccgucugcaagguccuccaccucgagggcgaggucaacaagaucaaguccgcccuccucuccaccaacaaggccgucgucucccucuccaacggcgucuccguccucaccuucaagguccucgaccucaagaacuacaucgacaagcagcuccuccccauccucaacaagcaguccugcuccaucuccaacaucgagaccgucaucgaguuccagcagaagaacaaccgccuccucgagaucacccgcgaguucuccgucaacgccggcgucaccacccccgucuccaccuacaugcucaccaacuccgagcuccucucccucaucaacgacaugcccaucaccaacgaccagaagaagcucauguccaacaacguccagaucguccgccagcaguccuacuccaucaugugcaucaucaaggaggagguccucgccuacgucguccagcucccccucuacggcgucaucgacacccccugcuggaagcuccacaccuccccccucugcaccaccaacaccaaggagggcuccaacaucugccucacccgcaccgaccgcggcugguacugcgacaacgccggcuccgucuccuucuucccccaggccgagaccugcaagguccaguccaaccgcgucuucugcgacaccaugaacucccgcacccuccccuccgaggucaaccucugcaacgucgacaucuucaaccccaaguacgacugcaagaucaugaccuccaagaccgacgucuccuccuccgucaucaccucccucggcgccaucgucuccugcuacggcaagaccaagugcaccgccuccaacaagaaccgcggcaucaucaagaccuucuccaacggcugcgacuacgucuccaacaagggcgucgacaccgucuccgucggcaacacccucuacugcgucaacaagcaggagggcaagucccucuacgucaagggcgagcccaucaucaacuucuacgacccccucgucuuccccuccgacgaguucgacgccuccaucucccaggucaacgagaagaucaaccagucccucgccuucauccgcaaguccgacgagcuccuccacaacgucaacgccggcaaguccaccaccaacaucaugaucaccaccaucaucaucgucaucaucgucauccuccucucccucaucgccgucggccuccuccucuacugcaaggcccgcuccacccccgucacccucuccaaggaccagcucuccggcaucaacaacaucgccuucuccaacugaggacuaguaauaaggaaacuguaugaaugucugugggcaggaagugaagagauccuucuguaaagguuuuuggaauuaugucugcugaauaauaaacuuuuuugaaauaauaaaucugguagaaaaaugagaucuaaaaaaaaaaaaaaaaaaaaaaaaaaaaaaaaaaaaaaaaaaaaaaaaaaaaaaaaaaaaaaaaugcaucccccccccccccccccccccccccccccccaaaggcucuuuucagagccaccagaauu

SEQ ID NO: 4912 - RNA, 2045 nt, Artificial Sequence
  mRNA product Design h-4 comprising derived and/or modified sequence from HRSV(A2)__F_DSCav1_mut4 (opt3)
gggagagggcgcuuggcuugcaaggacccugagcugcggcauugaagcacacccaacccaacucgacugaagucagccucacugaaccggaucugagaaucuucucucucugggcuugccagggcucuccgaaccuagcuagcauccucuucaauuccaacuagaaagcuuaccauggagcugcucauccuuaaggccaacgcuauuaccacaauacugacugcagugacguucugcuuugccagcggccagaauaucaccgaagaguucuaccaauccacauguucugcggucucaaaaggguauuugagugcuuuaagaacuggaugguacaccagcguuauuacaaucgaacuguccaacauuaaggagaauaaaugcaacgguaccgacgccaaggugaaacuaaucaagcaggaacucgauaaguauaaaaaugcaguaacugagcugcagcuucugaugcagucuacacccgccaccggcucggggucagcuauauguagcggaguggcagucugcaagguguugcaccucgagggcgaaguuaacaaaaucaagagugcccugcuguccacgaauaaagcuguggucucucucagcaacgguguguccguauuaacuuuuaagguucuggaccuuaagaauuacauugauaaacaauugcugccuauccuaaacaagcagucauguaguauuagcaauaucgagaccgugauagaguuccagcagaaaaacaauaggcuccuggaaauuacacgggaguuuucugucaacgccggggugacuaccccaguguccacauauaugcuuaccaauucagaacuguugagccucaucaacgacaugccgauuacgaacgaucaaaagaaacugaugaguaauaacguccagaucguucgccagcagucuuacuccaucaugugcauuauaaaggaggaaguguuagcguauguagugcaacugccccucuacggagucaucgacacuccuuguuggaaacuucauacaagcccacugugcaccacuaauacaaaggagggcucgaacauuuguuugacccgaacggaucguggcugguacugcgacaaugcagggucuguguccuucuuuccccaggccgaaaccuguaagguucagucaaacagaguguucugcgauacaaugaauaguagaacucugccuagcgaggucaaccucugcaauguggacaucuuuaacccaaaauaugauuguaagauaaugaccuccaaaacagacguaucuagcucaguuauuaccagucugggagcuaucguguccugcuacgguaagacuaaauguacagccagcaauaagaacaggggcaucauuaagaccuucucuaaugggugcgauuaugucucaaacaaaggaguggacacugucagugugggcaauacgcuuuacuguguuaacaagcaagaggguaaaagccuguaugugaagggggaacccaucauuaacuuuuacgacccuuugguauucccauccgaugaguuugacgcaucuauaucgcaggucaaugagaaaaucaaccagagccucgcuuucauucggaaguccgaugaacuguuacacaaugugaacgccggaaagucaacaaccaauaucaugaucacuaccauuauaaucguuauuaucgugauucugcuaagucucaucgcggucggccugcuuuuguauugcaaagcccgcucuacaccggugacccugagcaaggaccagcucuccggcauaaacaauaucgcauucucaaacugaggacuaguaauaaggaaacuguaugaaugucugugggcaggaagugaagagauccuucuguaaagguuuuuggaauuaugucugcugaauaauaaacuuuuuugaaauaauaaaucugguagaaaaaugagaucuaaaaaaaaaaaaaaaaaaaaaaaaaaaaaaaaaaaaaaaaaaaaaaaaaaaaaaaaaaaaaaaaugcaucccccccccccccccccccccccccccccccaaaggcucuuuucagagccaccagaauu

SEQ ID NO: 4913 - RNA, 2045 nt, Artificial Sequence
  mRNA product Design h-4 comprising derived and/or modified sequence from HRSV(A2)__F_DSCav1_mut4 (opt4)
gggagagggcgcuuggcuugcaaggacccugagcugcggcauugaagcacacccaacccaacucgacugaagucagccucacugaaccggaucugagaaucuucucucucugggcuugccagggcucuccgaaccuagcuagcauccucuucaauuccaacuagaaagcuuaccauggagcugcugauccugaaggccaacgccaucaccaccauccugaccgccgugaccuucugcuucgccagcggccagaacaucaccgaggaguucuaccagagcaccugcagcgccgugagcaagggcuaccugagcgcccugagaaccggcugguacaccagcgugaucaccaucgagcugagcaacaucaaggagaacaagugcaacggcaccgacgccaaggugaagcugaucaagcaggagcuggacaaguacaagaacgccgugaccgagcugcagcugcugaugcagagcacccccgccaccggcagcggcagcgccaucugcagcggcguggccgugugcaaggugcugcaccuggagggcgaggugaacaagaucaagagcgcccugcugagcaccaacaaggccguggugagccugagcaacggcgugagcgugcugaccuucaaggugcuggaccugaagaacuacaucgacaagcagcugcugcccauccugaacaagcagagcugcagcaucagcaacaucgagaccgugaucgaguuccagcagaagaacaacagacugcuggagaucaccagagaguucagcgugaacgccggcgugaccacccccgugagcaccuacaugcugaccaacagcgagcugcugagccugaucaacgacaugcccaucaccaacgaccagaagaagcugaugagcaacaacgugcagaucgugagacagcagagcuacagcaucaugugcaucaucaaggaggaggugcuggccuacguggugcagcugccccuguacggcgugaucgacacccccugcuggaagcugcacaccagcccccugugcaccaccaacaccaaggagggcagcaacaucugccugaccagaaccgacagaggcugguacugcgacaacgccggcagcgugagcuucuucccccaggccgagaccugcaaggugcagagcaacagaguguucugcgacaccaugaacagcagaacccugcccagcgaggugaaccugugcaacguggacaucuucaaccccaaguacgacugcaagaucaugaccagcaagaccgacgugagcagcagcgugaucaccagccugggcgccaucgugagcugcuacggcaagaccaagugcaccgccagcaacaagaacagaggcaucaucaagaccuucagcaacggcugcgacuacgugagcaacaagggcguggacaccgugagcgugggcaacacccuguacugcgugaacaagcaggagggcaagagccuguacgugaagggcgagcccaucaucaacuucuacgacccccugguguuccccagcgacgaguucgacgccagcaucagccaggugaacgagaagaucaaccagagccuggccuucaucagaaagagcgacgagcugcugcacaacgugaacgccggcaagagcaccaccaacaucaugaucaccaccaucaucaucgugaucaucgugauccugcugagccugaucgccgugggccugcugcuguacugcaaggccagaagcacccccgugacccugagcaaggaccagcugagcggcaucaacaacaucgccuucagcaacugaggacuaguaauaaggaaacuguaugaaugucugugggcaggaagugaagagauccuucuguaaagguuuuuggaauuaugucugcugaauaauaaacuuuuuugaaauaauaaaucugguagaaaaaugagaucuaaaaaaaaaaaaaaaaaaaaaaaaaaaaaaaaaaaaaaaaaaaaaaaaaaaaaaaaaaaaaaaaugcaucccccccccccccccccccccccccccccccaaaggcucuuuucagagccaccagaauu

SEQ ID NO: 4914 - RNA, 2045 nt, Artificial Sequence
  mRNA product Design h-4 comprising derived and/or modified sequence from HRSV(A2)__F_DSCav1_mut4 (opt5)
gggagagggcgcuuggcuugcaaggacccugagcugcggcauugaagcacacccaacccaacucgacugaagucagccucacugaaccggaucugagaaucuucucucucugggcuugccagggcucuccgaaccuagcuagcauccucuucaauuccaacuagaaagcuuaccauggagcugcucauccugaaggccaacgcuauuaccacaauccuuacggccgugaccuucugcuuugcgagcggccagaauauuacagaagaguucuaccaauccaccuguucugcugucagcaaaggguaucuguccgcccucagaacaggaugguacaccucuguuaucacaauugaacugagcaacaucaaggagaauaaaugcaacggcaccgacgccaaggugaaacuuaucaagcaggaacuggauaaguauaaaaaugcugugacggagcuccagcugcugaugcaguccacccccgccacagggucuggaagcgcuauuuguuccggcgucgccgugugcaagguucuccaccuggagggggaagugaacaaaaucaagagcgcgcuucugucuaccaauaaagccgucgugucccucagcaacggaguuucugugcugacauuuaagguccuugaccugaagaauuacauugauaaacaacuccugccuauccugaacaagcaguccuguagcauuucuaauaucgagaccgugauugaguuccagcagaaaaacaaucggcuccuggaaaucacgcgcgaguuuuccgugaacgcuggcgucacaaccccgguuagcacauauaugcuuaccaauuccgaacugcucucucugaucaacgacaugcccauuaccaacgaucaaaagaaacuuaugagcaauaacgugcagaucgugagacagcaguccuacagcauuaugugcaucauuaaggaggaaguccuggccuaugugguucaacucccucuguacggcgugaucgacacacccuguuggaaacugcauacgucuccucucugcaccacaaauaccaaggagggguccaacaucugucugacacggaccgaucgcggaugguacugcgacaaugcuggcagcgucucuuucuuuccccaggccgaaacguguaaggugcagagcaacagaguuuucugcgauacaaugaacuccagaacccugccuucugaggugaaucucugcaaugucgacauuuuuaacccgaaauaugauuguaagaucaugaccagcaaaacagacguguccagcucugucauuaccucccugggggcgaucgugagcugcuacggaaagacaaaauguacggccucuaauaagaaccggggcauuaucaagaccuucuccaaugggugcgauuauguuagcaacaaaggaguggacacagucuccgugggcaauacccuuuacuguguuaacaagcaagagggcaaaucucuguaugugaagggggaacccaucauuaacuuuuacgacccucucgucuuccccagcgaugaguuugacgcuuccaucucucaggugaaugagaaaauuaaccagagccuggccuucauccgcaaguccgaugaacugcuccacaaugugaacgcuggaaagagcacaaccaauauuaugaucacgaccauuaucaucguuauuaucgucauucugcuuucucugaucgccgugggccuccugcuguauugcaaagccagauccacaccugugacccuuagcaaggaccagcucucugggauuaacaauaucgcuuucuccaacugaggacuaguaauaaggaaacuguaugaaugucugugggcaggaagugaagagauccuucuguaaagguuuuuggaauuaugucugcugaauaauaaacuuuuuugaaauaauaaaucugguagaaaaaugagaucuaaaaaaaaaaaaaaaaaaaaaaaaaaaaaaaaaaaaaaaaaaaaaaaaaaaaaaaaaaaaaaaaugcaucccccccccccccccccccccccccccccccaaaggcucuuuucagagccaccagaauu

SEQ ID NO: 4915 - RNA, 2045 nt, Artificial Sequence
  mRNA product Design h-4 comprising derived and/or modified sequence from HRSV(A2)__F_DSCav1_mut4 (opt6)
gggagagggcgcuuggcuugcaaggacccugagcugcggcauugaagcacacccaacccaacucgacugaagucagccucacugaaccggaucugagaaucuucucucucugggcuugccagggcucuccgaaccuagcuagcauccucuucaauuccaacuagaaagcuuaccauggaacuucuaauacucaaagccaacgcaauaacaacaauauuaacagccguaacauuuugcuucgcaucaggucaaaacauaacagaagaguucuaccaauccacaugcucagcaguaucaaaaggauauuuaagugcucuaagaacaggaugguacacauccguaauaacaaucgaacuaucaaacauaaaagaaaauaaauguaauggaacagacgccaaaguaaaauuaaucaaacaagaacuagacaaauacaaaaacgcaguuacugaauuacaauuauuaaugcaaucaacaccggccacaggaucuggaucagcaauaugcucaggaguagcagucugcaaaguauuacaccuagaaggggaaguuaauaaaaucaaaucagcauuacuauccaccaacaaagcgguaguuucacucuccaacggcguaucugucuuaacauucaaaguauuagaccuaaaaaacuacauugacaaacaacuacuaccaauccuaaacaaacaaucauguuccauaagcaauauagaaacaguaauagaauuucaacaaaaaaacaacagacuauuagaaauaacaagagaauuuuccgucaaugcaggaguuacuaccccugucuccaccuauaugcuaaccaauuccgaacucuuaucauuaauaaacgacaugccuaucacaaaugaccaaaaaaaauuaaugagcaacaacguacaaauaguacgacaacaaucauacucaaucaugugcauaauaaaagaagaaguccuagcauacguuguacaacuaccacuauacggagucauagauaccccaugcuggaaacuccauacaagcccacuaugcacuacaaacacaaaagaaggcucuaauauaugucuaacaagaacagaccgaggaugguacugcgauaaugccggcucagucucauucuuuccgcaagccgaaacuuguaaaguacaaaguaacagaguauuuugugacaccaugaacucaagaacccucccaagcgaagucaaucuaugcaacguugauauauucaaucccaaauacgacugcaaaaucaugaccucaaaaacagacgucagcucauccguuauaacaucacuaggagccaucguaucuugcuauggaaaaacaaaaugcacagcaagcaauaaaaacagaggcauaauaaaaacauucucaaauggaugcgacuacguaucaaacaaaggagucgacacaguuuccguaggaaacacuuuauacugcguaaacaaacaagaaggaaaaucauuauacgucaaaggugaaccaauaauaaacuucuacgauccacuuguauucccaucagacgaauuugacgcaucaauuucacaaguaaacgaaaaaauaaaccaaucacucgcauucauaagaaaaucagaugaacuacuacauaacguaaacgcaggaaaauccacaacaaacaucaugauaacaaccaucauaaucguaauaaucguaauacuauuaucccuaauugcaguaggauuacucuuauauugcaaagcaagaucaacaccaguaacccucaguaaagaccaacuauccggaauaaauaacaucgcauucucaaacuaaggacuaguaauaaggaaacuguaugaaugucugugggcaggaagugaagagauccuucuguaaagguuuuuggaauuaugucugcugaauaauaaacuuuuuugaaauaauaaaucugguagaaaaaugagaucuaaaaaaaaaaaaaaaaaaaaaaaaaaaaaaaaaaaaaaaaaaaaaaaaaaaaaaaaaaaaaaaaugcaucccccccccccccccccccccccccccccccaaaggcucuuuucagagccaccagaauu

SEQ ID NO: 4916 - RNA, 2045 nt, Artificial Sequence
  mRNA product Design h-4 comprising derived and/or modified sequence from HRSV(A2)__F_DSCav1_mut4 (opt11)
gggagagggcgcuuggcuugcaaggacccugagcugcggcauugaagcacacccaacccaacucgacugaagucagccucacugaaccggaucugagaaucuucucucucugggcuugccagggcucuccgaaccuagcuagcauccucuucaauuccaacuagaaagcuuaccauggaacugcucauccucaaagccaacgccaucaccaccauucuuaccgccgucacauucugcuucgccucaggccaaaacaucaccgaagaauuuuaccaauccacuuguucagccgucucaaaaggauaccuaucagcccuccguaccggcugguacaccucggucauaacaauagaacucuccaacauaaaagaaaacaaaugcaacggcaccgacgccaaggucaaacugauaaaacaagaacuugauaaauacaaaaacgccgucacugaacuccaacuccucaugcaauccacucccgcuacuggcucuggcuccgccaucugcucuggcgucgccgucuguaaaguacuccaccucgaaggggaagucaacaaaaucaaaucagcccuccuuagcaccaacaaggccgucgucucccucucaaacggagucagcguccucaccuucaagguccucgaccucaagaacuacaucgacaaacaacuccugcccauccuaaauaaacaauccugcucuaucuccaauaucgaaaccguuauagaguuccaacagaaaaacaaccgacuccucgaaaucacccgcgaguucuccgucaacgcaggcgucaccaccccugugucaaccuacaugcucaccaacagcgaacuacucucacucaucaaugacaugcccaucaccaacgaccaaaagaaacucauguccaacaacguccaaaucguacgucaacaauccuacagcaucaugugcaucauaaaagaagaaguccucgccuacgucguccaacuuccccucuacggcgucauagacacccccugcuggaaacugcauaccucaccccuaugcaccaccaacacuaaagaaggcuccaacaucugccucacccgcacggaccgcggcugguacugcgacaacgccggcuccgucuccuucuucccccaagccgaaacuuguaaaguccaauccaacagagucuucugcgacaccaugaacucuagaacgcugccauccgagguaaaccuaugcaacgucgacaucuucaaucccaaauacgacugcaagaucaugaccucaaaaaccgacguauccuccucaguaaucaccagucucggagcuaucgucuccugcuacggcaaaaccaaaugcacggccucuaacaaaaaccgcggcaucaucaaaaccuucucaaacggaugcgacuacgucagcaacaaaggcguagauaccgucucugucggcaacacacuguacugcguaaacaagcaagaaggaaaaucccucuacguaaaaggcgaacccaucaucaacuucuacgacccccucguuuuccccucagaugaauuugacgccucgauaucacaagucaacgaaaagauaaaucagucccucgccuucauccgaaaauccgacgaacuccuccacaacguuaacgcaggaaaguccaccacaaacaucaugauaacuacaaucauaauagucauuaucgucauacuccucucccuaaucgccguaggccugcuacucuacugcaaagcccgcucaacccccgucacucucucaaaagaccaacucuccggcaucaauaacaucgccuucucaaacuaaggacuaguaauaaggaaacuguaugaaugucugugggcaggaagugaagagauccuucuguaaagguuuuuggaauuaugucugcugaauaauaaacuuuuuugaaauaauaaaucugguagaaaaaugagaucuaaaaaaaaaaaaaaaaaaaaaaaaaaaaaaaaaaaaaaaaaaaaaaaaaaaaaaaaaaaaaaaaugcaucccccccccccccccccccccccccccccccaaaggcucuuuucagagccaccagaauu

SEQ ID NO: 4917 - RNA, 2061 nt, Artificial Sequence
  mRNA product Design h-5 comprising derived and/or modified sequence from HRSV(A2)__F_DSCav1_mut4 (opt1)
gggagagggcgcuuggcuugcaaggacccugagcugcggcauugaagcacacccaacccaacucgacugaagucagccucacugaaccggaucugagaaucuucucucucugggcuugccagggcucuccgaaccuagcuagcauccucuucaauuccaacuagaaagcuuaccauggagcugcucauccugaaggccaacgccaucaccaccauccugacggcggugaccuucugcuucgccagcggccagaacaucaccgaggaguucuaccaguccacgugcagcgccgucuccaagggguaccucagcgcccugcggaccggcugguacaccuccgugaucaccaucgagcugagcaacaucaaggagaacaagugcaacgggaccgacgccaaggugaagcucaucaagcaggagcuggacaaguacaagaacgcggucacggagcugcagcuccugaugcaguccaccccggcaaccggcuccggcuccgccaucugcagcggcgucgccgugugcaaggugcugcaccucgagggggaggucaacaagaucaagagcgcccugcuguccaccaacaaggccguggugagccucuccaacggcgucagcgugcugaccuucaaggugcuggaccucaagaacuacaucgacaagcagcugcugcccauccugaacaagcagagcugcuccaucagcaacaucgagacggugaucgaguuccagcagaagaacaaccggcuccuggagaucacccgcgaguucagcgugaacgccggggucaccacccccguguccacguacaugcugaccaacagcgagcuccugucccugaucaacgacaugccgaucaccaacgaccagaagaagcucaugagcaacaacgugcagaucguccggcagcaguccuacagcaucaugugcaucaucaaggaggaggugcuggcguacgugguccagcugccccucuacggcgugaucgacacccccugcuggaagcugcacacgagcccccugugcaccaccaacaccaaggagggguccaacaucugccucacgcgcaccgaccggggcugguacugcgacaacgccggcagcgucuccuucuucccgcaggccgagaccugcaaggugcagagcaaccgcguguucugcgacaccaugaacucccggacgcugcccagcgagguaaaccucugcaacgucgacaucuucaaccccaaguacgacugcaagaucaugaccuccaagaccgacgugagcuccagcgugaucaccucccugggggccaucgucagcugcuacggcaagacgaagugcaccgccagcaacaagaaccgggggaucaucaagaccuucuccaacggcugcgacuacgugagcaacaagggcguggacaccguguccgucgggaacacccuguacugcgugaacaagcaggagggcaagagccucuacgugaagggggagcccaucaucaacuucuacgacccgcuggucuuccccuccgacgaguucgacgcgagcaucucccaggugaacgagaagaucaaccagagccuggccuucauccgcaaguccgacgagcugcuccacaacgugaacgccggcaagagcacgaccaacaucaugaucaccaccaucaucaucgucaucaucgugauccugcugucccucaucgccguggggcugcugcucuacugcaaggcccggagcacgcccgucacccuguccaaggaccagcugagcggcaucaacaacaucgcguucuccaacugaggacuaguacuggcugcaucucccuuuccucuguccuccauccuucucccaggauggugaagggggaccugguacccagugauccccaccccaggauccuaaaucaugacuuaccugcuaauaaaaacucauuggaaaagugagaagaucuaaaaaaaaaaaaaaaaaaaaaaaaaaaaaaaaaaaaaaaaaaaaaaaaaaaaaaaaaaaaaaaaugcaucccccccccccccccccccccccccccccccaaaggcucuuuucagagccaccagaauu

SEQ ID NO: 4918 - RNA, 2061 nt, Artificial Sequence
  mRNA product Design h-5 comprising derived and/or modified sequence from HRSV(A2)__F_DSCav1_mut4 (opt1)
gggagagggcgcuuggcuugcaaggacccugagcugcggcauugaagcacacccaacccaacucgacugaagucagccucacugaaccggaucugagaaucuucucucucugggcuugccagggcucuccgaaccuagcuagcauccucuucaauuccaacuagaaagcuuaccauggagcugcucauccugaaggccaacgccaucaccaccauccugacggcggugaccuucugcuucgccagcggccagaacaucaccgaggaguucuaccaguccacgugcagcgccgucuccaagggguaccucagcgcccugcgcaccggcugguacaccuccgugaucaccaucgagcugagcaacaucaaggagaacaagugcaacgggaccgacgccaaggugaagcucaucaagcaggagcuggacaaguacaagaacgcggucacggagcugcagcuccugaugcaguccacccccgccaccggcagcggguccgccaucugcagcggcguggccgugugcaagguccugcaccucgagggcgaggugaacaagaucaaguccgcgcugcugagcaccaacaaggccguggucucccucagcaacgggguguccgugcugacguucaagguccuggaccucaagaacuacaucgacaagcagcugcugccgauccucaacaagcagagcugcuccaucagcaacaucgagaccgugaucgaguuccagcagaagaacaaccggcugcuggagaucacccgcgaguucuccgugaacgccggcgucaccacgcccgugagcaccuacaugcucaccaacagcgagcugcugucccucaucaacgacaugcccaucaccaacgaccagaagaagcugaugagcaacaacgugcagaucguccggcagcaguccuacagcaucaugugcaucaucaaggaggaggugcuggccuacgugguccagcucccccuguacggggugaucgacacgccgugcuggaagcugcacaccagcccccucugcaccaccaacacgaaggagggcuccaacaucugccugacccgcaccgaccgggggugguacugcgacaacgccggcuccgugagcuucuucccccaggcggagaccugcaagguccaguccaaccgcguguucugcgacacgaugaacagccggacccuccccuccgaggucaaccugugcaacguggacaucuucaacccgaaguacgacugcaagaucaugaccagcaagaccgacguguccagcuccgucaucacgagccugggcgccaucguguccugcuacgggaagaccaagugcaccgccagcaacaagaaccggggcaucaucaagaccuucuccaacgggugcgacuacgugagcaacaagggcgucgacacggugagcgugggcaacacccucuacugcgucaacaagcaggaggggaagucccuguacgugaagggcgagcccaucaucaacuucuacgacccccugguguuccccagcgacgaguucgacgccuccaucagccaggucaacgagaagaucaaccagucccucgccuucauccgcaagagcgacgagcugcugcacaacgugaacgcggggaaguccaccaccaacaucaugaucaccacgaucaucaucgugaucaucgucauccuccugagccugaucgccgugggccuccugcuguacugcaaggcccgguccaccccggugacccugagcaaggaccagcucuccgggaucaacaacaucgccuucagcaacugaggacuaguacuggcugcaucucccuuuccucuguccuccauccuucucccaggauggugaagggggaccugguacccagugauccccaccccaggauccuaaaucaugacuuaccugcuaauaaaaacucauuggaaaagugagaagaucuaaaaaaaaaaaaaaaaaaaaaaaaaaaaaaaaaaaaaaaaaaaaaaaaaaaaaaaaaaaaaaaaugcaucccccccccccccccccccccccccccccccaaaggcucuuuucagagccaccagaauu

SEQ ID NO: 4919 - RNA, 2061 nt, Artificial Sequence
  mRNA product Design h-5 comprising derived and/or modified sequence from HRSV(A2)__F_DSCav1_mut4 (opt2)
gggagagggcgcuuggcuugcaaggacccugagcugcggcauugaagcacacccaacccaacucgacugaagucagccucacugaaccggaucugagaaucuucucucucugggcuugccagggcucuccgaaccuagcuagcauccucuucaauuccaacuagaaagcuuaccauggagcuccucauccucaaggccaacgccaucaccaccauccucaccgccgucaccuucugcuucgccuccggccagaacaucaccgaggaguucuaccaguccaccugcuccgccgucuccaagggcuaccucuccgcccuccgcaccggcugguacaccuccgucaucaccaucgagcucuccaacaucaaggagaacaagugcaacggcaccgacgccaaggucaagcucaucaagcaggagcucgacaaguacaagaacgccgucaccgagcuccagcuccucaugcaguccacccccgccaccggcuccggcuccgccaucugcuccggcgucgccgucugcaagguccuccaccucgagggcgaggucaacaagaucaaguccgcccuccucuccaccaacaaggccgucgucucccucuccaacggcgucuccguccucaccuucaagguccucgaccucaagaacuacaucgacaagcagcuccuccccauccucaacaagcaguccugcuccaucuccaacaucgagaccgucaucgaguuccagcagaagaacaaccgccuccucgagaucacccgcgaguucuccgucaacgccggcgucaccacccccgucuccaccuacaugcucaccaacuccgagcuccucucccucaucaacgacaugcccaucaccaacgaccagaagaagcucauguccaacaacguccagaucguccgccagcaguccuacuccaucaugugcaucaucaaggaggagguccucgccuacgucguccagcucccccucuacggcgucaucgacacccccugcuggaagcuccacaccuccccccucugcaccaccaacaccaaggagggcuccaacaucugccucacccgcaccgaccgcggcugguacugcgacaacgccggcuccgucuccuucuucccccaggccgagaccugcaagguccaguccaaccgcgucuucugcgacaccaugaacucccgcacccuccccuccgaggucaaccucugcaacgucgacaucuucaaccccaaguacgacugcaagaucaugaccuccaagaccgacgucuccuccuccgucaucaccucccucggcgccaucgucuccugcuacggcaagaccaagugcaccgccuccaacaagaaccgcggcaucaucaagaccuucuccaacggcugcgacuacgucuccaacaagggcgucgacaccgucuccgucggcaacacccucuacugcgucaacaagcaggagggcaagucccucuacgucaagggcgagcccaucaucaacuucuacgacccccucgucuuccccuccgacgaguucgacgccuccaucucccaggucaacgagaagaucaaccagucccucgccuucauccgcaaguccgacgagcuccuccacaacgucaacgccggcaaguccaccaccaacaucaugaucaccaccaucaucaucgucaucaucgucauccuccucucccucaucgccgucggccuccuccucuacugcaaggcccgcuccacccccgucacccucuccaaggaccagcucuccggcaucaacaacaucgccuucuccaacugaggacuaguacuggcugcaucucccuuuccucuguccuccauccuucucccaggauggugaagggggaccugguacccagugauccccaccccaggauccuaaaucaugacuuaccugcuaauaaaaacucauuggaaaagugagaagaucuaaaaaaaaaaaaaaaaaaaaaaaaaaaaaaaaaaaaaaaaaaaaaaaaaaaaaaaaaaaaaaaaugcaucccccccccccccccccccccccccccccccaaaggcucuuuucagagccaccagaauu

SEQ ID NO: 4920 - RNA, 2061 nt, Artificial Sequence
  mRNA product Design h-5 comprising derived and/or modified sequence from HRSV(A2)__F_DSCav1_mut4 (opt3)
gggagagggcgcuuggcuugcaaggacccugagcugcggcauugaagcacacccaacccaacucgacugaagucagccucacugaaccggaucugagaaucuucucucucugggcuugccagggcucuccgaaccuagcuagcauccucuucaauuccaacuagaaagcuuaccauggagcugcucauccuuaaggccaacgcuauuaccacaauacugacugcagugacguucugcuuugccagcggccagaauaucaccgaagaguucuaccaauccacauguucugcggucucaaaaggguauuugagugcuuuaagaacuggaugguacaccagcguuauuacaaucgaacuguccaacauuaaggagaauaaaugcaacgguaccgacgccaaggugaaacuaaucaagcaggaacucgauaaguauaaaaaugcaguaacugagcugcagcuucugaugcagucuacacccgccaccggcucggggucagcuauauguagcggaguggcagucugcaagguguugcaccucgagggcgaaguuaacaaaaucaagagugcccugcuguccacgaauaaagcuguggucucucucagcaacgguguguccguauuaacuuuuaagguucuggaccuuaagaauuacauugauaaacaauugcugccuauccuaaacaagcagucauguaguauuagcaauaucgagaccgugauagaguuccagcagaaaaacaauaggcuccuggaaauuacacgggaguuuucugucaacgccggggugacuaccccaguguccacauauaugcuuaccaauucagaacuguugagccucaucaacgacaugccgauuacgaacgaucaaaagaaacugaugaguaauaacguccagaucguucgccagcagucuuacuccaucaugugcauuauaaaggaggaaguguuagcguauguagugcaacugccccucuacggagucaucgacacuccuuguuggaaacuucauacaagcccacugugcaccacuaauacaaaggagggcucgaacauuuguuugacccgaacggaucguggcugguacugcgacaaugcagggucuguguccuucuuuccccaggccgaaaccuguaagguucagucaaacagaguguucugcgauacaaugaauaguagaacucugccuagcgaggucaaccucugcaauguggacaucuuuaacccaaaauaugauuguaagauaaugaccuccaaaacagacguaucuagcucaguuauuaccagucugggagcuaucguguccugcuacgguaagacuaaauguacagccagcaauaagaacaggggcaucauuaagaccuucucuaaugggugcgauuaugucucaaacaaaggaguggacacugucagugugggcaauacgcuuuacuguguuaacaagcaagaggguaaaagccuguaugugaagggggaacccaucauuaacuuuuacgacccuuugguauucccauccgaugaguuugacgcaucuauaucgcaggucaaugagaaaaucaaccagagccucgcuuucauucggaaguccgaugaacuguuacacaaugugaacgccggaaagucaacaaccaauaucaugaucacuaccauuauaaucguuauuaucgugauucugcuaagucucaucgcggucggccugcuuuuguauugcaaagcccgcucuacaccggugacccugagcaaggaccagcucuccggcauaaacaauaucgcauucucaaacugaggacuaguacuggcugcaucucccuuuccucuguccuccauccuucucccaggauggugaagggggaccugguacccagugauccccaccccaggauccuaaaucaugacuuaccugcuaauaaaaacucauuggaaaagugagaagaucuaaaaaaaaaaaaaaaaaaaaaaaaaaaaaaaaaaaaaaaaaaaaaaaaaaaaaaaaaaaaaaaaugcaucccccccccccccccccccccccccccccccaaaggcucuuuucagagccaccagaauu

SEQ ID NO: 4921 - RNA, 2061 nt, Artificial Sequence
  mRNA product Design h-5 comprising derived and/or modified sequence from HRSV(A2)__F_DSCav1_mut4 (opt4)
gggagagggcgcuuggcuugcaaggacccugagcugcggcauugaagcacacccaacccaacucgacugaagucagccucacugaaccggaucugagaaucuucucucucugggcuugccagggcucuccgaaccuagcuagcauccucuucaauuccaacuagaaagcuuaccauggagcugcugauccugaaggccaacgccaucaccaccauccugaccgccgugaccuucugcuucgccagcggccagaacaucaccgaggaguucuaccagagcaccugcagcgccgugagcaagggcuaccugagcgcccugagaaccggcugguacaccagcgugaucaccaucgagcugagcaacaucaaggagaacaagugcaacggcaccgacgccaaggugaagcugaucaagcaggagcuggacaaguacaagaacgccgugaccgagcugcagcugcugaugcagagcacccccgccaccggcagcggcagcgccaucugcagcggcguggccgugugcaaggugcugcaccuggagggcgaggugaacaagaucaagagcgcccugcugagcaccaacaaggccguggugagccugagcaacggcgugagcgugcugaccuucaaggugcuggaccugaagaacuacaucgacaagcagcugcugcccauccugaacaagcagagcugcagcaucagcaacaucgagaccgugaucgaguuccagcagaagaacaacagacugcuggagaucaccagagaguucagcgugaacgccggcgugaccacccccgugagcaccuacaugcugaccaacagcgagcugcugagccugaucaacgacaugcccaucaccaacgaccagaagaagcugaugagcaacaacgugcagaucgugagacagcagagcuacagcaucaugugcaucaucaaggaggaggugcuggccuacguggugcagcugccccuguacggcgugaucgacacccccugcuggaagcugcacaccagcccccugugcaccaccaacaccaaggagggcagcaacaucugccugaccagaaccgacagaggcugguacugcgacaacgccggcagcgugagcuucuucccccaggccgagaccugcaaggugcagagcaacagaguguucugcgacaccaugaacagcagaacccugcccagcgaggugaaccugugcaacguggacaucuucaaccccaaguacgacugcaagaucaugaccagcaagaccgacgugagcagcagcgugaucaccagccugggcgccaucgugagcugcuacggcaagaccaagugcaccgccagcaacaagaacagaggcaucaucaagaccuucagcaacggcugcgacuacgugagcaacaagggcguggacaccgugagcgugggcaacacccuguacugcgugaacaagcaggagggcaagagccuguacgugaagggcgagcccaucaucaacuucuacgacccccugguguuccccagcgacgaguucgacgccagcaucagccaggugaacgagaagaucaaccagagccuggccuucaucagaaagagcgacgagcugcugcacaacgugaacgccggcaagagcaccaccaacaucaugaucaccaccaucaucaucgugaucaucgugauccugcugagccugaucgccgugggccugcugcuguacugcaaggccagaagcacccccgugacccugagcaaggaccagcugagcggcaucaacaacaucgccuucagcaacugaggacuaguacuggcugcaucucccuuuccucuguccuccauccuucucccaggauggugaagggggaccugguacccagugauccccaccccaggauccuaaaucaugacuuaccugcuaauaaaaacucauuggaaaagugagaagaucuaaaaaaaaaaaaaaaaaaaaaaaaaaaaaaaaaaaaaaaaaaaaaaaaaaaaaaaaaaaaaaaaugcaucccccccccccccccccccccccccccccccaaaggcucuuuucagagccaccagaauu

SEQ ID NO: 4922 - RNA, 2061 nt, Artificial Sequence
  mRNA product Design h-5 comprising derived and/or modified sequence from HRSV(A2)__F_DSCav1_mut4 (opt5)
gggagagggcgcuuggcuugcaaggacccugagcugcggcauugaagcacacccaacccaacucgacugaagucagccucacugaaccggaucugagaaucuucucucucugggcuugccagggcucuccgaaccuagcuagcauccucuucaauuccaacuagaaagcuuaccauggagcugcucauccugaaggccaacgcuauuaccacaauccuuacggccgugaccuucugcuuugcgagcggccagaauauuacagaagaguucuaccaauccaccuguucugcugucagcaaaggguaucuguccgcccucagaacaggaugguacaccucuguuaucacaauugaacugagcaacaucaaggagaauaaaugcaacggcaccgacgccaaggugaaacuuaucaagcaggaacuggauaaguauaaaaaugcugugacggagcuccagcugcugaugcaguccacccccgccacagggucuggaagcgcuauuuguuccggcgucgccgugugcaagguucuccaccuggagggggaagugaacaaaaucaagagcgcgcuucugucuaccaauaaagccgucgugucccucagcaacggaguuucugugcugacauuuaagguccuugaccugaagaauuacauugauaaacaacuccugccuauccugaacaagcaguccuguagcauuucuaauaucgagaccgugauugaguuccagcagaaaaacaaucggcuccuggaaaucacgcgcgaguuuuccgugaacgcuggcgucacaaccccgguuagcacauauaugcuuaccaauuccgaacugcucucucugaucaacgacaugcccauuaccaacgaucaaaagaaacuuaugagcaauaacgugcagaucgugagacagcaguccuacagcauuaugugcaucauuaaggaggaaguccuggccuaugugguucaacucccucuguacggcgugaucgacacacccuguuggaaacugcauacgucuccucucugcaccacaaauaccaaggagggguccaacaucugucugacacggaccgaucgcggaugguacugcgacaaugcuggcagcgucucuuucuuuccccaggccgaaacguguaaggugcagagcaacagaguuuucugcgauacaaugaacuccagaacccugccuucugaggugaaucucugcaaugucgacauuuuuaacccgaaauaugauuguaagaucaugaccagcaaaacagacguguccagcucugucauuaccucccugggggcgaucgugagcugcuacggaaagacaaaauguacggccucuaauaagaaccggggcauuaucaagaccuucuccaaugggugcgauuauguuagcaacaaaggaguggacacagucuccgugggcaauacccuuuacuguguuaacaagcaagagggcaaaucucuguaugugaagggggaacccaucauuaacuuuuacgacccucucgucuuccccagcgaugaguuugacgcuuccaucucucaggugaaugagaaaauuaaccagagccuggccuucauccgcaaguccgaugaacugcuccacaaugugaacgcuggaaagagcacaaccaauauuaugaucacgaccauuaucaucguuauuaucgucauucugcuuucucugaucgccgugggccuccugcuguauugcaaagccagauccacaccugugacccuuagcaaggaccagcucucugggauuaacaauaucgcuuucuccaacugaggacuaguacuggcugcaucucccuuuccucuguccuccauccuucucccaggauggugaagggggaccugguacccagugauccccaccccaggauccuaaaucaugacuuaccugcuaauaaaaacucauuggaaaagugagaagaucuaaaaaaaaaaaaaaaaaaaaaaaaaaaaaaaaaaaaaaaaaaaaaaaaaaaaaaaaaaaaaaaaugcaucccccccccccccccccccccccccccccccaaaggcucuuuucagagccaccagaauu

SEQ ID NO: 4923 - RNA, 2061 nt, Artificial Sequence
  mRNA product Design h-5 comprising derived and/or modified sequence from HRSV(A2)__F_DSCav1_mut4 (opt6)
gggagagggcgcuuggcuugcaaggacccugagcugcggcauugaagcacacccaacccaacucgacugaagucagccucacugaaccggaucugagaaucuucucucucugggcuugccagggcucuccgaaccuagcuagcauccucuucaauuccaacuagaaagcuuaccauggaacuucuaauacucaaagccaacgcaauaacaacaauauuaacagccguaacauuuugcuucgcaucaggucaaaacauaacagaagaguucuaccaauccacaugcucagcaguaucaaaaggauauuuaagugcucuaagaacaggaugguacacauccguaauaacaaucgaacuaucaaacauaaaagaaaauaaauguaauggaacagacgccaaaguaaaauuaaucaaacaagaacuagacaaauacaaaaacgcaguuacugaauuacaauuauuaaugcaaucaacaccggccacaggaucuggaucagcaauaugcucaggaguagcagucugcaaaguauuacaccuagaaggggaaguuaauaaaaucaaaucagcauuacuauccaccaacaaagcgguaguuucacucuccaacggcguaucugucuuaacauucaaaguauuagaccuaaaaaacuacauugacaaacaacuacuaccaauccuaaacaaacaaucauguuccauaagcaauauagaaacaguaauagaauuucaacaaaaaaacaacagacuauuagaaauaacaagagaauuuuccgucaaugcaggaguuacuaccccugucuccaccuauaugcuaaccaauuccgaacucuuaucauuaauaaacgacaugccuaucacaaaugaccaaaaaaaauuaaugagcaacaacguacaaauaguacgacaacaaucauacucaaucaugugcauaauaaaagaagaaguccuagcauacguuguacaacuaccacuauacggagucauagauaccccaugcuggaaacuccauacaagcccacuaugcacuacaaacacaaaagaaggcucuaauauaugucuaacaagaacagaccgaggaugguacugcgauaaugccggcucagucucauucuuuccgcaagccgaaacuuguaaaguacaaaguaacagaguauuuugugacaccaugaacucaagaacccucccaagcgaagucaaucuaugcaacguugauauauucaaucccaaauacgacugcaaaaucaugaccucaaaaacagacgucagcucauccguuauaacaucacuaggagccaucguaucuugcuauggaaaaacaaaaugcacagcaagcaauaaaaacagaggcauaauaaaaacauucucaaauggaugcgacuacguaucaaacaaaggagucgacacaguuuccguaggaaacacuuuauacugcguaaacaaacaagaaggaaaaucauuauacgucaaaggugaaccaauaauaaacuucuacgauccacuuguauucccaucagacgaauuugacgcaucaauuucacaaguaaacgaaaaaauaaaccaaucacucgcauucauaagaaaaucagaugaacuacuacauaacguaaacgcaggaaaauccacaacaaacaucaugauaacaaccaucauaaucguaauaaucguaauacuauuaucccuaauugcaguaggauuacucuuauauugcaaagcaagaucaacaccaguaacccucaguaaagaccaacuauccggaauaaauaacaucgcauucucaaacuaaggacuaguacuggcugcaucucccuuuccucuguccuccauccuucucccaggauggugaagggggaccugguacccagugauccccaccccaggauccuaaaucaugacuuaccugcuaauaaaaacucauuggaaaagugagaagaucuaaaaaaaaaaaaaaaaaaaaaaaaaaaaaaaaaaaaaaaaaaaaaaaaaaaaaaaaaaaaaaaaugcaucccccccccccccccccccccccccccccccaaaggcucuuuucagagccaccagaauu

SEQ ID NO: 4924 - RNA, 2061 nt, Artificial Sequence
  mRNA product Design h-5 comprising derived and/or modified sequence from HRSV(A2)__F_DSCav1_mut4 (opt11)
gggagagggcgcuuggcuugcaaggacccugagcugcggcauugaagcacacccaacccaacucgacugaagucagccucacugaaccggaucugagaaucuucucucucugggcuugccagggcucuccgaaccuagcuagcauccucuucaauuccaacuagaaagcuuaccauggaacugcucauccucaaagccaacgccaucaccaccauucuuaccgccgucacauucugcuucgccucaggccaaaacaucaccgaagaauuuuaccaauccacuuguucagccgucucaaaaggauaccuaucagcccuccguaccggcugguacaccucggucauaacaauagaacucuccaacauaaaagaaaacaaaugcaacggcaccgacgccaaggucaaacugauaaaacaagaacuugauaaauacaaaaacgccgucacugaacuccaacuccucaugcaauccacucccgcuacuggcucuggcuccgccaucugcucuggcgucgccgucuguaaaguacuccaccucgaaggggaagucaacaaaaucaaaucagcccuccuuagcaccaacaaggccgucgucucccucucaaacggagucagcguccucaccuucaagguccucgaccucaagaacuacaucgacaaacaacuccugcccauccuaaauaaacaauccugcucuaucuccaauaucgaaaccguuauagaguuccaacagaaaaacaaccgacuccucgaaaucacccgcgaguucuccgucaacgcaggcgucaccaccccugugucaaccuacaugcucaccaacagcgaacuacucucacucaucaaugacaugcccaucaccaacgaccaaaagaaacucauguccaacaacguccaaaucguacgucaacaauccuacagcaucaugugcaucauaaaagaagaaguccucgccuacgucguccaacuuccccucuacggcgucauagacacccccugcuggaaacugcauaccucaccccuaugcaccaccaacacuaaagaaggcuccaacaucugccucacccgcacggaccgcggcugguacugcgacaacgccggcuccgucuccuucuucccccaagccgaaacuuguaaaguccaauccaacagagucuucugcgacaccaugaacucuagaacgcugccauccgagguaaaccuaugcaacgucgacaucuucaaucccaaauacgacugcaagaucaugaccucaaaaaccgacguauccuccucaguaaucaccagucucggagcuaucgucuccugcuacggcaaaaccaaaugcacggccucuaacaaaaaccgcggcaucaucaaaaccuucucaaacggaugcgacuacgucagcaacaaaggcguagauaccgucucugucggcaacacacuguacugcguaaacaagcaagaaggaaaaucccucuacguaaaaggcgaacccaucaucaacuucuacgacccccucguuuuccccucagaugaauuugacgccucgauaucacaagucaacgaaaagauaaaucagucccucgccuucauccgaaaauccgacgaacuccuccacaacguuaacgcaggaaaguccaccacaaacaucaugauaacuacaaucauaauagucauuaucgucauacuccucucccuaaucgccguaggccugcuacucuacugcaaagcccgcucaacccccgucacucucucaaaagaccaacucuccggcaucaauaacaucgccuucucaaacuaaggacuaguacuggcugcaucucccuuuccucuguccuccauccuucucccaggauggugaagggggaccugguacccagugauccccaccccaggauccuaaaucaugacuuaccugcuaauaaaaacucauuggaaaagugagaagaucuaaaaaaaaaaaaaaaaaaaaaaaaaaaaaaaaaaaaaaaaaaaaaaaaaaaaaaaaaaaaaaaaugcaucccccccccccccccccccccccccccccccaaaggcucuuuucagagccaccagaauu

SEQ ID NO: 4925 - RNA, 1994 nt, Artificial Sequence
  mRNA product Design i-1 comprising derived and/or modified sequence from HRSV(A2)__F_DSCav1_mut4 (opt1)
gggagagggcgcuuggcuugcaaggacccugagcugcggcauugaagcacacccaacccaacucgacugaagucagccucacugaaccggaucugagaaucuucucucucugggcuugccagggcucuccgaaccuagcuagcauccucuucaauuccaacuagaaagcuuaccauggagcugcucauccugaaggccaacgccaucaccaccauccugacggcggugaccuucugcuucgccagcggccagaacaucaccgaggaguucuaccaguccacgugcagcgccgucuccaagggguaccucagcgcccugcggaccggcugguacaccuccgugaucaccaucgagcugagcaacaucaaggagaacaagugcaacgggaccgacgccaaggugaagcucaucaagcaggagcuggacaaguacaagaacgcggucacggagcugcagcuccugaugcaguccaccccggcaaccggcuccggcuccgccaucugcagcggcgucgccgugugcaaggugcugcaccucgagggggaggucaacaagaucaagagcgcccugcuguccaccaacaaggccguggugagccucuccaacggcgucagcgugcugaccuucaaggugcuggaccucaagaacuacaucgacaagcagcugcugcccauccugaacaagcagagcugcuccaucagcaacaucgagacggugaucgaguuccagcagaagaacaaccggcuccuggagaucacccgcgaguucagcgugaacgccggggucaccacccccguguccacguacaugcugaccaacagcgagcuccugucccugaucaacgacaugccgaucaccaacgaccagaagaagcucaugagcaacaacgugcagaucguccggcagcaguccuacagcaucaugugcaucaucaaggaggaggugcuggcguacgugguccagcugccccucuacggcgugaucgacacccccugcuggaagcugcacacgagcccccugugcaccaccaacaccaaggagggguccaacaucugccucacgcgcaccgaccggggcugguacugcgacaacgccggcagcgucuccuucuucccgcaggccgagaccugcaaggugcagagcaaccgcguguucugcgacaccaugaacucccggacgcugcccagcgagguaaaccucugcaacgucgacaucuucaaccccaaguacgacugcaagaucaugaccuccaagaccgacgugagcuccagcgugaucaccucccugggggccaucgucagcugcuacggcaagacgaagugcaccgccagcaacaagaaccgggggaucaucaagaccuucuccaacggcugcgacuacgugagcaacaagggcguggacaccguguccgucgggaacacccuguacugcgugaacaagcaggagggcaagagccucuacgugaagggggagcccaucaucaacuucuacgacccgcuggucuuccccuccgacgaguucgacgcgagcaucucccaggugaacgagaagaucaaccagagccuggccuucauccgcaaguccgacgagcugcuccacaacgugaacgccggcaagagcacgaccaacaucaugaucaccaccaucaucaucgucaucaucgugauccugcugucccucaucgccguggggcugcugcucuacugcaaggcccggagcacgcccgucacccuguccaaggaccagcugagcggcaucaacaacaucgcguucuccaacugaggacuaguguccaccugucccuccugggcugcuggauugucucguuuuccugccaaauaaacaggaucagcgcuuuacagaucuaaaaaaaaaaaaaaaaaaaaaaaaaaaaaaaaaaaaaaaaaaaaaaaaaaaaaaaaaaaaaaaaugcaucccccccccccccccccccccccccccccccaaaggcucuuuucagagccaccagaauu

SEQ ID NO: 4926 - RNA, 1994 nt, Artificial Sequence
  mRNA product Design i-1 comprising derived and/or modified sequence from HRSV(A2)__F_DSCav1_mut4 (opt1)
gggagagggcgcuuggcuugcaaggacccugagcugcggcauugaagcacacccaacccaacucgacugaagucagccucacugaaccggaucugagaaucuucucucucugggcuugccagggcucuccgaaccuagcuagcauccucuucaauuccaacuagaaagcuuaccauggagcugcucauccugaaggccaacgccaucaccaccauccugacggcggugaccuucugcuucgccagcggccagaacaucaccgaggaguucuaccaguccacgugcagcgccgucuccaagggguaccucagcgcccugcgcaccggcugguacaccuccgugaucaccaucgagcugagcaacaucaaggagaacaagugcaacgggaccgacgccaaggugaagcucaucaagcaggagcuggacaaguacaagaacgcggucacggagcugcagcuccugaugcaguccacccccgccaccggcagcggguccgccaucugcagcggcguggccgugugcaagguccugcaccucgagggcgaggugaacaagaucaaguccgcgcugcugagcaccaacaaggccguggucucccucagcaacgggguguccgugcugacguucaagguccuggaccucaagaacuacaucgacaagcagcugcugccgauccucaacaagcagagcugcuccaucagcaacaucgagaccgugaucgaguuccagcagaagaacaaccggcugcuggagaucacccgcgaguucuccgugaacgccggcgucaccacgcccgugagcaccuacaugcucaccaacagcgagcugcugucccucaucaacgacaugcccaucaccaacgaccagaagaagcugaugagcaacaacgugcagaucguccggcagcaguccuacagcaucaugugcaucaucaaggaggaggugcuggccuacgugguccagcucccccuguacggggugaucgacacgccgugcuggaagcugcacaccagcccccucugcaccaccaacacgaaggagggcuccaacaucugccugacccgcaccgaccgggggugguacugcgacaacgccggcuccgugagcuucuucccccaggcggagaccugcaagguccaguccaaccgcguguucugcgacacgaugaacagccggacccuccccuccgaggucaaccugugcaacguggacaucuucaacccgaaguacgacugcaagaucaugaccagcaagaccgacguguccagcuccgucaucacgagccugggcgccaucguguccugcuacgggaagaccaagugcaccgccagcaacaagaaccggggcaucaucaagaccuucuccaacgggugcgacuacgugagcaacaagggcgucgacacggugagcgugggcaacacccucuacugcgucaacaagcaggaggggaagucccuguacgugaagggcgagcccaucaucaacuucuacgacccccugguguuccccagcgacgaguucgacgccuccaucagccaggucaacgagaagaucaaccagucccucgccuucauccgcaagagcgacgagcugcugcacaacgugaacgcggggaaguccaccaccaacaucaugaucaccacgaucaucaucgugaucaucgucauccuccugagccugaucgccgugggccuccugcuguacugcaaggcccgguccaccccggugacccugagcaaggaccagcucuccgggaucaacaacaucgccuucagcaacugaggacuaguguccaccugucccuccugggcugcuggauugucucguuuuccugccaaauaaacaggaucagcgcuuuacagaucuaaaaaaaaaaaaaaaaaaaaaaaaaaaaaaaaaaaaaaaaaaaaaaaaaaaaaaaaaaaaaaaaugcaucccccccccccccccccccccccccccccccaaaggcucuuuucagagccaccagaauu

SEQ ID NO: 4927 - RNA, 1994 nt, Artificial Sequence
  mRNA product Design i-1 comprising derived and/or modified sequence from HRSV(A2)__F_DSCav1_mut4 (opt2)
gggagagggcgcuuggcuugcaaggacccugagcugcggcauugaagcacacccaacccaacucgacugaagucagccucacugaaccggaucugagaaucuucucucucugggcuugccagggcucuccgaaccuagcuagcauccucuucaauuccaacuagaaagcuuaccauggagcuccucauccucaaggccaacgccaucaccaccauccucaccgccgucaccuucugcuucgccuccggccagaacaucaccgaggaguucuaccaguccaccugcuccgccgucuccaagggcuaccucuccgcccuccgcaccggcugguacaccuccgucaucaccaucgagcucuccaacaucaaggagaacaagugcaacggcaccgacgccaaggucaagcucaucaagcaggagcucgacaaguacaagaacgccgucaccgagcuccagcuccucaugcaguccacccccgccaccggcuccggcuccgccaucugcuccggcgucgccgucugcaagguccuccaccucgagggcgaggucaacaagaucaaguccgcccuccucuccaccaacaaggccgucgucucccucuccaacggcgucuccguccucaccuucaagguccucgaccucaagaacuacaucgacaagcagcuccuccccauccucaacaagcaguccugcuccaucuccaacaucgagaccgucaucgaguuccagcagaagaacaaccgccuccucgagaucacccgcgaguucuccgucaacgccggcgucaccacccccgucuccaccuacaugcucaccaacuccgagcuccucucccucaucaacgacaugcccaucaccaacgaccagaagaagcucauguccaacaacguccagaucguccgccagcaguccuacuccaucaugugcaucaucaaggaggagguccucgccuacgucguccagcucccccucuacggcgucaucgacacccccugcuggaagcuccacaccuccccccucugcaccaccaacaccaaggagggcuccaacaucugccucacccgcaccgaccgcggcugguacugcgacaacgccggcuccgucuccuucuucccccaggccgagaccugcaagguccaguccaaccgcgucuucugcgacaccaugaacucccgcacccuccccuccgaggucaaccucugcaacgucgacaucuucaaccccaaguacgacugcaagaucaugaccuccaagaccgacgucuccuccuccgucaucaccucccucggcgccaucgucuccugcuacggcaagaccaagugcaccgccuccaacaagaaccgcggcaucaucaagaccuucuccaacggcugcgacuacgucuccaacaagggcgucgacaccgucuccgucggcaacacccucuacugcgucaacaagcaggagggcaagucccucuacgucaagggcgagcccaucaucaacuucuacgacccccucgucuuccccuccgacgaguucgacgccuccaucucccaggucaacgagaagaucaaccagucccucgccuucauccgcaaguccgacgagcuccuccacaacgucaacgccggcaaguccaccaccaacaucaugaucaccaccaucaucaucgucaucaucgucauccuccucucccucaucgccgucggccuccuccucuacugcaaggcccgcuccacccccgucacccucuccaaggaccagcucuccggcaucaacaacaucgccuucuccaacugaggacuaguguccaccugucccuccugggcugcuggauugucucguuuuccugccaaauaaacaggaucagcgcuuuacagaucuaaaaaaaaaaaaaaaaaaaaaaaaaaaaaaaaaaaaaaaaaaaaaaaaaaaaaaaaaaaaaaaaugcaucccccccccccccccccccccccccccccccaaaggcucuuuucagagccaccagaauu

SEQ ID NO: 4928 - RNA, 1994 nt, Artificial Sequence
  mRNA product Design i-1 comprising derived and/or modified sequence from HRSV(A2)__F_DSCav1_mut4 (opt3)
gggagagggcgcuuggcuugcaaggacccugagcugcggcauugaagcacacccaacccaacucgacugaagucagccucacugaaccggaucugagaaucuucucucucugggcuugccagggcucuccgaaccuagcuagcauccucuucaauuccaacuagaaagcuuaccauggagcugcucauccuuaaggccaacgcuauuaccacaauacugacugcagugacguucugcuuugccagcggccagaauaucaccgaagaguucuaccaauccacauguucugcggucucaaaaggguauuugagugcuuuaagaacuggaugguacaccagcguuauuacaaucgaacuguccaacauuaaggagaauaaaugcaacgguaccgacgccaaggugaaacuaaucaagcaggaacucgauaaguauaaaaaugcaguaacugagcugcagcuucugaugcagucuacacccgccaccggcucggggucagcuauauguagcggaguggcagucugcaagguguugcaccucgagggcgaaguuaacaaaaucaagagugcccugcuguccacgaauaaagcuguggucucucucagcaacgguguguccguauuaacuuuuaagguucuggaccuuaagaauuacauugauaaacaauugcugccuauccuaaacaagcagucauguaguauuagcaauaucgagaccgugauagaguuccagcagaaaaacaauaggcuccuggaaauuacacgggaguuuucugucaacgccggggugacuaccccaguguccacauauaugcuuaccaauucagaacuguugagccucaucaacgacaugccgauuacgaacgaucaaaagaaacugaugaguaauaacguccagaucguucgccagcagucuuacuccaucaugugcauuauaaaggaggaaguguuagcguauguagugcaacugccccucuacggagucaucgacacuccuuguuggaaacuucauacaagcccacugugcaccacuaauacaaaggagggcucgaacauuuguuugacccgaacggaucguggcugguacugcgacaaugcagggucuguguccuucuuuccccaggccgaaaccuguaagguucagucaaacagaguguucugcgauacaaugaauaguagaacucugccuagcgaggucaaccucugcaauguggacaucuuuaacccaaaauaugauuguaagauaaugaccuccaaaacagacguaucuagcucaguuauuaccagucugggagcuaucguguccugcuacgguaagacuaaauguacagccagcaauaagaacaggggcaucauuaagaccuucucuaaugggugcgauuaugucucaaacaaaggaguggacacugucagugugggcaauacgcuuuacuguguuaacaagcaagaggguaaaagccuguaugugaagggggaacccaucauuaacuuuuacgacccuuugguauucccauccgaugaguuugacgcaucuauaucgcaggucaaugagaaaaucaaccagagccucgcuuucauucggaaguccgaugaacuguuacacaaugugaacgccggaaagucaacaaccaauaucaugaucacuaccauuauaaucguuauuaucgugauucugcuaagucucaucgcggucggccugcuuuuguauugcaaagcccgcucuacaccggugacccugagcaaggaccagcucuccggcauaaacaauaucgcauucucaaacugaggacuaguguccaccugucccuccugggcugcuggauugucucguuuuccugccaaauaaacaggaucagcgcuuuacagaucuaaaaaaaaaaaaaaaaaaaaaaaaaaaaaaaaaaaaaaaaaaaaaaaaaaaaaaaaaaaaaaaaugcaucccccccccccccccccccccccccccccccaaaggcucuuuucagagccaccagaauu

SEQ ID NO: 4929 - RNA, 1994 nt, Artificial Sequence
  mRNA product Design i-1 comprising derived and/or modified sequence from HRSV(A2)__F_DSCav1_mut4 (opt4)
gggagagggcgcuuggcuugcaaggacccugagcugcggcauugaagcacacccaacccaacucgacugaagucagccucacugaaccggaucugagaaucuucucucucugggcuugccagggcucuccgaaccuagcuagcauccucuucaauuccaacuagaaagcuuaccauggagcugcugauccugaaggccaacgccaucaccaccauccugaccgccgugaccuucugcuucgccagcggccagaacaucaccgaggaguucuaccagagcaccugcagcgccgugagcaagggcuaccugagcgcccugagaaccggcugguacaccagcgugaucaccaucgagcugagcaacaucaaggagaacaagugcaacggcaccgacgccaaggugaagcugaucaagcaggagcuggacaaguacaagaacgccgugaccgagcugcagcugcugaugcagagcacccccgccaccggcagcggcagcgccaucugcagcggcguggccgugugcaaggugcugcaccuggagggcgaggugaacaagaucaagagcgcccugcugagcaccaacaaggccguggugagccugagcaacggcgugagcgugcugaccuucaaggugcuggaccugaagaacuacaucgacaagcagcugcugcccauccugaacaagcagagcugcagcaucagcaacaucgagaccgugaucgaguuccagcagaagaacaacagacugcuggagaucaccagagaguucagcgugaacgccggcgugaccacccccgugagcaccuacaugcugaccaacagcgagcugcugagccugaucaacgacaugcccaucaccaacgaccagaagaagcugaugagcaacaacgugcagaucgugagacagcagagcuacagcaucaugugcaucaucaaggaggaggugcuggccuacguggugcagcugccccuguacggcgugaucgacacccccugcuggaagcugcacaccagcccccugugcaccaccaacaccaaggagggcagcaacaucugccugaccagaaccgacagaggcugguacugcgacaacgccggcagcgugagcuucuucccccaggccgagaccugcaaggugcagagcaacagaguguucugcgacaccaugaacagcagaacccugcccagcgaggugaaccugugcaacguggacaucuucaaccccaaguacgacugcaagaucaugaccagcaagaccgacgugagcagcagcgugaucaccagccugggcgccaucgugagcugcuacggcaagaccaagugcaccgccagcaacaagaacagaggcaucaucaagaccuucagcaacggcugcgacuacgugagcaacaagggcguggacaccgugagcgugggcaacacccuguacugcgugaacaagcaggagggcaagagccuguacgugaagggcgagcccaucaucaacuucuacgacccccugguguuccccagcgacgaguucgacgccagcaucagccaggugaacgagaagaucaaccagagccuggccuucaucagaaagagcgacgagcugcugcacaacgugaacgccggcaagagcaccaccaacaucaugaucaccaccaucaucaucgugaucaucgugauccugcugagccugaucgccgugggccugcugcuguacugcaaggccagaagcacccccgugacccugagcaaggaccagcugagcggcaucaacaacaucgccuucagcaacugaggacuaguguccaccugucccuccugggcugcuggauugucucguuuuccugccaaauaaacaggaucagcgcuuuacagaucuaaaaaaaaaaaaaaaaaaaaaaaaaaaaaaaaaaaaaaaaaaaaaaaaaaaaaaaaaaaaaaaaugcaucccccccccccccccccccccccccccccccaaaggcucuuuucagagccaccagaauu

SEQ ID NO: 4930 - RNA, 1994 nt, Artificial Sequence
  mRNA product Design i-1 comprising derived and/or modified sequence from HRSV(A2)__F_DSCav1_mut4 (opt5)
gggagagggcgcuuggcuugcaaggacccugagcugcggcauugaagcacacccaacccaacucgacugaagucagccucacugaaccggaucugagaaucuucucucucugggcuugccagggcucuccgaaccuagcuagcauccucuucaauuccaacuagaaagcuuaccauggagcugcucauccugaaggccaacgcuauuaccacaauccuuacggccgugaccuucugcuuugcgagcggccagaauauuacagaagaguucuaccaauccaccuguucugcugucagcaaaggguaucuguccgcccucagaacaggaugguacaccucuguuaucacaauugaacugagcaacaucaaggagaauaaaugcaacggcaccgacgccaaggugaaacuuaucaagcaggaacuggauaaguauaaaaaugcugugacggagcuccagcugcugaugcaguccacccccgccacagggucuggaagcgcuauuuguuccggcgucgccgugugcaagguucuccaccuggagggggaagugaacaaaaucaagagcgcgcuucugucuaccaauaaagccgucgugucccucagcaacggaguuucugugcugacauuuaagguccuugaccugaagaauuacauugauaaacaacuccugccuauccugaacaagcaguccuguagcauuucuaauaucgagaccgugauugaguuccagcagaaaaacaaucggcuccuggaaaucacgcgcgaguuuuccgugaacgcuggcgucacaaccccgguuagcacauauaugcuuaccaauuccgaacugcucucucugaucaacgacaugcccauuaccaacgaucaaaagaaacuuaugagcaauaacgugcagaucgugagacagcaguccuacagcauuaugugcaucauuaaggaggaaguccuggccuaugugguucaacucccucuguacggcgugaucgacacacccuguuggaaacugcauacgucuccucucugcaccacaaauaccaaggagggguccaacaucugucugacacggaccgaucgcggaugguacugcgacaaugcuggcagcgucucuuucuuuccccaggccgaaacguguaaggugcagagcaacagaguuuucugcgauacaaugaacuccagaacccugccuucugaggugaaucucugcaaugucgacauuuuuaacccgaaauaugauuguaagaucaugaccagcaaaacagacguguccagcucugucauuaccucccugggggcgaucgugagcugcuacggaaagacaaaauguacggccucuaauaagaaccggggcauuaucaagaccuucuccaaugggugcgauuauguuagcaacaaaggaguggacacagucuccgugggcaauacccuuuacuguguuaacaagcaagagggcaaaucucuguaugugaagggggaacccaucauuaacuuuuacgacccucucgucuuccccagcgaugaguuugacgcuuccaucucucaggugaaugagaaaauuaaccagagccuggccuucauccgcaaguccgaugaacugcuccacaaugugaacgcuggaaagagcacaaccaauauuaugaucacgaccauuaucaucguuauuaucgucauucugcuuucucugaucgccgugggccuccugcuguauugcaaagccagauccacaccugugacccuuagcaaggaccagcucucugggauuaacaauaucgcuuucuccaacugaggacuaguguccaccugucccuccugggcugcuggauugucucguuuuccugccaaauaaacaggaucagcgcuuuacagaucuaaaaaaaaaaaaaaaaaaaaaaaaaaaaaaaaaaaaaaaaaaaaaaaaaaaaaaaaaaaaaaaaugcaucccccccccccccccccccccccccccccccaaaggcucuuuucagagccaccagaauu

SEQ ID NO: 4931 - RNA, 1994 nt, Artificial Sequence
  mRNA product Design i-1 comprising derived and/or modified sequence from HRSV(A2)__F_DSCav1_mut4 (opt6)
gggagagggcgcuuggcuugcaaggacccugagcugcggcauugaagcacacccaacccaacucgacugaagucagccucacugaaccggaucugagaaucuucucucucugggcuugccagggcucuccgaaccuagcuagcauccucuucaauuccaacuagaaagcuuaccauggaacuucuaauacucaaagccaacgcaauaacaacaauauuaacagccguaacauuuugcuucgcaucaggucaaaacauaacagaagaguucuaccaauccacaugcucagcaguaucaaaaggauauuuaagugcucuaagaacaggaugguacacauccguaauaacaaucgaacuaucaaacauaaaagaaaauaaauguaauggaacagacgccaaaguaaaauuaaucaaacaagaacuagacaaauacaaaaacgcaguuacugaauuacaauuauuaaugcaaucaacaccggccacaggaucuggaucagcaauaugcucaggaguagcagucugcaaaguauuacaccuagaaggggaaguuaauaaaaucaaaucagcauuacuauccaccaacaaagcgguaguuucacucuccaacggcguaucugucuuaacauucaaaguauuagaccuaaaaaacuacauugacaaacaacuacuaccaauccuaaacaaacaaucauguuccauaagcaauauagaaacaguaauagaauuucaacaaaaaaacaacagacuauuagaaauaacaagagaauuuuccgucaaugcaggaguuacuaccccugucuccaccuauaugcuaaccaauuccgaacucuuaucauuaauaaacgacaugccuaucacaaaugaccaaaaaaaauuaaugagcaacaacguacaaauaguacgacaacaaucauacucaaucaugugcauaauaaaagaagaaguccuagcauacguuguacaacuaccacuauacggagucauagauaccccaugcuggaaacuccauacaagcccacuaugcacuacaaacacaaaagaaggcucuaauauaugucuaacaagaacagaccgaggaugguacugcgauaaugccggcucagucucauucuuuccgcaagccgaaacuuguaaaguacaaaguaacagaguauuuugugacaccaugaacucaagaacccucccaagcgaagucaaucuaugcaacguugauauauucaaucccaaauacgacugcaaaaucaugaccucaaaaacagacgucagcucauccguuauaacaucacuaggagccaucguaucuugcuauggaaaaacaaaaugcacagcaagcaauaaaaacagaggcauaauaaaaacauucucaaauggaugcgacuacguaucaaacaaaggagucgacacaguuuccguaggaaacacuuuauacugcguaaacaaacaagaaggaaaaucauuauacgucaaaggugaaccaauaauaaacuucuacgauccacuuguauucccaucagacgaauuugacgcaucaauuucacaaguaaacgaaaaaauaaaccaaucacucgcauucauaagaaaaucagaugaacuacuacauaacguaaacgcaggaaaauccacaacaaacaucaugauaacaaccaucauaaucguaauaaucguaauacuauuaucccuaauugcaguaggauuacucuuauauugcaaagcaagaucaacaccaguaacccucaguaaagaccaacuauccggaauaaauaacaucgcauucucaaacuaaggacuaguguccaccugucccuccugggcugcuggauugucucguuuuccugccaaauaaacaggaucagcgcuuuacagaucuaaaaaaaaaaaaaaaaaaaaaaaaaaaaaaaaaaaaaaaaaaaaaaaaaaaaaaaaaaaaaaaaugcaucccccccccccccccccccccccccccccccaaaggcucuuuucagagccaccagaauu

SEQ ID NO: 4932 - RNA, 1994 nt, Artificial Sequence
  mRNA product Design i-1 comprising derived and/or modified sequence from HRSV(A2)__F_DSCav1_mut4 (opt11)
gggagagggcgcuuggcuugcaaggacccugagcugcggcauugaagcacacccaacccaacucgacugaagucagccucacugaaccggaucugagaaucuucucucucugggcuugccagggcucuccgaaccuagcuagcauccucuucaauuccaacuagaaagcuuaccauggaacugcucauccucaaagccaacgccaucaccaccauucuuaccgccgucacauucugcuucgccucaggccaaaacaucaccgaagaauuuuaccaauccacuuguucagccgucucaaaaggauaccuaucagcccuccguaccggcugguacaccucggucauaacaauagaacucuccaacauaaaagaaaacaaaugcaacggcaccgacgccaaggucaaacugauaaaacaagaacuugauaaauacaaaaacgccgucacugaacuccaacuccucaugcaauccacucccgcuacuggcucuggcuccgccaucugcucuggcgucgccgucuguaaaguacuccaccucgaaggggaagucaacaaaaucaaaucagcccuccuuagcaccaacaaggccgucgucucccucucaaacggagucagcguccucaccuucaagguccucgaccucaagaacuacaucgacaaacaacuccugcccauccuaaauaaacaauccugcucuaucuccaauaucgaaaccguuauagaguuccaacagaaaaacaaccgacuccucgaaaucacccgcgaguucuccgucaacgcaggcgucaccaccccugugucaaccuacaugcucaccaacagcgaacuacucucacucaucaaugacaugcccaucaccaacgaccaaaagaaacucauguccaacaacguccaaaucguacgucaacaauccuacagcaucaugugcaucauaaaagaagaaguccucgccuacgucguccaacuuccccucuacggcgucauagacacccccugcuggaaacugcauaccucaccccuaugcaccaccaacacuaaagaaggcuccaacaucugccucacccgcacggaccgcggcugguacugcgacaacgccggcuccgucuccuucuucccccaagccgaaacuuguaaaguccaauccaacagagucuucugcgacaccaugaacucuagaacgcugccauccgagguaaaccuaugcaacgucgacaucuucaaucccaaauacgacugcaagaucaugaccucaaaaaccgacguauccuccucaguaaucaccagucucggagcuaucgucuccugcuacggcaaaaccaaaugcacggccucuaacaaaaaccgcggcaucaucaaaaccuucucaaacggaugcgacuacgucagcaacaaaggcguagauaccgucucugucggcaacacacuguacugcguaaacaagcaagaaggaaaaucccucuacguaaaaggcgaacccaucaucaacuucuacgacccccucguuuuccccucagaugaauuugacgccucgauaucacaagucaacgaaaagauaaaucagucccucgccuucauccgaaaauccgacgaacuccuccacaacguuaacgcaggaaaguccaccacaaacaucaugauaacuacaaucauaauagucauuaucgucauacuccucucccuaaucgccguaggccugcuacucuacugcaaagcccgcucaacccccgucacucucucaaaagaccaacucuccggcaucaauaacaucgccuucucaaacuaaggacuaguguccaccugucccuccugggcugcuggauugucucguuuuccugccaaauaaacaggaucagcgcuuuacagaucuaaaaaaaaaaaaaaaaaaaaaaaaaaaaaaaaaaaaaaaaaaaaaaaaaaaaaaaaaaaaaaaaugcaucccccccccccccccccccccccccccccccaaaggcucuuuucagagccaccagaauu

SEQ ID NO: 4933 - RNA, 1994 nt, Artificial Sequence
  mRNA product Design i-2 comprising derived and/or modified sequence from HRSV(A2)__F_DSCav1_mut4 (opt1)
gggagaggcgcugccuacggagguggcagccaucuccuucucggcaucaagcuuaccauggagcugcucauccugaaggccaacgccaucaccaccauccugacggcggugaccuucugcuucgccagcggccagaacaucaccgaggaguucuaccaguccacgugcagcgccgucuccaagggguaccucagcgcccugcggaccggcugguacaccuccgugaucaccaucgagcugagcaacaucaaggagaacaagugcaacgggaccgacgccaaggugaagcucaucaagcaggagcuggacaaguacaagaacgcggucacggagcugcagcuccugaugcaguccaccccggcaaccggcuccggcuccgccaucugcagcggcgucgccgugugcaaggugcugcaccucgagggggaggucaacaagaucaagagcgcccugcuguccaccaacaaggccguggugagccucuccaacggcgucagcgugcugaccuucaaggugcuggaccucaagaacuacaucgacaagcagcugcugcccauccugaacaagcagagcugcuccaucagcaacaucgagacggugaucgaguuccagcagaagaacaaccggcuccuggagaucacccgcgaguucagcgugaacgccggggucaccacccccguguccacguacaugcugaccaacagcgagcuccugucccugaucaacgacaugccgaucaccaacgaccagaagaagcucaugagcaacaacgugcagaucguccggcagcaguccuacagcaucaugugcaucaucaaggaggaggugcuggcguacgugguccagcugccccucuacggcgugaucgacacccccugcuggaagcugcacacgagcccccugugcaccaccaacaccaaggagggguccaacaucugccucacgcgcaccgaccggggcugguacugcgacaacgccggcagcgucuccuucuucccgcaggccgagaccugcaaggugcagagcaaccgcguguucugcgacaccaugaacucccggacgcugcccagcgagguaaaccucugcaacgucgacaucuucaaccccaaguacgacugcaagaucaugaccuccaagaccgacgugagcuccagcgugaucaccucccugggggccaucgucagcugcuacggcaagacgaagugcaccgccagcaacaagaaccgggggaucaucaagaccuucuccaacggcugcgacuacgugagcaacaagggcguggacaccguguccgucgggaacacccuguacugcgugaacaagcaggagggcaagagccucuacgugaagggggagcccaucaucaacuucuacgacccgcuggucuuccccuccgacgaguucgacgcgagcaucucccaggugaacgagaagaucaaccagagccuggccuucauccgcaaguccgacgagcugcuccacaacgugaacgccggcaagagcacgaccaacaucaugaucaccaccaucaucaucgucaucaucgugauccugcugucccucaucgccguggggcugcugcucuacugcaaggcccggagcacgcccgucacccuguccaaggaccagcugagcggcaucaacaacaucgcguucuccaacugaggacuagugcaucacauuuaaaagcaucucagccuaccaugagaauaagagaaagaaaaugaagaucaauagcuuauucaucucuuuuucuuuuucguugguguaaagccaacacccugucuaaaaaacauaaauuucuuuaaucauuuugccucuuuucucugugcuucaauuaauaaaaaauggaaagaaccuagaucuaaaaaaaaaaaaaaaaaaaaaaaaaaaaaaaaaaaaaaaaaaaaaaaaaaaaaaaaaaaaaaaaugcaucccccccccccccccccccccccccccccccaaaggcucuuuucagagccaccagaauu

SEQ ID NO: 4934 - RNA, 1994 nt, Artificial Sequence
  mRNA product Design i-2 comprising derived and/or modified sequence from HRSV(A2)__F_DSCav1_mut4 (opt1)
gggagaggcgcugccuacggagguggcagccaucuccuucucggcaucaagcuuaccauggagcugcucauccugaaggccaacgccaucaccaccauccugacggcggugaccuucugcuucgccagcggccagaacaucaccgaggaguucuaccaguccacgugcagcgccgucuccaagggguaccucagcgcccugcgcaccggcugguacaccuccgugaucaccaucgagcugagcaacaucaaggagaacaagugcaacgggaccgacgccaaggugaagcucaucaagcaggagcuggacaaguacaagaacgcggucacggagcugcagcuccugaugcaguccacccccgccaccggcagcggguccgccaucugcagcggcguggccgugugcaagguccugcaccucgagggcgaggugaacaagaucaaguccgcgcugcugagcaccaacaaggccguggucucccucagcaacgggguguccgugcugacguucaagguccuggaccucaagaacuacaucgacaagcagcugcugccgauccucaacaagcagagcugcuccaucagcaacaucgagaccgugaucgaguuccagcagaagaacaaccggcugcuggagaucacccgcgaguucuccgugaacgccggcgucaccacgcccgugagcaccuacaugcucaccaacagcgagcugcugucccucaucaacgacaugcccaucaccaacgaccagaagaagcugaugagcaacaacgugcagaucguccggcagcaguccuacagcaucaugugcaucaucaaggaggaggugcuggccuacgugguccagcucccccuguacggggugaucgacacgccgugcuggaagcugcacaccagcccccucugcaccaccaacacgaaggagggcuccaacaucugccugacccgcaccgaccgggggugguacugcgacaacgccggcuccgugagcuucuucccccaggcggagaccugcaagguccaguccaaccgcguguucugcgacacgaugaacagccggacccuccccuccgaggucaaccugugcaacguggacaucuucaacccgaaguacgacugcaagaucaugaccagcaagaccgacguguccagcuccgucaucacgagccugggcgccaucguguccugcuacgggaagaccaagugcaccgccagcaacaagaaccggggcaucaucaagaccuucuccaacgggugcgacuacgugagcaacaagggcgucgacacggugagcgugggcaacacccucuacugcgucaacaagcaggaggggaagucccuguacgugaagggcgagcccaucaucaacuucuacgacccccugguguuccccagcgacgaguucgacgccuccaucagccaggucaacgagaagaucaaccagucccucgccuucauccgcaagagcgacgagcugcugcacaacgugaacgcggggaaguccaccaccaacaucaugaucaccacgaucaucaucgugaucaucgucauccuccugagccugaucgccgugggccuccugcuguacugcaaggcccgguccaccccggugacccugagcaaggaccagcucuccgggaucaacaacaucgccuucagcaacugaggacuagugcaucacauuuaaaagcaucucagccuaccaugagaauaagagaaagaaaaugaagaucaauagcuuauucaucucuuuuucuuuuucguugguguaaagccaacacccugucuaaaaaacauaaauuucuuuaaucauuuugccucuuuucucugugcuucaauuaauaaaaaauggaaagaaccuagaucuaaaaaaaaaaaaaaaaaaaaaaaaaaaaaaaaaaaaaaaaaaaaaaaaaaaaaaaaaaaaaaaaugcaucccccccccccccccccccccccccccccccaaaggcucuuuucagagccaccagaauu

SEQ ID NO: 4935 - RNA, 1994 nt, Artificial Sequence
  mRNA product Design i-2 comprising derived and/or modified sequence from HRSV(A2)__F_DSCav1_mut4 (opt2)
gggagaggcgcugccuacggagguggcagccaucuccuucucggcaucaagcuuaccauggagcuccucauccucaaggccaacgccaucaccaccauccucaccgccgucaccuucugcuucgccuccggccagaacaucaccgaggaguucuaccaguccaccugcuccgccgucuccaagggcuaccucuccgcccuccgcaccggcugguacaccuccgucaucaccaucgagcucuccaacaucaaggagaacaagugcaacggcaccgacgccaaggucaagcucaucaagcaggagcucgacaaguacaagaacgccgucaccgagcuccagcuccucaugcaguccacccccgccaccggcuccggcuccgccaucugcuccggcgucgccgucugcaagguccuccaccucgagggcgaggucaacaagaucaaguccgcccuccucuccaccaacaaggccgucgucucccucuccaacggcgucuccguccucaccuucaagguccucgaccucaagaacuacaucgacaagcagcuccuccccauccucaacaagcaguccugcuccaucuccaacaucgagaccgucaucgaguuccagcagaagaacaaccgccuccucgagaucacccgcgaguucuccgucaacgccggcgucaccacccccgucuccaccuacaugcucaccaacuccgagcuccucucccucaucaacgacaugcccaucaccaacgaccagaagaagcucauguccaacaacguccagaucguccgccagcaguccuacuccaucaugugcaucaucaaggaggagguccucgccuacgucguccagcucccccucuacggcgucaucgacacccccugcuggaagcuccacaccuccccccucugcaccaccaacaccaaggagggcuccaacaucugccucacccgcaccgaccgcggcugguacugcgacaacgccggcuccgucuccuucuucccccaggccgagaccugcaagguccaguccaaccgcgucuucugcgacaccaugaacucccgcacccuccccuccgaggucaaccucugcaacgucgacaucuucaaccccaaguacgacugcaagaucaugaccuccaagaccgacgucuccuccuccgucaucaccucccucggcgccaucgucuccugcuacggcaagaccaagugcaccgccuccaacaagaaccgcggcaucaucaagaccuucuccaacggcugcgacuacgucuccaacaagggcgucgacaccgucuccgucggcaacacccucuacugcgucaacaagcaggagggcaagucccucuacgucaagggcgagcccaucaucaacuucuacgacccccucgucuuccccuccgacgaguucgacgccuccaucucccaggucaacgagaagaucaaccagucccucgccuucauccgcaaguccgacgagcuccuccacaacgucaacgccggcaaguccaccaccaacaucaugaucaccaccaucaucaucgucaucaucgucauccuccucucccucaucgccgucggccuccuccucuacugcaaggcccgcuccacccccgucacccucuccaaggaccagcucuccggcaucaacaacaucgccuucuccaacugaggacuagugcaucacauuuaaaagcaucucagccuaccaugagaauaagagaaagaaaaugaagaucaauagcuuauucaucucuuuuucuuuuucguugguguaaagccaacacccugucuaaaaaacauaaauuucuuuaaucauuuugccucuuuucucugugcuucaauuaauaaaaaauggaaagaaccuagaucuaaaaaaaaaaaaaaaaaaaaaaaaaaaaaaaaaaaaaaaaaaaaaaaaaaaaaaaaaaaaaaaaugcaucccccccccccccccccccccccccccccccaaaggcucuuuucagagccaccagaauu

SEQ ID NO: 4936 - RNA, 1994 nt, Artificial Sequence
  mRNA product Design i-2 comprising derived and/or modified sequence from HRSV(A2)__F_DSCav1_mut4 (opt3)
gggagaggcgcugccuacggagguggcagccaucuccuucucggcaucaagcuuaccauggagcugcucauccuuaaggccaacgcuauuaccacaauacugacugcagugacguucugcuuugccagcggccagaauaucaccgaagaguucuaccaauccacauguucugcggucucaaaaggguauuugagugcuuuaagaacuggaugguacaccagcguuauuacaaucgaacuguccaacauuaaggagaauaaaugcaacgguaccgacgccaaggugaaacuaaucaagcaggaacucgauaaguauaaaaaugcaguaacugagcugcagcuucugaugcagucuacacccgccaccggcucggggucagcuauauguagcggaguggcagucugcaagguguugcaccucgagggcgaaguuaacaaaaucaagagugcccugcuguccacgaauaaagcuguggucucucucagcaacgguguguccguauuaacuuuuaagguucuggaccuuaagaauuacauugauaaacaauugcugccuauccuaaacaagcagucauguaguauuagcaauaucgagaccgugauagaguuccagcagaaaaacaauaggcuccuggaaauuacacgggaguuuucugucaacgccggggugacuaccccaguguccacauauaugcuuaccaauucagaacuguugagccucaucaacgacaugccgauuacgaacgaucaaaagaaacugaugaguaauaacguccagaucguucgccagcagucuuacuccaucaugugcauuauaaaggaggaaguguuagcguauguagugcaacugccccucuacggagucaucgacacuccuuguuggaaacuucauacaagcccacugugcaccacuaauacaaaggagggcucgaacauuuguuugacccgaacggaucguggcugguacugcgacaaugcagggucuguguccuucuuuccccaggccgaaaccuguaagguucagucaaacagaguguucugcgauacaaugaauaguagaacucugccuagcgaggucaaccucugcaauguggacaucuuuaacccaaaauaugauuguaagauaaugaccuccaaaacagacguaucuagcucaguuauuaccagucugggagcuaucguguccugcuacgguaagacuaaauguacagccagcaauaagaacaggggcaucauuaagaccuucucuaaugggugcgauuaugucucaaacaaaggaguggacacugucagugugggcaauacgcuuuacuguguuaacaagcaagaggguaaaagccuguaugugaagggggaacccaucauuaacuuuuacgacccuuugguauucccauccgaugaguuugacgcaucuauaucgcaggucaaugagaaaaucaaccagagccucgcuuucauucggaaguccgaugaacuguuacacaaugugaacgccggaaagucaacaaccaauaucaugaucacuaccauuauaaucguuauuaucgugauucugcuaagucucaucgcggucggccugcuuuuguauugcaaagcccgcucuacaccggugacccugagcaaggaccagcucuccggcauaaacaauaucgcauucucaaacugaggacuagugcaucacauuuaaaagcaucucagccuaccaugagaauaagagaaagaaaaugaagaucaauagcuuauucaucucuuuuucuuuuucguugguguaaagccaacacccugucuaaaaaacauaaauuucuuuaaucauuuugccucuuuucucugugcuucaauuaauaaaaaauggaaagaaccuagaucuaaaaaaaaaaaaaaaaaaaaaaaaaaaaaaaaaaaaaaaaaaaaaaaaaaaaaaaaaaaaaaaaugcaucccccccccccccccccccccccccccccccaaaggcucuuuucagagccaccagaauu

SEQ ID NO: 4937 - RNA, 1994 nt, Artificial Sequence
  mRNA product Design i-2 comprising derived and/or modified sequence from HRSV(A2)__F_DSCav1_mut4 (opt4)
gggagaggcgcugccuacggagguggcagccaucuccuucucggcaucaagcuuaccauggagcugcugauccugaaggccaacgccaucaccaccauccugaccgccgugaccuucugcuucgccagcggccagaacaucaccgaggaguucuaccagagcaccugcagcgccgugagcaagggcuaccugagcgcccugagaaccggcugguacaccagcgugaucaccaucgagcugagcaacaucaaggagaacaagugcaacggcaccgacgccaaggugaagcugaucaagcaggagcuggacaaguacaagaacgccgugaccgagcugcagcugcugaugcagagcacccccgccaccggcagcggcagcgccaucugcagcggcguggccgugugcaaggugcugcaccuggagggcgaggugaacaagaucaagagcgcccugcugagcaccaacaaggccguggugagccugagcaacggcgugagcgugcugaccuucaaggugcuggaccugaagaacuacaucgacaagcagcugcugcccauccugaacaagcagagcugcagcaucagcaacaucgagaccgugaucgaguuccagcagaagaacaacagacugcuggagaucaccagagaguucagcgugaacgccggcgugaccacccccgugagcaccuacaugcugaccaacagcgagcugcugagccugaucaacgacaugcccaucaccaacgaccagaagaagcugaugagcaacaacgugcagaucgugagacagcagagcuacagcaucaugugcaucaucaaggaggaggugcuggccuacguggugcagcugccccuguacggcgugaucgacacccccugcuggaagcugcacaccagcccccugugcaccaccaacaccaaggagggcagcaacaucugccugaccagaaccgacagaggcugguacugcgacaacgccggcagcgugagcuucuucccccaggccgagaccugcaaggugcagagcaacagaguguucugcgacaccaugaacagcagaacccugcccagcgaggugaaccugugcaacguggacaucuucaaccccaaguacgacugcaagaucaugaccagcaagaccgacgugagcagcagcgugaucaccagccugggcgccaucgugagcugcuacggcaagaccaagugcaccgccagcaacaagaacagaggcaucaucaagaccuucagcaacggcugcgacuacgugagcaacaagggcguggacaccgugagcgugggcaacacccuguacugcgugaacaagcaggagggcaagagccuguacgugaagggcgagcccaucaucaacuucuacgacccccugguguuccccagcgacgaguucgacgccagcaucagccaggugaacgagaagaucaaccagagccuggccuucaucagaaagagcgacgagcugcugcacaacgugaacgccggcaagagcaccaccaacaucaugaucaccaccaucaucaucgugaucaucgugauccugcugagccugaucgccgugggccugcugcuguacugcaaggccagaagcacccccgugacccugagcaaggaccagcugagcggcaucaacaacaucgccuucagcaacugaggacuagugcaucacauuuaaaagcaucucagccuaccaugagaauaagagaaagaaaaugaagaucaauagcuuauucaucucuuuuucuuuuucguugguguaaagccaacacccugucuaaaaaacauaaauuucuuuaaucauuuugccucuuuucucugugcuucaauuaauaaaaaauggaaagaaccuagaucuaaaaaaaaaaaaaaaaaaaaaaaaaaaaaaaaaaaaaaaaaaaaaaaaaaaaaaaaaaaaaaaaugcaucccccccccccccccccccccccccccccccaaaggcucuuuucagagccaccagaauu

SEQ ID NO: 4938 - RNA, 1994 nt, Artificial Sequence
  mRNA product Design i-2 comprising derived and/or modified sequence from HRSV(A2)__F_DSCav1_mut4 (opt5)
gggagaggcgcugccuacggagguggcagccaucuccuucucggcaucaagcuuaccauggagcugcucauccugaaggccaacgcuauuaccacaauccuuacggccgugaccuucugcuuugcgagcggccagaauauuacagaagaguucuaccaauccaccuguucugcugucagcaaaggguaucuguccgcccucagaacaggaugguacaccucuguuaucacaauugaacugagcaacaucaaggagaauaaaugcaacggcaccgacgccaaggugaaacuuaucaagcaggaacuggauaaguauaaaaaugcugugacggagcuccagcugcugaugcaguccacccccgccacagggucuggaagcgcuauuuguuccggcgucgccgugugcaagguucuccaccuggagggggaagugaacaaaaucaagagcgcgcuucugucuaccaauaaagccgucgugucccucagcaacggaguuucugugcugacauuuaagguccuugaccugaagaauuacauugauaaacaacuccugccuauccugaacaagcaguccuguagcauuucuaauaucgagaccgugauugaguuccagcagaaaaacaaucggcuccuggaaaucacgcgcgaguuuuccgugaacgcuggcgucacaaccccgguuagcacauauaugcuuaccaauuccgaacugcucucucugaucaacgacaugcccauuaccaacgaucaaaagaaacuuaugagcaauaacgugcagaucgugagacagcaguccuacagcauuaugugcaucauuaaggaggaaguccuggccuaugugguucaacucccucuguacggcgugaucgacacacccuguuggaaacugcauacgucuccucucugcaccacaaauaccaaggagggguccaacaucugucugacacggaccgaucgcggaugguacugcgacaaugcuggcagcgucucuuucuuuccccaggccgaaacguguaaggugcagagcaacagaguuuucugcgauacaaugaacuccagaacccugccuucugaggugaaucucugcaaugucgacauuuuuaacccgaaauaugauuguaagaucaugaccagcaaaacagacguguccagcucugucauuaccucccugggggcgaucgugagcugcuacggaaagacaaaauguacggccucuaauaagaaccggggcauuaucaagaccuucuccaaugggugcgauuauguuagcaacaaaggaguggacacagucuccgugggcaauacccuuuacuguguuaacaagcaagagggcaaaucucuguaugugaagggggaacccaucauuaacuuuuacgacccucucgucuuccccagcgaugaguuugacgcuuccaucucucaggugaaugagaaaauuaaccagagccuggccuucauccgcaaguccgaugaacugcuccacaaugugaacgcuggaaagagcacaaccaauauuaugaucacgaccauuaucaucguuauuaucgucauucugcuuucucugaucgccgugggccuccugcuguauugcaaagccagauccacaccugugacccuuagcaaggaccagcucucugggauuaacaauaucgcuuucuccaacugaggacuagugcaucacauuuaaaagcaucucagccuaccaugagaauaagagaaagaaaaugaagaucaauagcuuauucaucucuuuuucuuuuucguugguguaaagccaacacccugucuaaaaaacauaaauuucuuuaaucauuuugccucuuuucucugugcuucaauuaauaaaaaauggaaagaaccuagaucuaaaaaaaaaaaaaaaaaaaaaaaaaaaaaaaaaaaaaaaaaaaaaaaaaaaaaaaaaaaaaaaaugcaucccccccccccccccccccccccccccccccaaaggcucuuuucagagccaccagaauu

SEQ ID NO: 4939 - RNA, 1994 nt, Artificial Sequence
  mRNA product Design i-2 comprising derived and/or modified sequence from HRSV(A2)__F_DSCav1_mut4 (opt6)
gggagaggcgcugccuacggagguggcagccaucuccuucucggcaucaagcuuaccauggaacuucuaauacucaaagccaacgcaauaacaacaauauuaacagccguaacauuuugcuucgcaucaggucaaaacauaacagaagaguucuaccaauccacaugcucagcaguaucaaaaggauauuuaagugcucuaagaacaggaugguacacauccguaauaacaaucgaacuaucaaacauaaaagaaaauaaauguaauggaacagacgccaaaguaaaauuaaucaaacaagaacuagacaaauacaaaaacgcaguuacugaauuacaauuauuaaugcaaucaacaccggccacaggaucuggaucagcaauaugcucaggaguagcagucugcaaaguauuacaccuagaaggggaaguuaauaaaaucaaaucagcauuacuauccaccaacaaagcgguaguuucacucuccaacggcguaucugucuuaacauucaaaguauuagaccuaaaaaacuacauugacaaacaacuacuaccaauccuaaacaaacaaucauguuccauaagcaauauagaaacaguaauagaauuucaacaaaaaaacaacagacuauuagaaauaacaagagaauuuuccgucaaugcaggaguuacuaccccugucuccaccuauaugcuaaccaauuccgaacucuuaucauuaauaaacgacaugccuaucacaaaugaccaaaaaaaauuaaugagcaacaacguacaaauaguacgacaacaaucauacucaaucaugugcauaauaaaagaagaaguccuagcauacguuguacaacuaccacuauacggagucauagauaccccaugcuggaaacuccauacaagcccacuaugcacuacaaacacaaaagaaggcucuaauauaugucuaacaagaacagaccgaggaugguacugcgauaaugccggcucagucucauucuuuccgcaagccgaaacuuguaaaguacaaaguaacagaguauuuugugacaccaugaacucaagaacccucccaagcgaagucaaucuaugcaacguugauauauucaaucccaaauacgacugcaaaaucaugaccucaaaaacagacgucagcucauccguuauaacaucacuaggagccaucguaucuugcuauggaaaaacaaaaugcacagcaagcaauaaaaacagaggcauaauaaaaacauucucaaauggaugcgacuacguaucaaacaaaggagucgacacaguuuccguaggaaacacuuuauacugcguaaacaaacaagaaggaaaaucauuauacgucaaaggugaaccaauaauaaacuucuacgauccacuuguauucccaucagacgaauuugacgcaucaauuucacaaguaaacgaaaaaauaaaccaaucacucgcauucauaagaaaaucagaugaacuacuacauaacguaaacgcaggaaaauccacaacaaacaucaugauaacaaccaucauaaucguaauaaucguaauacuauuaucccuaauugcaguaggauuacucuuauauugcaaagcaagaucaacaccaguaacccucaguaaagaccaacuauccggaauaaauaacaucgcauucucaaacuaaggacuagugcaucacauuuaaaagcaucucagccuaccaugagaauaagagaaagaaaaugaagaucaauagcuuauucaucucuuuuucuuuuucguugguguaaagccaacacccugucuaaaaaacauaaauuucuuuaaucauuuugccucuuuucucugugcuucaauuaauaaaaaauggaaagaaccuagaucuaaaaaaaaaaaaaaaaaaaaaaaaaaaaaaaaaaaaaaaaaaaaaaaaaaaaaaaaaaaaaaaaugcaucccccccccccccccccccccccccccccccaaaggcucuuuucagagccaccagaauu

SEQ ID NO: 4940 - RNA, 1994 nt, Artificial Sequence
  mRNA product Design i-2 comprising derived and/or modified sequence from HRSV(A2)__F_DSCav1_mut4 (opt11)
gggagaggcgcugccuacggagguggcagccaucuccuucucggcaucaagcuuaccauggaacugcucauccucaaagccaacgccaucaccaccauucuuaccgccgucacauucugcuucgccucaggccaaaacaucaccgaagaauuuuaccaauccacuuguucagccgucucaaaaggauaccuaucagcccuccguaccggcugguacaccucggucauaacaauagaacucuccaacauaaaagaaaacaaaugcaacggcaccgacgccaaggucaaacugauaaaacaagaacuugauaaauacaaaaacgccgucacugaacuccaacuccucaugcaauccacucccgcuacuggcucuggcuccgccaucugcucuggcgucgccgucuguaaaguacuccaccucgaaggggaagucaacaaaaucaaaucagcccuccuuagcaccaacaaggccgucgucucccucucaaacggagucagcguccucaccuucaagguccucgaccucaagaacuacaucgacaaacaacuccugcccauccuaaauaaacaauccugcucuaucuccaauaucgaaaccguuauagaguuccaacagaaaaacaaccgacuccucgaaaucacccgcgaguucuccgucaacgcaggcgucaccaccccugugucaaccuacaugcucaccaacagcgaacuacucucacucaucaaugacaugcccaucaccaacgaccaaaagaaacucauguccaacaacguccaaaucguacgucaacaauccuacagcaucaugugcaucauaaaagaagaaguccucgccuacgucguccaacuuccccucuacggcgucauagacacccccugcuggaaacugcauaccucaccccuaugcaccaccaacacuaaagaaggcuccaacaucugccucacccgcacggaccgcggcugguacugcgacaacgccggcuccgucuccuucuucccccaagccgaaacuuguaaaguccaauccaacagagucuucugcgacaccaugaacucuagaacgcugccauccgagguaaaccuaugcaacgucgacaucuucaaucccaaauacgacugcaagaucaugaccucaaaaaccgacguauccuccucaguaaucaccagucucggagcuaucgucuccugcuacggcaaaaccaaaugcacggccucuaacaaaaaccgcggcaucaucaaaaccuucucaaacggaugcgacuacgucagcaacaaaggcguagauaccgucucugucggcaacacacuguacugcguaaacaagcaagaaggaaaaucccucuacguaaaaggcgaacccaucaucaacuucuacgacccccucguuuuccccucagaugaauuugacgccucgauaucacaagucaacgaaaagauaaaucagucccucgccuucauccgaaaauccgacgaacuccuccacaacguuaacgcaggaaaguccaccacaaacaucaugauaacuacaaucauaauagucauuaucgucauacuccucucccuaaucgccguaggccugcuacucuacugcaaagcccgcucaacccccgucacucucucaaaagaccaacucuccggcaucaauaacaucgccuucucaaacuaaggacuagugcaucacauuuaaaagcaucucagccuaccaugagaauaagagaaagaaaaugaagaucaauagcuuauucaucucuuuuucuuuuucguugguguaaagccaacacccugucuaaaaaacauaaauuucuuuaaucauuuugccucuuuucucugugcuucaauuaauaaaaaauggaaagaaccuagaucuaaaaaaaaaaaaaaaaaaaaaaaaaaaaaaaaaaaaaaaaaaaaaaaaaaaaaaaaaaaaaaaaugcaucccccccccccccccccccccccccccccccaaaggcucuuuucagagccaccagaauu

SEQ ID NO: 4941 - RNA, 1990 nt, Artificial Sequence
  mRNA product Design i-2 comprising derived and/or modified sequence from HRSV(A2)__F_DSCav1_mut4 (opt1)
ggggcgcugccuacggagguggcagccaucuccuucucggcaucaagcuuaccauggagcugcucauccugaaggccaacgccaucaccaccauccugacggcggugaccuucugcuucgccagcggccagaacaucaccgaggaguucuaccaguccacgugcagcgccgucuccaagggguaccucagcgcccugcggaccggcugguacaccuccgugaucaccaucgagcugagcaacaucaaggagaacaagugcaacgggaccgacgccaaggugaagcucaucaagcaggagcuggacaaguacaagaacgcggucacggagcugcagcuccugaugcaguccaccccggcaaccggcuccggcuccgccaucugcagcggcgucgccgugugcaaggugcugcaccucgagggggaggucaacaagaucaagagcgcccugcuguccaccaacaaggccguggugagccucuccaacggcgucagcgugcugaccuucaaggugcuggaccucaagaacuacaucgacaagcagcugcugcccauccugaacaagcagagcugcuccaucagcaacaucgagacggugaucgaguuccagcagaagaacaaccggcuccuggagaucacccgcgaguucagcgugaacgccggggucaccacccccguguccacguacaugcugaccaacagcgagcuccugucccugaucaacgacaugccgaucaccaacgaccagaagaagcucaugagcaacaacgugcagaucguccggcagcaguccuacagcaucaugugcaucaucaaggaggaggugcuggcguacgugguccagcugccccucuacggcgugaucgacacccccugcuggaagcugcacacgagcccccugugcaccaccaacaccaaggagggguccaacaucugccucacgcgcaccgaccggggcugguacugcgacaacgccggcagcgucuccuucuucccgcaggccgagaccugcaaggugcagagcaaccgcguguucugcgacaccaugaacucccggacgcugcccagcgagguaaaccucugcaacgucgacaucuucaaccccaaguacgacugcaagaucaugaccuccaagaccgacgugagcuccagcgugaucaccucccugggggccaucgucagcugcuacggcaagacgaagugcaccgccagcaacaagaaccgggggaucaucaagaccuucuccaacggcugcgacuacgugagcaacaagggcguggacaccguguccgucgggaacacccuguacugcgugaacaagcaggagggcaagagccucuacgugaagggggagcccaucaucaacuucuacgacccgcuggucuuccccuccgacgaguucgacgcgagcaucucccaggugaacgagaagaucaaccagagccuggccuucauccgcaaguccgacgagcugcuccacaacgugaacgccggcaagagcacgaccaacaucaugaucaccaccaucaucaucgucaucaucgugauccugcugucccucaucgccguggggcugcugcucuacugcaaggcccggagcacgcccgucacccuguccaaggaccagcugagcggcaucaacaacaucgcguucuccaacugaggacuagugcaucacauuuaaaagcaucucagccuaccaugagaauaagagaaagaaaaugaagaucaauagcuuauucaucucuuuuucuuuuucguugguguaaagccaacacccugucuaaaaaacauaaauuucuuuaaucauuuugccucuuuucucugugcuucaauuaauaaaaaauggaaagaaccuagaucuaaaaaaaaaaaaaaaaaaaaaaaaaaaaaaaaaaaaaaaaaaaaaaaaaaaaaaaaaaaaaaaaugcaucccccccccccccccccccccccccccccccaaaggcucuuuucagagccaccagaauu

SEQ ID NO: 4942 - RNA, 1990 nt, Artificial Sequence
  mRNA product Design i-2 comprising derived and/or modified sequence from HRSV(A2)__F_DSCav1_mut4 (opt1)
ggggcgcugccuacggagguggcagccaucuccuucucggcaucaagcuuaccauggagcugcucauccugaaggccaacgccaucaccaccauccugacggcggugaccuucugcuucgccagcggccagaacaucaccgaggaguucuaccaguccacgugcagcgccgucuccaagggguaccucagcgcccugcgcaccggcugguacaccuccgugaucaccaucgagcugagcaacaucaaggagaacaagugcaacgggaccgacgccaaggugaagcucaucaagcaggagcuggacaaguacaagaacgcggucacggagcugcagcuccugaugcaguccacccccgccaccggcagcggguccgccaucugcagcggcguggccgugugcaagguccugcaccucgagggcgaggugaacaagaucaaguccgcgcugcugagcaccaacaaggccguggucucccucagcaacgggguguccgugcugacguucaagguccuggaccucaagaacuacaucgacaagcagcugcugccgauccucaacaagcagagcugcuccaucagcaacaucgagaccgugaucgaguuccagcagaagaacaaccggcugcuggagaucacccgcgaguucuccgugaacgccggcgucaccacgcccgugagcaccuacaugcucaccaacagcgagcugcugucccucaucaacgacaugcccaucaccaacgaccagaagaagcugaugagcaacaacgugcagaucguccggcagcaguccuacagcaucaugugcaucaucaaggaggaggugcuggccuacgugguccagcucccccuguacggggugaucgacacgccgugcuggaagcugcacaccagcccccucugcaccaccaacacgaaggagggcuccaacaucugccugacccgcaccgaccgggggugguacugcgacaacgccggcuccgugagcuucuucccccaggcggagaccugcaagguccaguccaaccgcguguucugcgacacgaugaacagccggacccuccccuccgaggucaaccugugcaacguggacaucuucaacccgaaguacgacugcaagaucaugaccagcaagaccgacguguccagcuccgucaucacgagccugggcgccaucguguccugcuacgggaagaccaagugcaccgccagcaacaagaaccggggcaucaucaagaccuucuccaacgggugcgacuacgugagcaacaagggcgucgacacggugagcgugggcaacacccucuacugcgucaacaagcaggaggggaagucccuguacgugaagggcgagcccaucaucaacuucuacgacccccugguguuccccagcgacgaguucgacgccuccaucagccaggucaacgagaagaucaaccagucccucgccuucauccgcaagagcgacgagcugcugcacaacgugaacgcggggaaguccaccaccaacaucaugaucaccacgaucaucaucgugaucaucgucauccuccugagccugaucgccgugggccuccugcuguacugcaaggcccgguccaccccggugacccugagcaaggaccagcucuccgggaucaacaacaucgccuucagcaacugaggacuagugcaucacauuuaaaagcaucucagccuaccaugagaauaagagaaagaaaaugaagaucaauagcuuauucaucucuuuuucuuuuucguugguguaaagccaacacccugucuaaaaaacauaaauuucuuuaaucauuuugccucuuuucucugugcuucaauuaauaaaaaauggaaagaaccuagaucuaaaaaaaaaaaaaaaaaaaaaaaaaaaaaaaaaaaaaaaaaaaaaaaaaaaaaaaaaaaaaaaaugcaucccccccccccccccccccccccccccccccaaaggcucuuuucagagccaccagaauu

SEQ ID NO: 4943 - RNA, 1990 nt, Artificial Sequence
  mRNA product Design i-2 comprising derived and/or modified sequence from HRSV(A2)__F_DSCav1_mut4 (opt2)
ggggcgcugccuacggagguggcagccaucuccuucucggcaucaagcuuaccauggagcuccucauccucaaggccaacgccaucaccaccauccucaccgccgucaccuucugcuucgccuccggccagaacaucaccgaggaguucuaccaguccaccugcuccgccgucuccaagggcuaccucuccgcccuccgcaccggcugguacaccuccgucaucaccaucgagcucuccaacaucaaggagaacaagugcaacggcaccgacgccaaggucaagcucaucaagcaggagcucgacaaguacaagaacgccgucaccgagcuccagcuccucaugcaguccacccccgccaccggcuccggcuccgccaucugcuccggcgucgccgucugcaagguccuccaccucgagggcgaggucaacaagaucaaguccgcccuccucuccaccaacaaggccgucgucucccucuccaacggcgucuccguccucaccuucaagguccucgaccucaagaacuacaucgacaagcagcuccuccccauccucaacaagcaguccugcuccaucuccaacaucgagaccgucaucgaguuccagcagaagaacaaccgccuccucgagaucacccgcgaguucuccgucaacgccggcgucaccacccccgucuccaccuacaugcucaccaacuccgagcuccucucccucaucaacgacaugcccaucaccaacgaccagaagaagcucauguccaacaacguccagaucguccgccagcaguccuacuccaucaugugcaucaucaaggaggagguccucgccuacgucguccagcucccccucuacggcgucaucgacacccccugcuggaagcuccacaccuccccccucugcaccaccaacaccaaggagggcuccaacaucugccucacccgcaccgaccgcggcugguacugcgacaacgccggcuccgucuccuucuucccccaggccgagaccugcaagguccaguccaaccgcgucuucugcgacaccaugaacucccgcacccuccccuccgaggucaaccucugcaacgucgacaucuucaaccccaaguacgacugcaagaucaugaccuccaagaccgacgucuccuccuccgucaucaccucccucggcgccaucgucuccugcuacggcaagaccaagugcaccgccuccaacaagaaccgcggcaucaucaagaccuucuccaacggcugcgacuacgucuccaacaagggcgucgacaccgucuccgucggcaacacccucuacugcgucaacaagcaggagggcaagucccucuacgucaagggcgagcccaucaucaacuucuacgacccccucgucuuccccuccgacgaguucgacgccuccaucucccaggucaacgagaagaucaaccagucccucgccuucauccgcaaguccgacgagcuccuccacaacgucaacgccggcaaguccaccaccaacaucaugaucaccaccaucaucaucgucaucaucgucauccuccucucccucaucgccgucggccuccuccucuacugcaaggcccgcuccacccccgucacccucuccaaggaccagcucuccggcaucaacaacaucgccuucuccaacugaggacuagugcaucacauuuaaaagcaucucagccuaccaugagaauaagagaaagaaaaugaagaucaauagcuuauucaucucuuuuucuuuuucguugguguaaagccaacacccugucuaaaaaacauaaauuucuuuaaucauuuugccucuuuucucugugcuucaauuaauaaaaaauggaaagaaccuagaucuaaaaaaaaaaaaaaaaaaaaaaaaaaaaaaaaaaaaaaaaaaaaaaaaaaaaaaaaaaaaaaaaugcaucccccccccccccccccccccccccccccccaaaggcucuuuucagagccaccagaauu

SEQ ID NO: 4944 - RNA, 1990 nt, Artificial Sequence
  mRNA product Design i-2 comprising derived and/or modified sequence from HRSV(A2)__F_DSCav1_mut4 (opt3)
ggggcgcugccuacggagguggcagccaucuccuucucggcaucaagcuuaccauggagcugcucauccuuaaggccaacgcuauuaccacaauacugacugcagugacguucugcuuugccagcggccagaauaucaccgaagaguucuaccaauccacauguucugcggucucaaaaggguauuugagugcuuuaagaacuggaugguacaccagcguuauuacaaucgaacuguccaacauuaaggagaauaaaugcaacgguaccgacgccaaggugaaacuaaucaagcaggaacucgauaaguauaaaaaugcaguaacugagcugcagcuucugaugcagucuacacccgccaccggcucggggucagcuauauguagcggaguggcagucugcaagguguugcaccucgagggcgaaguuaacaaaaucaagagugcccugcuguccacgaauaaagcuguggucucucucagcaacgguguguccguauuaacuuuuaagguucuggaccuuaagaauuacauugauaaacaauugcugccuauccuaaacaagcagucauguaguauuagcaauaucgagaccgugauagaguuccagcagaaaaacaauaggcuccuggaaauuacacgggaguuuucugucaacgccggggugacuaccccaguguccacauauaugcuuaccaauucagaacuguugagccucaucaacgacaugccgauuacgaacgaucaaaagaaacugaugaguaauaacguccagaucguucgccagcagucuuacuccaucaugugcauuauaaaggaggaaguguuagcguauguagugcaacugccccucuacggagucaucgacacuccuuguuggaaacuucauacaagcccacugugcaccacuaauacaaaggagggcucgaacauuuguuugacccgaacggaucguggcugguacugcgacaaugcagggucuguguccuucuuuccccaggccgaaaccuguaagguucagucaaacagaguguucugcgauacaaugaauaguagaacucugccuagcgaggucaaccucugcaauguggacaucuuuaacccaaaauaugauuguaagauaaugaccuccaaaacagacguaucuagcucaguuauuaccagucugggagcuaucguguccugcuacgguaagacuaaauguacagccagcaauaagaacaggggcaucauuaagaccuucucuaaugggugcgauuaugucucaaacaaaggaguggacacugucagugugggcaauacgcuuuacuguguuaacaagcaagaggguaaaagccuguaugugaagggggaacccaucauuaacuuuuacgacccuuugguauucccauccgaugaguuugacgcaucuauaucgcaggucaaugagaaaaucaaccagagccucgcuuucauucggaaguccgaugaacuguuacacaaugugaacgccggaaagucaacaaccaauaucaugaucacuaccauuauaaucguuauuaucgugauucugcuaagucucaucgcggucggccugcuuuuguauugcaaagcccgcucuacaccggugacccugagcaaggaccagcucuccggcauaaacaauaucgcauucucaaacugaggacuagugcaucacauuuaaaagcaucucagccuaccaugagaauaagagaaagaaaaugaagaucaauagcuuauucaucucuuuuucuuuuucguugguguaaagccaacacccugucuaaaaaacauaaauuucuuuaaucauuuugccucuuuucucugugcuucaauuaauaaaaaauggaaagaaccuagaucuaaaaaaaaaaaaaaaaaaaaaaaaaaaaaaaaaaaaaaaaaaaaaaaaaaaaaaaaaaaaaaaaugcaucccccccccccccccccccccccccccccccaaaggcucuuuucagagccaccagaauu

SEQ ID NO: 4945 - RNA, 1990 nt, Artificial Sequence
  mRNA product Design i-2 comprising derived and/or modified sequence from HRSV(A2)__F_DSCav1_mut4 (opt4)
ggggcgcugccuacggagguggcagccaucuccuucucggcaucaagcuuaccauggagcugcugauccugaaggccaacgccaucaccaccauccugaccgccgugaccuucugcuucgccagcggccagaacaucaccgaggaguucuaccagagcaccugcagcgccgugagcaagggcuaccugagcgcccugagaaccggcugguacaccagcgugaucaccaucgagcugagcaacaucaaggagaacaagugcaacggcaccgacgccaaggugaagcugaucaagcaggagcuggacaaguacaagaacgccgugaccgagcugcagcugcugaugcagagcacccccgccaccggcagcggcagcgccaucugcagcggcguggccgugugcaaggugcugcaccuggagggcgaggugaacaagaucaagagcgcccugcugagcaccaacaaggccguggugagccugagcaacggcgugagcgugcugaccuucaaggugcuggaccugaagaacuacaucgacaagcagcugcugcccauccugaacaagcagagcugcagcaucagcaacaucgagaccgugaucgaguuccagcagaagaacaacagacugcuggagaucaccagagaguucagcgugaacgccggcgugaccacccccgugagcaccuacaugcugaccaacagcgagcugcugagccugaucaacgacaugcccaucaccaacgaccagaagaagcugaugagcaacaacgugcagaucgugagacagcagagcuacagcaucaugugcaucaucaaggaggaggugcuggccuacguggugcagcugccccuguacggcgugaucgacacccccugcuggaagcugcacaccagcccccugugcaccaccaacaccaaggagggcagcaacaucugccugaccagaaccgacagaggcugguacugcgacaacgccggcagcgugagcuucuucccccaggccgagaccugcaaggugcagagcaacagaguguucugcgacaccaugaacagcagaacccugcccagcgaggugaaccugugcaacguggacaucuucaaccccaaguacgacugcaagaucaugaccagcaagaccgacgugagcagcagcgugaucaccagccugggcgccaucgugagcugcuacggcaagaccaagugcaccgccagcaacaagaacagaggcaucaucaagaccuucagcaacggcugcgacuacgugagcaacaagggcguggacaccgugagcgugggcaacacccuguacugcgugaacaagcaggagggcaagagccuguacgugaagggcgagcccaucaucaacuucuacgacccccugguguuccccagcgacgaguucgacgccagcaucagccaggugaacgagaagaucaaccagagccuggccuucaucagaaagagcgacgagcugcugcacaacgugaacgccggcaagagcaccaccaacaucaugaucaccaccaucaucaucgugaucaucgugauccugcugagccugaucgccgugggccugcugcuguacugcaaggccagaagcacccccgugacccugagcaaggaccagcugagcggcaucaacaacaucgccuucagcaacugaggacuagugcaucacauuuaaaagcaucucagccuaccaugagaauaagagaaagaaaaugaagaucaauagcuuauucaucucuuuuucuuuuucguugguguaaagccaacacccugucuaaaaaacauaaauuucuuuaaucauuuugccucuuuucucugugcuucaauuaauaaaaaauggaaagaaccuagaucuaaaaaaaaaaaaaaaaaaaaaaaaaaaaaaaaaaaaaaaaaaaaaaaaaaaaaaaaaaaaaaaaugcaucccccccccccccccccccccccccccccccaaaggcucuuuucagagccaccagaauu

SEQ ID NO: 4946 - RNA, 1990 nt, Artificial Sequence
  mRNA product Design i-2 comprising derived and/or modified sequence from HRSV(A2)__F_DSCav1_mut4 (opt5)
ggggcgcugccuacggagguggcagccaucuccuucucggcaucaagcuuaccauggagcugcucauccugaaggccaacgcuauuaccacaauccuuacggccgugaccuucugcuuugcgagcggccagaauauuacagaagaguucuaccaauccaccuguucugcugucagcaaaggguaucuguccgcccucagaacaggaugguacaccucuguuaucacaauugaacugagcaacaucaaggagaauaaaugcaacggcaccgacgccaaggugaaacuuaucaagcaggaacuggauaaguauaaaaaugcugugacggagcuccagcugcugaugcaguccacccccgccacagggucuggaagcgcuauuuguuccggcgucgccgugugcaagguucuccaccuggagggggaagugaacaaaaucaagagcgcgcuucugucuaccaauaaagccgucgugucccucagcaacggaguuucugugcugacauuuaagguccuugaccugaagaauuacauugauaaacaacuccugccuauccugaacaagcaguccuguagcauuucuaauaucgagaccgugauugaguuccagcagaaaaacaaucggcuccuggaaaucacgcgcgaguuuuccgugaacgcuggcgucacaaccccgguuagcacauauaugcuuaccaauuccgaacugcucucucugaucaacgacaugcccauuaccaacgaucaaaagaaacuuaugagcaauaacgugcagaucgugagacagcaguccuacagcauuaugugcaucauuaaggaggaaguccuggccuaugugguucaacucccucuguacggcgugaucgacacacccuguuggaaacugcauacgucuccucucugcaccacaaauaccaaggagggguccaacaucugucugacacggaccgaucgcggaugguacugcgacaaugcuggcagcgucucuuucuuuccccaggccgaaacguguaaggugcagagcaacagaguuuucugcgauacaaugaacuccagaacccugccuucugaggugaaucucugcaaugucgacauuuuuaacccgaaauaugauuguaagaucaugaccagcaaaacagacguguccagcucugucauuaccucccugggggcgaucgugagcugcuacggaaagacaaaauguacggccucuaauaagaaccggggcauuaucaagaccuucuccaaugggugcgauuauguuagcaacaaaggaguggacacagucuccgugggcaauacccuuuacuguguuaacaagcaagagggcaaaucucuguaugugaagggggaacccaucauuaacuuuuacgacccucucgucuuccccagcgaugaguuugacgcuuccaucucucaggugaaugagaaaauuaaccagagccuggccuucauccgcaaguccgaugaacugcuccacaaugugaacgcuggaaagagcacaaccaauauuaugaucacgaccauuaucaucguuauuaucgucauucugcuuucucugaucgccgugggccuccugcuguauugcaaagccagauccacaccugugacccuuagcaaggaccagcucucugggauuaacaauaucgcuuucuccaacugaggacuagugcaucacauuuaaaagcaucucagccuaccaugagaauaagagaaagaaaaugaagaucaauagcuuauucaucucuuuuucuuuuucguugguguaaagccaacacccugucuaaaaaacauaaauuucuuuaaucauuuugccucuuuucucugugcuucaauuaauaaaaaauggaaagaaccuagaucuaaaaaaaaaaaaaaaaaaaaaaaaaaaaaaaaaaaaaaaaaaaaaaaaaaaaaaaaaaaaaaaaugcaucccccccccccccccccccccccccccccccaaaggcucuuuucagagccaccagaauu

SEQ ID NO: 4947 - RNA, 1990 nt, Artificial Sequence
  mRNA product Design i-2 comprising derived and/or modified sequence from HRSV(A2)__F_DSCav1_mut4 (opt6)
ggggcgcugccuacggagguggcagccaucuccuucucggcaucaagcuuaccauggaacuucuaauacucaaagccaacgcaauaacaacaauauuaacagccguaacauuuugcuucgcaucaggucaaaacauaacagaagaguucuaccaauccacaugcucagcaguaucaaaaggauauuuaagugcucuaagaacaggaugguacacauccguaauaacaaucgaacuaucaaacauaaaagaaaauaaauguaauggaacagacgccaaaguaaaauuaaucaaacaagaacuagacaaauacaaaaacgcaguuacugaauuacaauuauuaaugcaaucaacaccggccacaggaucuggaucagcaauaugcucaggaguagcagucugcaaaguauuacaccuagaaggggaaguuaauaaaaucaaaucagcauuacuauccaccaacaaagcgguaguuucacucuccaacggcguaucugucuuaacauucaaaguauuagaccuaaaaaacuacauugacaaacaacuacuaccaauccuaaacaaacaaucauguuccauaagcaauauagaaacaguaauagaauuucaacaaaaaaacaacagacuauuagaaauaacaagagaauuuuccgucaaugcaggaguuacuaccccugucuccaccuauaugcuaaccaauuccgaacucuuaucauuaauaaacgacaugccuaucacaaaugaccaaaaaaaauuaaugagcaacaacguacaaauaguacgacaacaaucauacucaaucaugugcauaauaaaagaagaaguccuagcauacguuguacaacuaccacuauacggagucauagauaccccaugcuggaaacuccauacaagcccacuaugcacuacaaacacaaaagaaggcucuaauauaugucuaacaagaacagaccgaggaugguacugcgauaaugccggcucagucucauucuuuccgcaagccgaaacuuguaaaguacaaaguaacagaguauuuugugacaccaugaacucaagaacccucccaagcgaagucaaucuaugcaacguugauauauucaaucccaaauacgacugcaaaaucaugaccucaaaaacagacgucagcucauccguuauaacaucacuaggagccaucguaucuugcuauggaaaaacaaaaugcacagcaagcaauaaaaacagaggcauaauaaaaacauucucaaauggaugcgacuacguaucaaacaaaggagucgacacaguuuccguaggaaacacuuuauacugcguaaacaaacaagaaggaaaaucauuauacgucaaaggugaaccaauaauaaacuucuacgauccacuuguauucccaucagacgaauuugacgcaucaauuucacaaguaaacgaaaaaauaaaccaaucacucgcauucauaagaaaaucagaugaacuacuacauaacguaaacgcaggaaaauccacaacaaacaucaugauaacaaccaucauaaucguaauaaucguaauacuauuaucccuaauugcaguaggauuacucuuauauugcaaagcaagaucaacaccaguaacccucaguaaagaccaacuauccggaauaaauaacaucgcauucucaaacuaaggacuagugcaucacauuuaaaagcaucucagccuaccaugagaauaagagaaagaaaaugaagaucaauagcuuauucaucucuuuuucuuuuucguugguguaaagccaacacccugucuaaaaaacauaaauuucuuuaaucauuuugccucuuuucucugugcuucaauuaauaaaaaauggaaagaaccuagaucuaaaaaaaaaaaaaaaaaaaaaaaaaaaaaaaaaaaaaaaaaaaaaaaaaaaaaaaaaaaaaaaaugcaucccccccccccccccccccccccccccccccaaaggcucuuuucagagccaccagaauu

SEQ ID NO: 4948 - RNA, 1990 nt, Artificial Sequence
  mRNA product Design i-2 comprising derived and/or modified sequence from HRSV(A2)__F_DSCav1_mut4 (opt11)
ggggcgcugccuacggagguggcagccaucuccuucucggcaucaagcuuaccauggaacugcucauccucaaagccaacgccaucaccaccauucuuaccgccgucacauucugcuucgccucaggccaaaacaucaccgaagaauuuuaccaauccacuuguucagccgucucaaaaggauaccuaucagcccuccguaccggcugguacaccucggucauaacaauagaacucuccaacauaaaagaaaacaaaugcaacggcaccgacgccaaggucaaacugauaaaacaagaacuugauaaauacaaaaacgccgucacugaacuccaacuccucaugcaauccacucccgcuacuggcucuggcuccgccaucugcucuggcgucgccgucuguaaaguacuccaccucgaaggggaagucaacaaaaucaaaucagcccuccuuagcaccaacaaggccgucgucucccucucaaacggagucagcguccucaccuucaagguccucgaccucaagaacuacaucgacaaacaacuccugcccauccuaaauaaacaauccugcucuaucuccaauaucgaaaccguuauagaguuccaacagaaaaacaaccgacuccucgaaaucacccgcgaguucuccgucaacgcaggcgucaccaccccugugucaaccuacaugcucaccaacagcgaacuacucucacucaucaaugacaugcccaucaccaacgaccaaaagaaacucauguccaacaacguccaaaucguacgucaacaauccuacagcaucaugugcaucauaaaagaagaaguccucgccuacgucguccaacuuccccucuacggcgucauagacacccccugcuggaaacugcauaccucaccccuaugcaccaccaacacuaaagaaggcuccaacaucugccucacccgcacggaccgcggcugguacugcgacaacgccggcuccgucuccuucuucccccaagccgaaacuuguaaaguccaauccaacagagucuucugcgacaccaugaacucuagaacgcugccauccgagguaaaccuaugcaacgucgacaucuucaaucccaaauacgacugcaagaucaugaccucaaaaaccgacguauccuccucaguaaucaccagucucggagcuaucgucuccugcuacggcaaaaccaaaugcacggccucuaacaaaaaccgcggcaucaucaaaaccuucucaaacggaugcgacuacgucagcaacaaaggcguagauaccgucucugucggcaacacacuguacugcguaaacaagcaagaaggaaaaucccucuacguaaaaggcgaacccaucaucaacuucuacgacccccucguuuuccccucagaugaauuugacgccucgauaucacaagucaacgaaaagauaaaucagucccucgccuucauccgaaaauccgacgaacuccuccacaacguuaacgcaggaaaguccaccacaaacaucaugauaacuacaaucauaauagucauuaucgucauacuccucucccuaaucgccguaggccugcuacucuacugcaaagcccgcucaacccccgucacucucucaaaagaccaacucuccggcaucaauaacaucgccuucucaaacuaaggacuagugcaucacauuuaaaagcaucucagccuaccaugagaauaagagaaagaaaaugaagaucaauagcuuauucaucucuuuuucuuuuucguugguguaaagccaacacccugucuaaaaaacauaaauuucuuuaaucauuuugccucuuuucucugugcuucaauuaauaaaaaauggaaagaaccuagaucuaaaaaaaaaaaaaaaaaaaaaaaaaaaaaaaaaaaaaaaaaaaaaaaaaaaaaaaaaaaaaaaaugcaucccccccccccccccccccccccccccccccaaaggcucuuuucagagccaccagaauu

SEQ ID NO: 4949 - RNA, 1825 nt, Artificial Sequence
  mRNA product Design i-3 comprising derived and/or modified sequence from HRSV(A2)__F_DSCav1_mut4 (opt1) R7458
gggagaaagcuuaccauggagcugcucauccugaaggccaacgccaucaccaccauccugacggcggugaccuucugcuucgccagcggccagaacaucaccgaggaguucuaccaguccacgugcagcgccgucuccaagggguaccucagcgcccugcggaccggcugguacaccuccgugaucaccaucgagcugagcaacaucaaggagaacaagugcaacgggaccgacgccaaggugaagcucaucaagcaggagcuggacaaguacaagaacgcggucacggagcugcagcuccugaugcaguccaccccggcaaccggcuccggcuccgccaucugcagcggcgucgccgugugcaaggugcugcaccucgagggggaggucaacaagaucaagagcgcccugcuguccaccaacaaggccguggugagccucuccaacggcgucagcgugcugaccuucaaggugcuggaccucaagaacuacaucgacaagcagcugcugcccauccugaacaagcagagcugcuccaucagcaacaucgagacggugaucgaguuccagcagaagaacaaccggcuccuggagaucacccgcgaguucagcgugaacgccggggucaccacccccguguccacguacaugcugaccaacagcgagcuccugucccugaucaacgacaugccgaucaccaacgaccagaagaagcucaugagcaacaacgugcagaucguccggcagcaguccuacagcaucaugugcaucaucaaggaggaggugcuggcguacgugguccagcugccccucuacggcgugaucgacacccccugcuggaagcugcacacgagcccccugugcaccaccaacaccaaggagggguccaacaucugccucacgcgcaccgaccggggcugguacugcgacaacgccggcagcgucuccuucuucccgcaggccgagaccugcaaggugcagagcaaccgcguguucugcgacaccaugaacucccggacgcugcccagcgagguaaaccucugcaacgucgacaucuucaaccccaaguacgacugcaagaucaugaccuccaagaccgacgugagcuccagcgugaucaccucccugggggccaucgucagcugcuacggcaagacgaagugcaccgccagcaacaagaaccgggggaucaucaagaccuucuccaacggcugcgacuacgugagcaacaagggcguggacaccguguccgucgggaacacccuguacugcgugaacaagcaggagggcaagagccucuacgugaagggggagcccaucaucaacuucuacgacccgcuggucuuccccuccgacgaguucgacgcgagcaucucccaggugaacgagaagaucaaccagagccuggccuucauccgcaaguccgacgagcugcuccacaacgugaacgccggcaagagcacgaccaacaucaugaucaccaccaucaucaucgucaucaucgugauccugcugucccucaucgccguggggcugcugcucuacugcaaggcccggagcacgcccgucacccuguccaaggaccagcugagcggcaucaacaacaucgcguucuccaacugaggacuaguuauaagacugacuagcccgaugggccucccaacgggcccuccuccccuccuugcaccgagauuaauaaaaaaaaaaaaaaaaaaaaaaaaaaaaaaaaaaaaaaaaaaaaaaaaaaaaaaaaaaaaaaaaugcaucccccccccccccccccccccccccccccccaaaggcucuuuucagagccaccagaauu

SEQ ID NO: 4950 - RNA, 1825 nt, Artificial Sequence
  mRNA product Design i-3 comprising derived and/or modified sequence from HRSV(A2)__F_DSCav1_mut4 (opt1)
gggagaaagcuuaccauggagcugcucauccugaaggccaacgccaucaccaccauccugacggcggugaccuucugcuucgccagcggccagaacaucaccgaggaguucuaccaguccacgugcagcgccgucuccaagggguaccucagcgcccugcgcaccggcugguacaccuccgugaucaccaucgagcugagcaacaucaaggagaacaagugcaacgggaccgacgccaaggugaagcucaucaagcaggagcuggacaaguacaagaacgcggucacggagcugcagcuccugaugcaguccacccccgccaccggcagcggguccgccaucugcagcggcguggccgugugcaagguccugcaccucgagggcgaggugaacaagaucaaguccgcgcugcugagcaccaacaaggccguggucucccucagcaacgggguguccgugcugacguucaagguccuggaccucaagaacuacaucgacaagcagcugcugccgauccucaacaagcagagcugcuccaucagcaacaucgagaccgugaucgaguuccagcagaagaacaaccggcugcuggagaucacccgcgaguucuccgugaacgccggcgucaccacgcccgugagcaccuacaugcucaccaacagcgagcugcugucccucaucaacgacaugcccaucaccaacgaccagaagaagcugaugagcaacaacgugcagaucguccggcagcaguccuacagcaucaugugcaucaucaaggaggaggugcuggccuacgugguccagcucccccuguacggggugaucgacacgccgugcuggaagcugcacaccagcccccucugcaccaccaacacgaaggagggcuccaacaucugccugacccgcaccgaccgggggugguacugcgacaacgccggcuccgugagcuucuucccccaggcggagaccugcaagguccaguccaaccgcguguucugcgacacgaugaacagccggacccuccccuccgaggucaaccugugcaacguggacaucuucaacccgaaguacgacugcaagaucaugaccagcaagaccgacguguccagcuccgucaucacgagccugggcgccaucguguccugcuacgggaagaccaagugcaccgccagcaacaagaaccggggcaucaucaagaccuucuccaacgggugcgacuacgugagcaacaagggcgucgacacggugagcgugggcaacacccucuacugcgucaacaagcaggaggggaagucccuguacgugaagggcgagcccaucaucaacuucuacgacccccugguguuccccagcgacgaguucgacgccuccaucagccaggucaacgagaagaucaaccagucccucgccuucauccgcaagagcgacgagcugcugcacaacgugaacgcggggaaguccaccaccaacaucaugaucaccacgaucaucaucgugaucaucgucauccuccugagccugaucgccgugggccuccugcuguacugcaaggcccgguccaccccggugacccugagcaaggaccagcucuccgggaucaacaacaucgccuucagcaacugaggacuaguuauaagacugacuagcccgaugggccucccaacgggcccuccuccccuccuugcaccgagauuaauaaaaaaaaaaaaaaaaaaaaaaaaaaaaaaaaaaaaaaaaaaaaaaaaaaaaaaaaaaaaaaaaugcaucccccccccccccccccccccccccccccccaaaggcucuuuucagagccaccagaauu

SEQ ID NO: 4951 - RNA, 1825 nt, Artificial Sequence
  mRNA product Design i-3 comprising derived and/or modified sequence from HRSV(A2)__F_DSCav1_mut4 (opt2)
gggagaaagcuuaccauggagcuccucauccucaaggccaacgccaucaccaccauccucaccgccgucaccuucugcuucgccuccggccagaacaucaccgaggaguucuaccaguccaccugcuccgccgucuccaagggcuaccucuccgcccuccgcaccggcugguacaccuccgucaucaccaucgagcucuccaacaucaaggagaacaagugcaacggcaccgacgccaaggucaagcucaucaagcaggagcucgacaaguacaagaacgccgucaccgagcuccagcuccucaugcaguccacccccgccaccggcuccggcuccgccaucugcuccggcgucgccgucugcaagguccuccaccucgagggcgaggucaacaagaucaaguccgcccuccucuccaccaacaaggccgucgucucccucuccaacggcgucuccguccucaccuucaagguccucgaccucaagaacuacaucgacaagcagcuccuccccauccucaacaagcaguccugcuccaucuccaacaucgagaccgucaucgaguuccagcagaagaacaaccgccuccucgagaucacccgcgaguucuccgucaacgccggcgucaccacccccgucuccaccuacaugcucaccaacuccgagcuccucucccucaucaacgacaugcccaucaccaacgaccagaagaagcucauguccaacaacguccagaucguccgccagcaguccuacuccaucaugugcaucaucaaggaggagguccucgccuacgucguccagcucccccucuacggcgucaucgacacccccugcuggaagcuccacaccuccccccucugcaccaccaacaccaaggagggcuccaacaucugccucacccgcaccgaccgcggcugguacugcgacaacgccggcuccgucuccuucuucccccaggccgagaccugcaagguccaguccaaccgcgucuucugcgacaccaugaacucccgcacccuccccuccgaggucaaccucugcaacgucgacaucuucaaccccaaguacgacugcaagaucaugaccuccaagaccgacgucuccuccuccgucaucaccucccucggcgccaucgucuccugcuacggcaagaccaagugcaccgccuccaacaagaaccgcggcaucaucaagaccuucuccaacggcugcgacuacgucuccaacaagggcgucgacaccgucuccgucggcaacacccucuacugcgucaacaagcaggagggcaagucccucuacgucaagggcgagcccaucaucaacuucuacgacccccucgucuuccccuccgacgaguucgacgccuccaucucccaggucaacgagaagaucaaccagucccucgccuucauccgcaaguccgacgagcuccuccacaacgucaacgccggcaaguccaccaccaacaucaugaucaccaccaucaucaucgucaucaucgucauccuccucucccucaucgccgucggccuccuccucuacugcaaggcccgcuccacccccgucacccucuccaaggaccagcucuccggcaucaacaacaucgccuucuccaacugaggacuaguuauaagacugacuagcccgaugggccucccaacgggcccuccuccccuccuugcaccgagauuaauaaaaaaaaaaaaaaaaaaaaaaaaaaaaaaaaaaaaaaaaaaaaaaaaaaaaaaaaaaaaaaaaugcaucccccccccccccccccccccccccccccccaaaggcucuuuucagagccaccagaauu

SEQ ID NO: 4952 - RNA, 1825 nt, Artificial Sequence
  mRNA product Design i-3 comprising derived and/or modified sequence from HRSV(A2)__F_DSCav1_mut4 (opt3)
gggagaaagcuuaccauggagcugcucauccuuaaggccaacgcuauuaccacaauacugacugcagugacguucugcuuugccagcggccagaauaucaccgaagaguucuaccaauccacauguucugcggucucaaaaggguauuugagugcuuuaagaacuggaugguacaccagcguuauuacaaucgaacuguccaacauuaaggagaauaaaugcaacgguaccgacgccaaggugaaacuaaucaagcaggaacucgauaaguauaaaaaugcaguaacugagcugcagcuucugaugcagucuacacccgccaccggcucggggucagcuauauguagcggaguggcagucugcaagguguugcaccucgagggcgaaguuaacaaaaucaagagugcccugcuguccacgaauaaagcuguggucucucucagcaacgguguguccguauuaacuuuuaagguucuggaccuuaagaauuacauugauaaacaauugcugccuauccuaaacaagcagucauguaguauuagcaauaucgagaccgugauagaguuccagcagaaaaacaauaggcuccuggaaauuacacgggaguuuucugucaacgccggggugacuaccccaguguccacauauaugcuuaccaauucagaacuguugagccucaucaacgacaugccgauuacgaacgaucaaaagaaacugaugaguaauaacguccagaucguucgccagcagucuuacuccaucaugugcauuauaaaggaggaaguguuagcguauguagugcaacugccccucuacggagucaucgacacuccuuguuggaaacuucauacaagcccacugugcaccacuaauacaaaggagggcucgaacauuuguuugacccgaacggaucguggcugguacugcgacaaugcagggucuguguccuucuuuccccaggccgaaaccuguaagguucagucaaacagaguguucugcgauacaaugaauaguagaacucugccuagcgaggucaaccucugcaauguggacaucuuuaacccaaaauaugauuguaagauaaugaccuccaaaacagacguaucuagcucaguuauuaccagucugggagcuaucguguccugcuacgguaagacuaaauguacagccagcaauaagaacaggggcaucauuaagaccuucucuaaugggugcgauuaugucucaaacaaaggaguggacacugucagugugggcaauacgcuuuacuguguuaacaagcaagaggguaaaagccuguaugugaagggggaacccaucauuaacuuuuacgacccuuugguauucccauccgaugaguuugacgcaucuauaucgcaggucaaugagaaaaucaaccagagccucgcuuucauucggaaguccgaugaacuguuacacaaugugaacgccggaaagucaacaaccaauaucaugaucacuaccauuauaaucguuauuaucgugauucugcuaagucucaucgcggucggccugcuuuuguauugcaaagcccgcucuacaccggugacccugagcaaggaccagcucuccggcauaaacaauaucgcauucucaaacugaggacuaguuauaagacugacuagcccgaugggccucccaacgggcccuccuccccuccuugcaccgagauuaauaaaaaaaaaaaaaaaaaaaaaaaaaaaaaaaaaaaaaaaaaaaaaaaaaaaaaaaaaaaaaaaaugcaucccccccccccccccccccccccccccccccaaaggcucuuuucagagccaccagaauu

SEQ ID NO: 4953 - RNA, 1825 nt, Artificial Sequence
  mRNA product Design i-3 comprising derived and/or modified sequence from HRSV(A2)__F_DSCav1_mut4 (opt4)
gggagaaagcuuaccauggagcugcugauccugaaggccaacgccaucaccaccauccugaccgccgugaccuucugcuucgccagcggccagaacaucaccgaggaguucuaccagagcaccugcagcgccgugagcaagggcuaccugagcgcccugagaaccggcugguacaccagcgugaucaccaucgagcugagcaacaucaaggagaacaagugcaacggcaccgacgccaaggugaagcugaucaagcaggagcuggacaaguacaagaacgccgugaccgagcugcagcugcugaugcagagcacccccgccaccggcagcggcagcgccaucugcagcggcguggccgugugcaaggugcugcaccuggagggcgaggugaacaagaucaagagcgcccugcugagcaccaacaaggccguggugagccugagcaacggcgugagcgugcugaccuucaaggugcuggaccugaagaacuacaucgacaagcagcugcugcccauccugaacaagcagagcugcagcaucagcaacaucgagaccgugaucgaguuccagcagaagaacaacagacugcuggagaucaccagagaguucagcgugaacgccggcgugaccacccccgugagcaccuacaugcugaccaacagcgagcugcugagccugaucaacgacaugcccaucaccaacgaccagaagaagcugaugagcaacaacgugcagaucgugagacagcagagcuacagcaucaugugcaucaucaaggaggaggugcuggccuacguggugcagcugccccuguacggcgugaucgacacccccugcuggaagcugcacaccagcccccugugcaccaccaacaccaaggagggcagcaacaucugccugaccagaaccgacagaggcugguacugcgacaacgccggcagcgugagcuucuucccccaggccgagaccugcaaggugcagagcaacagaguguucugcgacaccaugaacagcagaacccugcccagcgaggugaaccugugcaacguggacaucuucaaccccaaguacgacugcaagaucaugaccagcaagaccgacgugagcagcagcgugaucaccagccugggcgccaucgugagcugcuacggcaagaccaagugcaccgccagcaacaagaacagaggcaucaucaagaccuucagcaacggcugcgacuacgugagcaacaagggcguggacaccgugagcgugggcaacacccuguacugcgugaacaagcaggagggcaagagccuguacgugaagggcgagcccaucaucaacuucuacgacccccugguguuccccagcgacgaguucgacgccagcaucagccaggugaacgagaagaucaaccagagccuggccuucaucagaaagagcgacgagcugcugcacaacgugaacgccggcaagagcaccaccaacaucaugaucaccaccaucaucaucgugaucaucgugauccugcugagccugaucgccgugggccugcugcuguacugcaaggccagaagcacccccgugacccugagcaaggaccagcugagcggcaucaacaacaucgccuucagcaacugaggacuaguuauaagacugacuagcccgaugggccucccaacgggcccuccuccccuccuugcaccgagauuaauaaaaaaaaaaaaaaaaaaaaaaaaaaaaaaaaaaaaaaaaaaaaaaaaaaaaaaaaaaaaaaaaugcaucccccccccccccccccccccccccccccccaaaggcucuuuucagagccaccagaauu

SEQ ID NO: 4954 - RNA, 1825 nt, Artificial Sequence
  mRNA product Design i-3 comprising derived and/or modified sequence from HRSV(A2)__F_DSCav1_mut4 (opt5)
gggagaaagcuuaccauggagcugcucauccugaaggccaacgcuauuaccacaauccuuacggccgugaccuucugcuuugcgagcggccagaauauuacagaagaguucuaccaauccaccuguucugcugucagcaaaggguaucuguccgcccucagaacaggaugguacaccucuguuaucacaauugaacugagcaacaucaaggagaauaaaugcaacggcaccgacgccaaggugaaacuuaucaagcaggaacuggauaaguauaaaaaugcugugacggagcuccagcugcugaugcaguccacccccgccacagggucuggaagcgcuauuuguuccggcgucgccgugugcaagguucuccaccuggagggggaagugaacaaaaucaagagcgcgcuucugucuaccaauaaagccgucgugucccucagcaacggaguuucugugcugacauuuaagguccuugaccugaagaauuacauugauaaacaacuccugccuauccugaacaagcaguccuguagcauuucuaauaucgagaccgugauugaguuccagcagaaaaacaaucggcuccuggaaaucacgcgcgaguuuuccgugaacgcuggcgucacaaccccgguuagcacauauaugcuuaccaauuccgaacugcucucucugaucaacgacaugcccauuaccaacgaucaaaagaaacuuaugagcaauaacgugcagaucgugagacagcaguccuacagcauuaugugcaucauuaaggaggaaguccuggccuaugugguucaacucccucuguacggcgugaucgacacacccuguuggaaacugcauacgucuccucucugcaccacaaauaccaaggagggguccaacaucugucugacacggaccgaucgcggaugguacugcgacaaugcuggcagcgucucuuucuuuccccaggccgaaacguguaaggugcagagcaacagaguuuucugcgauacaaugaacuccagaacccugccuucugaggugaaucucugcaaugucgacauuuuuaacccgaaauaugauuguaagaucaugaccagcaaaacagacguguccagcucugucauuaccucccugggggcgaucgugagcugcuacggaaagacaaaauguacggccucuaauaagaaccggggcauuaucaagaccuucuccaaugggugcgauuauguuagcaacaaaggaguggacacagucuccgugggcaauacccuuuacuguguuaacaagcaagagggcaaaucucuguaugugaagggggaacccaucauuaacuuuuacgacccucucgucuuccccagcgaugaguuugacgcuuccaucucucaggugaaugagaaaauuaaccagagccuggccuucauccgcaaguccgaugaacugcuccacaaugugaacgcuggaaagagcacaaccaauauuaugaucacgaccauuaucaucguuauuaucgucauucugcuuucucugaucgccgugggccuccugcuguauugcaaagccagauccacaccugugacccuuagcaaggaccagcucucugggauuaacaauaucgcuuucuccaacugaggacuaguuauaagacugacuagcccgaugggccucccaacgggcccuccuccccuccuugcaccgagauuaauaaaaaaaaaaaaaaaaaaaaaaaaaaaaaaaaaaaaaaaaaaaaaaaaaaaaaaaaaaaaaaaaugcaucccccccccccccccccccccccccccccccaaaggcucuuuucagagccaccagaauu

SEQ ID NO: 4955 - RNA, 1825 nt, Artificial Sequence
  mRNA product Design i-3 comprising derived and/or modified sequence from HRSV(A2)__F_DSCav1_mut4 (opt6)
gggagaaagcuuaccauggaacuucuaauacucaaagccaacgcaauaacaacaauauuaacagccguaacauuuugcuucgcaucaggucaaaacauaacagaagaguucuaccaauccacaugcucagcaguaucaaaaggauauuuaagugcucuaagaacaggaugguacacauccguaauaacaaucgaacuaucaaacauaaaagaaaauaaauguaauggaacagacgccaaaguaaaauuaaucaaacaagaacuagacaaauacaaaaacgcaguuacugaauuacaauuauuaaugcaaucaacaccggccacaggaucuggaucagcaauaugcucaggaguagcagucugcaaaguauuacaccuagaaggggaaguuaauaaaaucaaaucagcauuacuauccaccaacaaagcgguaguuucacucuccaacggcguaucugucuuaacauucaaaguauuagaccuaaaaaacuacauugacaaacaacuacuaccaauccuaaacaaacaaucauguuccauaagcaauauagaaacaguaauagaauuucaacaaaaaaacaacagacuauuagaaauaacaagagaauuuuccgucaaugcaggaguuacuaccccugucuccaccuauaugcuaaccaauuccgaacucuuaucauuaauaaacgacaugccuaucacaaaugaccaaaaaaaauuaaugagcaacaacguacaaauaguacgacaacaaucauacucaaucaugugcauaauaaaagaagaaguccuagcauacguuguacaacuaccacuauacggagucauagauaccccaugcuggaaacuccauacaagcccacuaugcacuacaaacacaaaagaaggcucuaauauaugucuaacaagaacagaccgaggaugguacugcgauaaugccggcucagucucauucuuuccgcaagccgaaacuuguaaaguacaaaguaacagaguauuuugugacaccaugaacucaagaacccucccaagcgaagucaaucuaugcaacguugauauauucaaucccaaauacgacugcaaaaucaugaccucaaaaacagacgucagcucauccguuauaacaucacuaggagccaucguaucuugcuauggaaaaacaaaaugcacagcaagcaauaaaaacagaggcauaauaaaaacauucucaaauggaugcgacuacguaucaaacaaaggagucgacacaguuuccguaggaaacacuuuauacugcguaaacaaacaagaaggaaaaucauuauacgucaaaggugaaccaauaauaaacuucuacgauccacuuguauucccaucagacgaauuugacgcaucaauuucacaaguaaacgaaaaaauaaaccaaucacucgcauucauaagaaaaucagaugaacuacuacauaacguaaacgcaggaaaauccacaacaaacaucaugauaacaaccaucauaaucguaauaaucguaauacuauuaucccuaauugcaguaggauuacucuuauauugcaaagcaagaucaacaccaguaacccucaguaaagaccaacuauccggaauaaauaacaucgcauucucaaacuaaggacuaguuauaagacugacuagcccgaugggccucccaacgggcccuccuccccuccuugcaccgagauuaauaaaaaaaaaaaaaaaaaaaaaaaaaaaaaaaaaaaaaaaaaaaaaaaaaaaaaaaaaaaaaaaaugcaucccccccccccccccccccccccccccccccaaaggcucuuuucagagccaccagaauu

SEQ ID NO: 4956 - RNA, 1825 nt, Artificial Sequence
  mRNA product Design i-3 comprising derived and/or modified sequence from HRSV(A2)__F_DSCav1_mut4 (opt11)
gggagaaagcuuaccauggaacugcucauccucaaagccaacgccaucaccaccauucuuaccgccgucacauucugcuucgccucaggccaaaacaucaccgaagaauuuuaccaauccacuuguucagccgucucaaaaggauaccuaucagcccuccguaccggcugguacaccucggucauaacaauagaacucuccaacauaaaagaaaacaaaugcaacggcaccgacgccaaggucaaacugauaaaacaagaacuugauaaauacaaaaacgccgucacugaacuccaacuccucaugcaauccacucccgcuacuggcucuggcuccgccaucugcucuggcgucgccgucuguaaaguacuccaccucgaaggggaagucaacaaaaucaaaucagcccuccuuagcaccaacaaggccgucgucucccucucaaacggagucagcguccucaccuucaagguccucgaccucaagaacuacaucgacaaacaacuccugcccauccuaaauaaacaauccugcucuaucuccaauaucgaaaccguuauagaguuccaacagaaaaacaaccgacuccucgaaaucacccgcgaguucuccgucaacgcaggcgucaccaccccugugucaaccuacaugcucaccaacagcgaacuacucucacucaucaaugacaugcccaucaccaacgaccaaaagaaacucauguccaacaacguccaaaucguacgucaacaauccuacagcaucaugugcaucauaaaagaagaaguccucgccuacgucguccaacuuccccucuacggcgucauagacacccccugcuggaaacugcauaccucaccccuaugcaccaccaacacuaaagaaggcuccaacaucugccucacccgcacggaccgcggcugguacugcgacaacgccggcuccgucuccuucuucccccaagccgaaacuuguaaaguccaauccaacagagucuucugcgacaccaugaacucuagaacgcugccauccgagguaaaccuaugcaacgucgacaucuucaaucccaaauacgacugcaagaucaugaccucaaaaaccgacguauccuccucaguaaucaccagucucggagcuaucgucuccugcuacggcaaaaccaaaugcacggccucuaacaaaaaccgcggcaucaucaaaaccuucucaaacggaugcgacuacgucagcaacaaaggcguagauaccgucucugucggcaacacacuguacugcguaaacaagcaagaaggaaaaucccucuacguaaaaggcgaacccaucaucaacuucuacgacccccucguuuuccccucagaugaauuugacgccucgauaucacaagucaacgaaaagauaaaucagucccucgccuucauccgaaaauccgacgaacuccuccacaacguuaacgcaggaaaguccaccacaaacaucaugauaacuacaaucauaauagucauuaucgucauacuccucucccuaaucgccguaggccugcuacucuacugcaaagcccgcucaacccccgucacucucucaaaagaccaacucuccggcaucaauaacaucgccuucucaaacuaaggacuaguuauaagacugacuagcccgaugggccucccaacgggcccuccuccccuccuugcaccgagauuaauaaaaaaaaaaaaaaaaaaaaaaaaaaaaaaaaaaaaaaaaaaaaaaaaaaaaaaaaaaaaaaaaugcaucccccccccccccccccccccccccccccccaaaggcucuuuucagagccaccagaauu

SEQ ID NO: 4957 - protein, 514 aa, Artificial Sequence
  derived and/or modified protein sequence (artificial) from HRSV(A2)__F-del_DSCav1_mut4
MELLILKANAITTILTAVTFCFASGQNITEEFYQSTCSAVSKGYLSALRTGWYTSVITIELSNIKENKCNGTDAKVKLIKQELDKYKNAVTELQLLMQSTPATGSGSAICSGVAVCKVLHLEGEVNKIKSALLSTNKAVVSLSNGVSVLTFKVLDLKNYIDKQLLPILNKQSCSISNIETVIEFQQKNNRLLEITREFSVNAGVTTPVSTYMLTNSELLSLINDMPITNDQKKLMSNNVQIVRQQSYSIMCIIKEEVLAYVVQLPLYGVIDTPCWKLHTSPLCTTNTKEGSNICLTRTDRGWYCDNAGSVSFFPQAETCKVQSNRVFCDTMNSRTLPSEVNLCNVDIFNPKYDCKIMTSKTDVSSSVITSLGAIVSCYGKTKCTASNKNRGIIKTFSNGCDYVSNKGVDTVSVGNTLYCVNKQEGKSLYVKGEPIINFYDPLVFPSDEFDASISQVNEKINQSLAFIRKSDELLHNVNAGKSTTNIMITTIIIVIIVILLSLIAVGLLLYCKAR

SEQ ID NO: 4958 - RNA, 1545 nt, Artificial Sequence
  derived and/or modified CDS sequence (opt1) from HRSV(A2)__F-del_DSCav1_mut4
auggagcugcucauccugaaggccaacgccaucaccaccauccugacggcggugaccuucugcuucgccagcggccagaacaucaccgaggaguucuaccaguccacgugcagcgccgucuccaagggguaccucagcgcccugcggaccggcugguacaccuccgugaucaccaucgagcugagcaacaucaaggagaacaagugcaacgggaccgacgccaaggugaagcucaucaagcaggagcuggacaaguacaagaacgcggucacggagcugcagcuccugaugcaguccaccccggcaaccggcuccggcuccgccaucugcagcggcgucgccgugugcaaggugcugcaccucgagggggaggucaacaagaucaagagcgcccugcuguccaccaacaaggccguggugagccucuccaacggcgucagcgugcugaccuucaaggugcuggaccucaagaacuacaucgacaagcagcugcugcccauccugaacaagcagagcugcuccaucagcaacaucgagacggugaucgaguuccagcagaagaacaaccggcuccuggagaucacccgcgaguucagcgugaacgccggggucaccacccccguguccacguacaugcugaccaacagcgagcuccugucccugaucaacgacaugccgaucaccaacgaccagaagaagcucaugagcaacaacgugcagaucguccggcagcaguccuacagcaucaugugcaucaucaaggaggaggugcuggcguacgugguccagcugccccucuacggcgugaucgacacccccugcuggaagcugcacacgagcccccugugcaccaccaacaccaaggagggguccaacaucugccucacgcgcaccgaccggggcugguacugcgacaacgccggcagcgucuccuucuucccgcaggccgagaccugcaaggugcagagcaaccgcguguucugcgacaccaugaacucccggacgcugcccagcgagguaaaccucugcaacgucgacaucuucaaccccaaguacgacugcaagaucaugaccuccaagaccgacgugagcuccagcgugaucaccucccugggggccaucgucagcugcuacggcaagacgaagugcaccgccagcaacaagaaccgggggaucaucaagaccuucuccaacggcugcgacuacgugagcaacaagggcguggacaccguguccgucgggaacacccuguacugcgugaacaagcaggagggcaagagccucuacgugaagggggagcccaucaucaacuucuacgacccgcuggucuuccccuccgacgaguucgacgcgagcaucucccaggugaacgagaagaucaaccagagccuggccuucauccgcaaguccgacgagcugcuccacaacgugaacgccggcaagagcacgaccaacaucaugaucaccaccaucaucaucgucaucaucgugauccugcugucccucaucgccguggggcugcugcucuacugcaaggcccgguga

SEQ ID NO: 4959 - RNA, 1545 nt, Artificial Sequence
  derived and/or modified CDS sequence (opt1) from HRSV(A2)__F-del_DSCav1_mut4
auggagcugcucauccugaaggccaacgccaucaccaccauccugacggcggugaccuucugcuucgccagcggccagaacaucaccgaggaguucuaccaguccacgugcagcgccgucuccaagggguaccucagcgcccugcgcaccggcugguacaccuccgugaucaccaucgagcugagcaacaucaaggagaacaagugcaacgggaccgacgccaaggugaagcucaucaagcaggagcuggacaaguacaagaacgcggucacggagcugcagcuccugaugcaguccacccccgccaccggcagcggguccgccaucugcagcggcguggccgugugcaagguccugcaccucgagggcgaggugaacaagaucaaguccgcgcugcugagcaccaacaaggccguggucucccucagcaacgggguguccgugcugacguucaagguccuggaccucaagaacuacaucgacaagcagcugcugccgauccucaacaagcagagcugcuccaucagcaacaucgagaccgugaucgaguuccagcagaagaacaaccggcugcuggagaucacccgcgaguucuccgugaacgccggcgucaccacgcccgugagcaccuacaugcucaccaacagcgagcugcugucccucaucaacgacaugcccaucaccaacgaccagaagaagcugaugagcaacaacgugcagaucguccggcagcaguccuacagcaucaugugcaucaucaaggaggaggugcuggccuacgugguccagcucccccuguacggggugaucgacacgccgugcuggaagcugcacaccagcccccucugcaccaccaacacgaaggagggcuccaacaucugccugacccgcaccgaccgggggugguacugcgacaacgccggcuccgugagcuucuucccccaggcggagaccugcaagguccaguccaaccgcguguucugcgacacgaugaacagccggacccuccccuccgaggucaaccugugcaacguggacaucuucaacccgaaguacgacugcaagaucaugaccagcaagaccgacguguccagcuccgucaucacgagccugggcgccaucguguccugcuacgggaagaccaagugcaccgccagcaacaagaaccggggcaucaucaagaccuucuccaacgggugcgacuacgugagcaacaagggcgucgacacggugagcgugggcaacacccucuacugcgucaacaagcaggaggggaagucccuguacgugaagggcgagcccaucaucaacuucuacgacccccugguguuccccagcgacgaguucgacgccuccaucagccaggucaacgagaagaucaaccagucccucgccuucauccgcaagagcgacgagcugcugcacaacgugaacgcggggaaguccaccaccaacaucaugaucaccacgaucaucaucgugaucaucgucauccuccugagccugaucgccgugggccuccugcuguacugcaaggcccgguga

SEQ ID NO: 4960 - RNA, 1545 nt, Artificial Sequence
  derived and/or modified CDS sequence (opt2) from HRSV(A2)__F-del_DSCav1_mut4
auggagcuccucauccucaaggccaacgccaucaccaccauccucaccgccgucaccuucugcuucgccuccggccagaacaucaccgaggaguucuaccaguccaccugcuccgccgucuccaagggcuaccucuccgcccuccgcaccggcugguacaccuccgucaucaccaucgagcucuccaacaucaaggagaacaagugcaacggcaccgacgccaaggucaagcucaucaagcaggagcucgacaaguacaagaacgccgucaccgagcuccagcuccucaugcaguccacccccgccaccggcuccggcuccgccaucugcuccggcgucgccgucugcaagguccuccaccucgagggcgaggucaacaagaucaaguccgcccuccucuccaccaacaaggccgucgucucccucuccaacggcgucuccguccucaccuucaagguccucgaccucaagaacuacaucgacaagcagcuccuccccauccucaacaagcaguccugcuccaucuccaacaucgagaccgucaucgaguuccagcagaagaacaaccgccuccucgagaucacccgcgaguucuccgucaacgccggcgucaccacccccgucuccaccuacaugcucaccaacuccgagcuccucucccucaucaacgacaugcccaucaccaacgaccagaagaagcucauguccaacaacguccagaucguccgccagcaguccuacuccaucaugugcaucaucaaggaggagguccucgccuacgucguccagcucccccucuacggcgucaucgacacccccugcuggaagcuccacaccuccccccucugcaccaccaacaccaaggagggcuccaacaucugccucacccgcaccgaccgcggcugguacugcgacaacgccggcuccgucuccuucuucccccaggccgagaccugcaagguccaguccaaccgcgucuucugcgacaccaugaacucccgcacccuccccuccgaggucaaccucugcaacgucgacaucuucaaccccaaguacgacugcaagaucaugaccuccaagaccgacgucuccuccuccgucaucaccucccucggcgccaucgucuccugcuacggcaagaccaagugcaccgccuccaacaagaaccgcggcaucaucaagaccuucuccaacggcugcgacuacgucuccaacaagggcgucgacaccgucuccgucggcaacacccucuacugcgucaacaagcaggagggcaagucccucuacgucaagggcgagcccaucaucaacuucuacgacccccucgucuuccccuccgacgaguucgacgccuccaucucccaggucaacgagaagaucaaccagucccucgccuucauccgcaaguccgacgagcuccuccacaacgucaacgccggcaaguccaccaccaacaucaugaucaccaccaucaucaucgucaucaucgucauccuccucucccucaucgccgucggccuccuccucuacugcaaggcccgcuga

SEQ ID NO: 4961 - RNA, 1545 nt, Artificial Sequence
  derived and/or modified CDS sequence (opt3) from HRSV(A2)__F-del_DSCav1_mut4
auggagcugcucauccuuaaggccaacgcuauuaccacaauacugacugcagugacguucugcuuugccagcggccagaauaucaccgaagaguucuaccaauccacauguucugcggucucaaaaggguauuugagugcuuuaagaacuggaugguacaccagcguuauuacaaucgaacuguccaacauuaaggagaauaaaugcaacgguaccgacgccaaggugaaacuaaucaagcaggaacucgauaaguauaaaaaugcaguaacugagcugcagcuucugaugcagucuacacccgccaccggcucggggucagcuauauguagcggaguggcagucugcaagguguugcaccucgagggcgaaguuaacaaaaucaagagugcccugcuguccacgaauaaagcuguggucucucucagcaacgguguguccguauuaacuuuuaagguucuggaccuuaagaauuacauugauaaacaauugcugccuauccuaaacaagcagucauguaguauuagcaauaucgagaccgugauagaguuccagcagaaaaacaauaggcuccuggaaauuacacgggaguuuucugucaacgccggggugacuaccccaguguccacauauaugcuuaccaauucagaacuguugagccucaucaacgacaugccgauuacgaacgaucaaaagaaacugaugaguaauaacguccagaucguucgccagcagucuuacuccaucaugugcauuauaaaggaggaaguguuagcguauguagugcaacugccccucuacggagucaucgacacuccuuguuggaaacuucauacaagcccacugugcaccacuaauacaaaggagggcucgaacauuuguuugacccgaacggaucguggcugguacugcgacaaugcagggucuguguccuucuuuccccaggccgaaaccuguaagguucagucaaacagaguguucugcgauacaaugaauaguagaacucugccuagcgaggucaaccucugcaauguggacaucuuuaacccaaaauaugauuguaagauaaugaccuccaaaacagacguaucuagcucaguuauuaccagucugggagcuaucguguccugcuacgguaagacuaaauguacagccagcaauaagaacaggggcaucauuaagaccuucucuaaugggugcgauuaugucucaaacaaaggaguggacacugucagugugggcaauacgcuuuacuguguuaacaagcaagaggguaaaagccuguaugugaagggggaacccaucauuaacuuuuacgacccuuugguauucccauccgaugaguuugacgcaucuauaucgcaggucaaugagaaaaucaaccagagccucgcuuucauucggaaguccgaugaacuguuacacaaugugaacgccggaaagucaacaaccaauaucaugaucacuaccauuauaaucguuauuaucgugauucugcuaagucucaucgcggucggccugcuuuuguauugcaaagcccgcuga

SEQ ID NO: 4962 - RNA, 1545 nt, Artificial Sequence
  derived and/or modified CDS sequence (opt4) from HRSV(A2)__F-del_DSCav1_mut4
auggagcugcugauccugaaggccaacgccaucaccaccauccugaccgccgugaccuucugcuucgccagcggccagaacaucaccgaggaguucuaccagagcaccugcagcgccgugagcaagggcuaccugagcgcccugagaaccggcugguacaccagcgugaucaccaucgagcugagcaacaucaaggagaacaagugcaacggcaccgacgccaaggugaagcugaucaagcaggagcuggacaaguacaagaacgccgugaccgagcugcagcugcugaugcagagcacccccgccaccggcagcggcagcgccaucugcagcggcguggccgugugcaaggugcugcaccuggagggcgaggugaacaagaucaagagcgcccugcugagcaccaacaaggccguggugagccugagcaacggcgugagcgugcugaccuucaaggugcuggaccugaagaacuacaucgacaagcagcugcugcccauccugaacaagcagagcugcagcaucagcaacaucgagaccgugaucgaguuccagcagaagaacaacagacugcuggagaucaccagagaguucagcgugaacgccggcgugaccacccccgugagcaccuacaugcugaccaacagcgagcugcugagccugaucaacgacaugcccaucaccaacgaccagaagaagcugaugagcaacaacgugcagaucgugagacagcagagcuacagcaucaugugcaucaucaaggaggaggugcuggccuacguggugcagcugccccuguacggcgugaucgacacccccugcuggaagcugcacaccagcccccugugcaccaccaacaccaaggagggcagcaacaucugccugaccagaaccgacagaggcugguacugcgacaacgccggcagcgugagcuucuucccccaggccgagaccugcaaggugcagagcaacagaguguucugcgacaccaugaacagcagaacccugcccagcgaggugaaccugugcaacguggacaucuucaaccccaaguacgacugcaagaucaugaccagcaagaccgacgugagcagcagcgugaucaccagccugggcgccaucgugagcugcuacggcaagaccaagugcaccgccagcaacaagaacagaggcaucaucaagaccuucagcaacggcugcgacuacgugagcaacaagggcguggacaccgugagcgugggcaacacccuguacugcgugaacaagcaggagggcaagagccuguacgugaagggcgagcccaucaucaacuucuacgacccccugguguuccccagcgacgaguucgacgccagcaucagccaggugaacgagaagaucaaccagagccuggccuucaucagaaagagcgacgagcugcugcacaacgugaacgccggcaagagcaccaccaacaucaugaucaccaccaucaucaucgugaucaucgugauccugcugagccugaucgccgugggccugcugcuguacugcaaggccagauga

SEQ ID NO: 4963 - RNA, 1545 nt, Artificial Sequence
  derived and/or modified CDS sequence (opt5) from HRSV(A2)__F-del_DSCav1_mut4
auggagcugcucauccugaaggccaacgcuauuaccacaauccuuacggccgugaccuucugcuuugcgagcggccagaauauuacagaagaguucuaccaauccaccuguucugcugucagcaaaggguaucuguccgcccucagaacaggaugguacaccucuguuaucacaauugaacugagcaacaucaaggagaauaaaugcaacggcaccgacgccaaggugaaacuuaucaagcaggaacuggauaaguauaaaaaugcugugacggagcuccagcugcugaugcaguccacccccgccacagggucuggaagcgcuauuuguuccggcgucgccgugugcaagguucuccaccuggagggggaagugaacaaaaucaagagcgcgcuucugucuaccaauaaagccgucgugucccucagcaacggaguuucugugcugacauuuaagguccuugaccugaagaauuacauugauaaacaacuccugccuauccugaacaagcaguccuguagcauuucuaauaucgagaccgugauugaguuccagcagaaaaacaaucggcuccuggaaaucacgcgcgaguuuuccgugaacgcuggcgucacaaccccgguuagcacauauaugcuuaccaauuccgaacugcucucucugaucaacgacaugcccauuaccaacgaucaaaagaaacuuaugagcaauaacgugcagaucgugagacagcaguccuacagcauuaugugcaucauuaaggaggaaguccuggccuaugugguucaacucccucuguacggcgugaucgacacacccuguuggaaacugcauacgucuccucucugcaccacaaauaccaaggagggguccaacaucugucugacacggaccgaucgcggaugguacugcgacaaugcuggcagcgucucuuucuuuccccaggccgaaacguguaaggugcagagcaacagaguuuucugcgauacaaugaacuccagaacccugccuucugaggugaaucucugcaaugucgacauuuuuaacccgaaauaugauuguaagaucaugaccagcaaaacagacguguccagcucugucauuaccucccugggggcgaucgugagcugcuacggaaagacaaaauguacggccucuaauaagaaccggggcauuaucaagaccuucuccaaugggugcgauuauguuagcaacaaaggaguggacacagucuccgugggcaauacccuuuacuguguuaacaagcaagagggcaaaucucuguaugugaagggggaacccaucauuaacuuuuacgacccucucgucuuccccagcgaugaguuugacgcuuccaucucucaggugaaugagaaaauuaaccagagccuggccuucauccgcaaguccgaugaacugcuccacaaugugaacgcuggaaagagcacaaccaauauuaugaucacgaccauuaucaucguuauuaucgucauucugcuuucucugaucgccgugggccuccugcuguauugcaaagccagauga

SEQ ID NO: 4964 - RNA, 1545 nt, Artificial Sequence
  derived and/or modified CDS sequence (opt6) from HRSV(A2)__F-del_DSCav1_mut4
auggaacuuuuaauacuaaaagcuaacgccauaaccacuauacuaacagcagucacauucugcuucgcaucaggccaaaacauaaccgaagaauuuuaccaauccacuuguucagcagucuccaaaggauauuuauccgcacuucguacaggaugguauacaucaguaauaacaauagaacucuccaacauaaaagaaaauaaaugcaacggcaccgacgcaaaaguaaaacucaucaaacaagaauuagacaaauacaagaacgccguaacagaacuacaauuacuaaugcaaucaacacccgccacaggaucaggaucugcaauaugcucuggaguagcaguaugcaaaguauuacaccuagaaggagaaguaaacaaaaucaaaagcgcacuacuauccacaaacaaagcuguaguaucacuaucaaacggaguaucaguauuaacuuucaaaguacuugaucuaaaaaacuacauagacaaacaacuacuacccauauuaaacaaacaaucaugcucaauaagcaauauagaaacaguaauagaauuucaacaaaaaaacaacagacuacuagaaaucacaagggaauuuucaguaaaugccgguguuacaaccccaguaucaacauacaugcuaacuaacucagaacuacuauccuuaauaaacgauaugccaauaacaaacgaucaaaaaaaacuaauguccaacaacguacaaauaguaagacaacaaucauacucaaucaugugcauuauaaaagaagaagucuuagcauacguaguacaauuaccacuauacgguguaauagauacaccauguuggaaauuacacacaagcccacuaugcacaacuaacacaaaagaaggcucaaauauauguuuaacaagaacagaccgagguugguacugcgacaaugcaggaucaguaucauucuuuccacaagcagaaacauguaaaguucaauccaacagaguauucugcgacacaaugaacuccagaacacuaccuucagaaguaaaccucuguaacguagacauauuuaaucccaaguacgacugcaaaauaaugacaucgaaaacagacguaagcuccucagugauaacaucccucggcgccaucguauccuguuacgguaaaacuaaauguaccgccucaaacaaaaaccgcgguauuauaaaaacuuuuucuaauggcugcgauuacguaagcaacaaaggcgucgacacaguuuccguaggaaacacacuauacugcguaaacaaacaagaagguaaaucucuauacguaaaaggagaaccaauaauaaauuucuaugauccuuuaguauucccauccgaugaauuugacgccucuaucucacaagucaacgaaaaaauaaaucaaucauuagcauucauacgaaaaucagacgaacuacuacacaacguaaacgcaggaaaaucaacaaccaacauaaugauaaccacaauaauaauaguuauuauagugauacuauuauccuuaauugcagucggacuauuauuauacuguaaagcacgcuaa

SEQ ID NO: 4965 - RNA, 1545 nt, Artificial Sequence
  derived and/or modified CDS sequence (opt11) from HRSV(A2)__F-del_DSCav1_mut4
auggaacuccucauccucaaagccaaugccaucaccacaauccugacagcaguaaccuucugcuucgcauccggacaaaacaucaccgaagaauuuuaccagucaaccugcuccgcugucucaaaaggcuaccucucagcccuucgcaccggcugguacaccucggucauaacaauagaacucuccaauaucaaagaaaacaaaugcaacggcacugacgccaagguaaaacucaucaaacaggaacucgauaaauacaagaacgccguaacagaacuacaacuacucaugcaaucaacaccggccaccggcuccgguuccgccauaugcuccggaguggccgugugcaagguccuccaccuugaaggggaaguuaacaaaaucaaaucagcccuccucuccacuaacaaagccguaguaucccuaagcaacgguguauccguccucaccuucaaaguacuagaccuaaagaauuauaucgacaaacaacuccuccccauacucaacaaacaauccugcuccauaagcaacaucgaaacagucaucgaguuccagcagaaaaacaaccgacuccucgaaauaacccgcgaguucucagucaacgccggagucaccacacccgucagcaccuacaugcugaccaacuccgaacuccucuccuuaaucaaugacaugcccaucaccaaugaccaaaagaaacucaugucaaacaacguccaaauaguacgccaacaauccuacuccaucaugugcaucauaaaagaagaaguacucgccuacgucguccaacucccccucuacggcguaaucgacacccccugcuggaaacuacacacaagcccccucugcaccacaaacacuaaagagggcuccaacaucugucuaacccgcaccgaucgaggcugguacugcgacaacgccggaucugucucauucuucccccaagccgaaaccugcaaaguccaauccaaccgcgucuucugcgacaccaugaacucgagaacccucccuuccgaagucaaccuaugcaacgucgacauuuucaaccccaaauacgacugcaaaaucaugaccucgaaaaccgacguaucauccagcgucaucaccagccuaggcgcaaucgugagcugcuacggcaaaaccaaaugcaccgcgagcaauaaaaaccgcgggaucaucaaaacuuucuccaacggcugcgacuacgucuccaacaagggagucgauaccgucuccguaggcaacacccucuacugcgucaacaaacaagaaggcaaaucacuauacguaaaaggcgagccaaucauaaacuucuacgacccucuaguuuucccauccgacgaguucgacgcuagcaucucccaagucaacgagaaaaucaaccaaucccucgcauucauccgcaaauccgacgaacuccuccacaacguaaacgcaggcaaaucaacuacuaauauaaugaucacaaccaucauaauagucauaaucguaauccuccuaucccucaucgccgucggacuacugcucuacugcaaagcccgcuaa

SEQ ID NO: 4966 - RNA, 1821 nt, Artificial Sequence
  mRNA product Design a-1 comprising derived and/or modified sequence from HRSV(A2)__F-del_DSCav1_mut4 (opt1)
gggagagucccgcagucggcguccagcggcucugcuuguucgugugugugucguugcaggccuuauucaagcuuaccauggagcugcucauccugaaggccaacgccaucaccaccauccugacggcggugaccuucugcuucgccagcggccagaacaucaccgaggaguucuaccaguccacgugcagcgccgucuccaagggguaccucagcgcccugcggaccggcugguacaccuccgugaucaccaucgagcugagcaacaucaaggagaacaagugcaacgggaccgacgccaaggugaagcucaucaagcaggagcuggacaaguacaagaacgcggucacggagcugcagcuccugaugcaguccaccccggcaaccggcuccggcuccgccaucugcagcggcgucgccgugugcaaggugcugcaccucgagggggaggucaacaagaucaagagcgcccugcuguccaccaacaaggccguggugagccucuccaacggcgucagcgugcugaccuucaaggugcuggaccucaagaacuacaucgacaagcagcugcugcccauccugaacaagcagagcugcuccaucagcaacaucgagacggugaucgaguuccagcagaagaacaaccggcuccuggagaucacccgcgaguucagcgugaacgccggggucaccacccccguguccacguacaugcugaccaacagcgagcuccugucccugaucaacgacaugccgaucaccaacgaccagaagaagcucaugagcaacaacgugcagaucguccggcagcaguccuacagcaucaugugcaucaucaaggaggaggugcuggcguacgugguccagcugccccucuacggcgugaucgacacccccugcuggaagcugcacacgagcccccugugcaccaccaacaccaaggagggguccaacaucugccucacgcgcaccgaccggggcugguacugcgacaacgccggcagcgucuccuucuucccgcaggccgagaccugcaaggugcagagcaaccgcguguucugcgacaccaugaacucccggacgcugcccagcgagguaaaccucugcaacgucgacaucuucaaccccaaguacgacugcaagaucaugaccuccaagaccgacgugagcuccagcgugaucaccucccugggggccaucgucagcugcuacggcaagacgaagugcaccgccagcaacaagaaccgggggaucaucaagaccuucuccaacggcugcgacuacgugagcaacaagggcguggacaccguguccgucgggaacacccuguacugcgugaacaagcaggagggcaagagccucuacgugaagggggagcccaucaucaacuucuacgacccgcuggucuuccccuccgacgaguucgacgcgagcaucucccaggugaacgagaagaucaaccagagccuggccuucauccgcaaguccgacgagcugcuccacaacgugaacgccggcaagagcacgaccaacaucaugaucaccaccaucaucaucgucaucaucgugauccugcugucccucaucgccguggggcugcugcucuacugcaaggcccggugaggacuagucccuguucccagagcccacuuuuuuuucuuuuuuugaaauaaaauagccugucuuucagaucuaaaaaaaaaaaaaaaaaaaaaaaaaaaaaaaaaaaaaaaaaaaaaaaaaaaaaaaaaaaaaaaaugcaucccccccccccccccccccccccccccccccaaaggcucuuuucagagccaccagaauu

SEQ ID NO: 4967 - RNA, 1821 nt, Artificial Sequence
  mRNA product Design a-1 comprising derived and/or modified sequence from HRSV(A2)__F-del_DSCav1_mut4 (opt1)
gggagagucccgcagucggcguccagcggcucugcuuguucgugugugugucguugcaggccuuauucaagcuuaccauggagcugcucauccugaaggccaacgccaucaccaccauccugacggcggugaccuucugcuucgccagcggccagaacaucaccgaggaguucuaccaguccacgugcagcgccgucuccaagggguaccucagcgcccugcgcaccggcugguacaccuccgugaucaccaucgagcugagcaacaucaaggagaacaagugcaacgggaccgacgccaaggugaagcucaucaagcaggagcuggacaaguacaagaacgcggucacggagcugcagcuccugaugcaguccacccccgccaccggcagcggguccgccaucugcagcggcguggccgugugcaagguccugcaccucgagggcgaggugaacaagaucaaguccgcgcugcugagcaccaacaaggccguggucucccucagcaacgggguguccgugcugacguucaagguccuggaccucaagaacuacaucgacaagcagcugcugccgauccucaacaagcagagcugcuccaucagcaacaucgagaccgugaucgaguuccagcagaagaacaaccggcugcuggagaucacccgcgaguucuccgugaacgccggcgucaccacgcccgugagcaccuacaugcucaccaacagcgagcugcugucccucaucaacgacaugcccaucaccaacgaccagaagaagcugaugagcaacaacgugcagaucguccggcagcaguccuacagcaucaugugcaucaucaaggaggaggugcuggccuacgugguccagcucccccuguacggggugaucgacacgccgugcuggaagcugcacaccagcccccucugcaccaccaacacgaaggagggcuccaacaucugccugacccgcaccgaccgggggugguacugcgacaacgccggcuccgugagcuucuucccccaggcggagaccugcaagguccaguccaaccgcguguucugcgacacgaugaacagccggacccuccccuccgaggucaaccugugcaacguggacaucuucaacccgaaguacgacugcaagaucaugaccagcaagaccgacguguccagcuccgucaucacgagccugggcgccaucguguccugcuacgggaagaccaagugcaccgccagcaacaagaaccggggcaucaucaagaccuucuccaacgggugcgacuacgugagcaacaagggcgucgacacggugagcgugggcaacacccucuacugcgucaacaagcaggaggggaagucccuguacgugaagggcgagcccaucaucaacuucuacgacccccugguguuccccagcgacgaguucgacgccuccaucagccaggucaacgagaagaucaaccagucccucgccuucauccgcaagagcgacgagcugcugcacaacgugaacgcggggaaguccaccaccaacaucaugaucaccacgaucaucaucgugaucaucgucauccuccugagccugaucgccgugggccuccugcuguacugcaaggcccggugaggacuagucccuguucccagagcccacuuuuuuuucuuuuuuugaaauaaaauagccugucuuucagaucuaaaaaaaaaaaaaaaaaaaaaaaaaaaaaaaaaaaaaaaaaaaaaaaaaaaaaaaaaaaaaaaaugcaucccccccccccccccccccccccccccccccaaaggcucuuuucagagccaccagaauu

SEQ ID NO: 4968 - RNA, 1821 nt, Artificial Sequence
  mRNA product Design a-1 comprising derived and/or modified sequence from HRSV(A2)__F-del_DSCav1_mut4 (opt2)
gggagagucccgcagucggcguccagcggcucugcuuguucgugugugugucguugcaggccuuauucaagcuuaccauggagcuccucauccucaaggccaacgccaucaccaccauccucaccgccgucaccuucugcuucgccuccggccagaacaucaccgaggaguucuaccaguccaccugcuccgccgucuccaagggcuaccucuccgcccuccgcaccggcugguacaccuccgucaucaccaucgagcucuccaacaucaaggagaacaagugcaacggcaccgacgccaaggucaagcucaucaagcaggagcucgacaaguacaagaacgccgucaccgagcuccagcuccucaugcaguccacccccgccaccggcuccggcuccgccaucugcuccggcgucgccgucugcaagguccuccaccucgagggcgaggucaacaagaucaaguccgcccuccucuccaccaacaaggccgucgucucccucuccaacggcgucuccguccucaccuucaagguccucgaccucaagaacuacaucgacaagcagcuccuccccauccucaacaagcaguccugcuccaucuccaacaucgagaccgucaucgaguuccagcagaagaacaaccgccuccucgagaucacccgcgaguucuccgucaacgccggcgucaccacccccgucuccaccuacaugcucaccaacuccgagcuccucucccucaucaacgacaugcccaucaccaacgaccagaagaagcucauguccaacaacguccagaucguccgccagcaguccuacuccaucaugugcaucaucaaggaggagguccucgccuacgucguccagcucccccucuacggcgucaucgacacccccugcuggaagcuccacaccuccccccucugcaccaccaacaccaaggagggcuccaacaucugccucacccgcaccgaccgcggcugguacugcgacaacgccggcuccgucuccuucuucccccaggccgagaccugcaagguccaguccaaccgcgucuucugcgacaccaugaacucccgcacccuccccuccgaggucaaccucugcaacgucgacaucuucaaccccaaguacgacugcaagaucaugaccuccaagaccgacgucuccuccuccgucaucaccucccucggcgccaucgucuccugcuacggcaagaccaagugcaccgccuccaacaagaaccgcggcaucaucaagaccuucuccaacggcugcgacuacgucuccaacaagggcgucgacaccgucuccgucggcaacacccucuacugcgucaacaagcaggagggcaagucccucuacgucaagggcgagcccaucaucaacuucuacgacccccucgucuuccccuccgacgaguucgacgccuccaucucccaggucaacgagaagaucaaccagucccucgccuucauccgcaaguccgacgagcuccuccacaacgucaacgccggcaaguccaccaccaacaucaugaucaccaccaucaucaucgucaucaucgucauccuccucucccucaucgccgucggccuccuccucuacugcaaggcccgcugaggacuagucccuguucccagagcccacuuuuuuuucuuuuuuugaaauaaaauagccugucuuucagaucuaaaaaaaaaaaaaaaaaaaaaaaaaaaaaaaaaaaaaaaaaaaaaaaaaaaaaaaaaaaaaaaaugcaucccccccccccccccccccccccccccccccaaaggcucuuuucagagccaccagaauu

SEQ ID NO: 4969 - RNA, 1821 nt, Artificial Sequence
  mRNA product Design a-1 comprising derived and/or modified sequence from HRSV(A2)__F-del_DSCav1_mut4 (opt3)
gggagagucccgcagucggcguccagcggcucugcuuguucgugugugugucguugcaggccuuauucaagcuuaccauggagcugcucauccuuaaggccaacgcuauuaccacaauacugacugcagugacguucugcuuugccagcggccagaauaucaccgaagaguucuaccaauccacauguucugcggucucaaaaggguauuugagugcuuuaagaacuggaugguacaccagcguuauuacaaucgaacuguccaacauuaaggagaauaaaugcaacgguaccgacgccaaggugaaacuaaucaagcaggaacucgauaaguauaaaaaugcaguaacugagcugcagcuucugaugcagucuacacccgccaccggcucggggucagcuauauguagcggaguggcagucugcaagguguugcaccucgagggcgaaguuaacaaaaucaagagugcccugcuguccacgaauaaagcuguggucucucucagcaacgguguguccguauuaacuuuuaagguucuggaccuuaagaauuacauugauaaacaauugcugccuauccuaaacaagcagucauguaguauuagcaauaucgagaccgugauagaguuccagcagaaaaacaauaggcuccuggaaauuacacgggaguuuucugucaacgccggggugacuaccccaguguccacauauaugcuuaccaauucagaacuguugagccucaucaacgacaugccgauuacgaacgaucaaaagaaacugaugaguaauaacguccagaucguucgccagcagucuuacuccaucaugugcauuauaaaggaggaaguguuagcguauguagugcaacugccccucuacggagucaucgacacuccuuguuggaaacuucauacaagcccacugugcaccacuaauacaaaggagggcucgaacauuuguuugacccgaacggaucguggcugguacugcgacaaugcagggucuguguccuucuuuccccaggccgaaaccuguaagguucagucaaacagaguguucugcgauacaaugaauaguagaacucugccuagcgaggucaaccucugcaauguggacaucuuuaacccaaaauaugauuguaagauaaugaccuccaaaacagacguaucuagcucaguuauuaccagucugggagcuaucguguccugcuacgguaagacuaaauguacagccagcaauaagaacaggggcaucauuaagaccuucucuaaugggugcgauuaugucucaaacaaaggaguggacacugucagugugggcaauacgcuuuacuguguuaacaagcaagaggguaaaagccuguaugugaagggggaacccaucauuaacuuuuacgacccuuugguauucccauccgaugaguuugacgcaucuauaucgcaggucaaugagaaaaucaaccagagccucgcuuucauucggaaguccgaugaacuguuacacaaugugaacgccggaaagucaacaaccaauaucaugaucacuaccauuauaaucguuauuaucgugauucugcuaagucucaucgcggucggccugcuuuuguauugcaaagcccgcugaggacuagucccuguucccagagcccacuuuuuuuucuuuuuuugaaauaaaauagccugucuuucagaucuaaaaaaaaaaaaaaaaaaaaaaaaaaaaaaaaaaaaaaaaaaaaaaaaaaaaaaaaaaaaaaaaugcaucccccccccccccccccccccccccccccccaaaggcucuuuucagagccaccagaauu

SEQ ID NO: 4970 - RNA, 1821 nt, Artificial Sequence
  mRNA product Design a-1 comprising derived and/or modified sequence from HRSV(A2)__F-del_DSCav1_mut4 (opt4)
gggagagucccgcagucggcguccagcggcucugcuuguucgugugugugucguugcaggccuuauucaagcuuaccauggagcugcugauccugaaggccaacgccaucaccaccauccugaccgccgugaccuucugcuucgccagcggccagaacaucaccgaggaguucuaccagagcaccugcagcgccgugagcaagggcuaccugagcgcccugagaaccggcugguacaccagcgugaucaccaucgagcugagcaacaucaaggagaacaagugcaacggcaccgacgccaaggugaagcugaucaagcaggagcuggacaaguacaagaacgccgugaccgagcugcagcugcugaugcagagcacccccgccaccggcagcggcagcgccaucugcagcggcguggccgugugcaaggugcugcaccuggagggcgaggugaacaagaucaagagcgcccugcugagcaccaacaaggccguggugagccugagcaacggcgugagcgugcugaccuucaaggugcuggaccugaagaacuacaucgacaagcagcugcugcccauccugaacaagcagagcugcagcaucagcaacaucgagaccgugaucgaguuccagcagaagaacaacagacugcuggagaucaccagagaguucagcgugaacgccggcgugaccacccccgugagcaccuacaugcugaccaacagcgagcugcugagccugaucaacgacaugcccaucaccaacgaccagaagaagcugaugagcaacaacgugcagaucgugagacagcagagcuacagcaucaugugcaucaucaaggaggaggugcuggccuacguggugcagcugccccuguacggcgugaucgacacccccugcuggaagcugcacaccagcccccugugcaccaccaacaccaaggagggcagcaacaucugccugaccagaaccgacagaggcugguacugcgacaacgccggcagcgugagcuucuucccccaggccgagaccugcaaggugcagagcaacagaguguucugcgacaccaugaacagcagaacccugcccagcgaggugaaccugugcaacguggacaucuucaaccccaaguacgacugcaagaucaugaccagcaagaccgacgugagcagcagcgugaucaccagccugggcgccaucgugagcugcuacggcaagaccaagugcaccgccagcaacaagaacagaggcaucaucaagaccuucagcaacggcugcgacuacgugagcaacaagggcguggacaccgugagcgugggcaacacccuguacugcgugaacaagcaggagggcaagagccuguacgugaagggcgagcccaucaucaacuucuacgacccccugguguuccccagcgacgaguucgacgccagcaucagccaggugaacgagaagaucaaccagagccuggccuucaucagaaagagcgacgagcugcugcacaacgugaacgccggcaagagcaccaccaacaucaugaucaccaccaucaucaucgugaucaucgugauccugcugagccugaucgccgugggccugcugcuguacugcaaggccagaugaggacuagucccuguucccagagcccacuuuuuuuucuuuuuuugaaauaaaauagccugucuuucagaucuaaaaaaaaaaaaaaaaaaaaaaaaaaaaaaaaaaaaaaaaaaaaaaaaaaaaaaaaaaaaaaaaugcaucccccccccccccccccccccccccccccccaaaggcucuuuucagagccaccagaauu

SEQ ID NO: 4971 - RNA, 1821 nt, Artificial Sequence
  mRNA product Design a-1 comprising derived and/or modified sequence from HRSV(A2)__F-del_DSCav1_mut4 (opt5)
gggagagucccgcagucggcguccagcggcucugcuuguucgugugugugucguugcaggccuuauucaagcuuaccauggagcugcucauccugaaggccaacgcuauuaccacaauccuuacggccgugaccuucugcuuugcgagcggccagaauauuacagaagaguucuaccaauccaccuguucugcugucagcaaaggguaucuguccgcccucagaacaggaugguacaccucuguuaucacaauugaacugagcaacaucaaggagaauaaaugcaacggcaccgacgccaaggugaaacuuaucaagcaggaacuggauaaguauaaaaaugcugugacggagcuccagcugcugaugcaguccacccccgccacagggucuggaagcgcuauuuguuccggcgucgccgugugcaagguucuccaccuggagggggaagugaacaaaaucaagagcgcgcuucugucuaccaauaaagccgucgugucccucagcaacggaguuucugugcugacauuuaagguccuugaccugaagaauuacauugauaaacaacuccugccuauccugaacaagcaguccuguagcauuucuaauaucgagaccgugauugaguuccagcagaaaaacaaucggcuccuggaaaucacgcgcgaguuuuccgugaacgcuggcgucacaaccccgguuagcacauauaugcuuaccaauuccgaacugcucucucugaucaacgacaugcccauuaccaacgaucaaaagaaacuuaugagcaauaacgugcagaucgugagacagcaguccuacagcauuaugugcaucauuaaggaggaaguccuggccuaugugguucaacucccucuguacggcgugaucgacacacccuguuggaaacugcauacgucuccucucugcaccacaaauaccaaggagggguccaacaucugucugacacggaccgaucgcggaugguacugcgacaaugcuggcagcgucucuuucuuuccccaggccgaaacguguaaggugcagagcaacagaguuuucugcgauacaaugaacuccagaacccugccuucugaggugaaucucugcaaugucgacauuuuuaacccgaaauaugauuguaagaucaugaccagcaaaacagacguguccagcucugucauuaccucccugggggcgaucgugagcugcuacggaaagacaaaauguacggccucuaauaagaaccggggcauuaucaagaccuucuccaaugggugcgauuauguuagcaacaaaggaguggacacagucuccgugggcaauacccuuuacuguguuaacaagcaagagggcaaaucucuguaugugaagggggaacccaucauuaacuuuuacgacccucucgucuuccccagcgaugaguuugacgcuuccaucucucaggugaaugagaaaauuaaccagagccuggccuucauccgcaaguccgaugaacugcuccacaaugugaacgcuggaaagagcacaaccaauauuaugaucacgaccauuaucaucguuauuaucgucauucugcuuucucugaucgccgugggccuccugcuguauugcaaagccagaugaggacuagucccuguucccagagcccacuuuuuuuucuuuuuuugaaauaaaauagccugucuuucagaucuaaaaaaaaaaaaaaaaaaaaaaaaaaaaaaaaaaaaaaaaaaaaaaaaaaaaaaaaaaaaaaaaugcaucccccccccccccccccccccccccccccccaaaggcucuuuucagagccaccagaauu

SEQ ID NO: 4972 - RNA, 1821 nt, Artificial Sequence
  mRNA product Design a-1 comprising derived and/or modified sequence from HRSV(A2)__F-del_DSCav1_mut4 (opt6)
gggagagucccgcagucggcguccagcggcucugcuuguucgugugugugucguugcaggccuuauucaagcuuaccauggaacuuuuaauacuaaaagcuaacgccauaaccacuauacuaacagcagucacauucugcuucgcaucaggccaaaacauaaccgaagaauuuuaccaauccacuuguucagcagucuccaaaggauauuuauccgcacuucguacaggaugguauacaucaguaauaacaauagaacucuccaacauaaaagaaaauaaaugcaacggcaccgacgcaaaaguaaaacucaucaaacaagaauuagacaaauacaagaacgccguaacagaacuacaauuacuaaugcaaucaacacccgccacaggaucaggaucugcaauaugcucuggaguagcaguaugcaaaguauuacaccuagaaggagaaguaaacaaaaucaaaagcgcacuacuauccacaaacaaagcuguaguaucacuaucaaacggaguaucaguauuaacuuucaaaguacuugaucuaaaaaacuacauagacaaacaacuacuacccauauuaaacaaacaaucaugcucaauaagcaauauagaaacaguaauagaauuucaacaaaaaaacaacagacuacuagaaaucacaagggaauuuucaguaaaugccgguguuacaaccccaguaucaacauacaugcuaacuaacucagaacuacuauccuuaauaaacgauaugccaauaacaaacgaucaaaaaaaacuaauguccaacaacguacaaauaguaagacaacaaucauacucaaucaugugcauuauaaaagaagaagucuuagcauacguaguacaauuaccacuauacgguguaauagauacaccauguuggaaauuacacacaagcccacuaugcacaacuaacacaaaagaaggcucaaauauauguuuaacaagaacagaccgagguugguacugcgacaaugcaggaucaguaucauucuuuccacaagcagaaacauguaaaguucaauccaacagaguauucugcgacacaaugaacuccagaacacuaccuucagaaguaaaccucuguaacguagacauauuuaaucccaaguacgacugcaaaauaaugacaucgaaaacagacguaagcuccucagugauaacaucccucggcgccaucguauccuguuacgguaaaacuaaauguaccgccucaaacaaaaaccgcgguauuauaaaaacuuuuucuaauggcugcgauuacguaagcaacaaaggcgucgacacaguuuccguaggaaacacacuauacugcguaaacaaacaagaagguaaaucucuauacguaaaaggagaaccaauaauaaauuucuaugauccuuuaguauucccauccgaugaauuugacgccucuaucucacaagucaacgaaaaaauaaaucaaucauuagcauucauacgaaaaucagacgaacuacuacacaacguaaacgcaggaaaaucaacaaccaacauaaugauaaccacaauaauaauaguuauuauagugauacuauuauccuuaauugcagucggacuauuauuauacuguaaagcacgcuaaggacuagucccuguucccagagcccacuuuuuuuucuuuuuuugaaauaaaauagccugucuuucagaucuaaaaaaaaaaaaaaaaaaaaaaaaaaaaaaaaaaaaaaaaaaaaaaaaaaaaaaaaaaaaaaaaugcaucccccccccccccccccccccccccccccccaaaggcucuuuucagagccaccagaauu

SEQ ID NO: 4973 - RNA, 1821 nt, Artificial Sequence
  mRNA product Design a-1 comprising derived and/or modified sequence from HRSV(A2)__F-del_DSCav1_mut4 (opt11)
gggagagucccgcagucggcguccagcggcucugcuuguucgugugugugucguugcaggccuuauucaagcuuaccauggaacuccucauccucaaagccaaugccaucaccacaauccugacagcaguaaccuucugcuucgcauccggacaaaacaucaccgaagaauuuuaccagucaaccugcuccgcugucucaaaaggcuaccucucagcccuucgcaccggcugguacaccucggucauaacaauagaacucuccaauaucaaagaaaacaaaugcaacggcacugacgccaagguaaaacucaucaaacaggaacucgauaaauacaagaacgccguaacagaacuacaacuacucaugcaaucaacaccggccaccggcuccgguuccgccauaugcuccggaguggccgugugcaagguccuccaccuugaaggggaaguuaacaaaaucaaaucagcccuccucuccacuaacaaagccguaguaucccuaagcaacgguguauccguccucaccuucaaaguacuagaccuaaagaauuauaucgacaaacaacuccuccccauacucaacaaacaauccugcuccauaagcaacaucgaaacagucaucgaguuccagcagaaaaacaaccgacuccucgaaauaacccgcgaguucucagucaacgccggagucaccacacccgucagcaccuacaugcugaccaacuccgaacuccucuccuuaaucaaugacaugcccaucaccaaugaccaaaagaaacucaugucaaacaacguccaaauaguacgccaacaauccuacuccaucaugugcaucauaaaagaagaaguacucgccuacgucguccaacucccccucuacggcguaaucgacacccccugcuggaaacuacacacaagcccccucugcaccacaaacacuaaagagggcuccaacaucugucuaacccgcaccgaucgaggcugguacugcgacaacgccggaucugucucauucuucccccaagccgaaaccugcaaaguccaauccaaccgcgucuucugcgacaccaugaacucgagaacccucccuuccgaagucaaccuaugcaacgucgacauuuucaaccccaaauacgacugcaaaaucaugaccucgaaaaccgacguaucauccagcgucaucaccagccuaggcgcaaucgugagcugcuacggcaaaaccaaaugcaccgcgagcaauaaaaaccgcgggaucaucaaaacuuucuccaacggcugcgacuacgucuccaacaagggagucgauaccgucuccguaggcaacacccucuacugcgucaacaaacaagaaggcaaaucacuauacguaaaaggcgagccaaucauaaacuucuacgacccucuaguuuucccauccgacgaguucgacgcuagcaucucccaagucaacgagaaaaucaaccaaucccucgcauucauccgcaaauccgacgaacuccuccacaacguaaacgcaggcaaaucaacuacuaauauaaugaucacaaccaucauaauagucauaaucguaauccuccuaucccucaucgccgucggacuacugcucuacugcaaagcccgcuaaggacuagucccuguucccagagcccacuuuuuuuucuuuuuuugaaauaaaauagccugucuuucagaucuaaaaaaaaaaaaaaaaaaaaaaaaaaaaaaaaaaaaaaaaaaaaaaaaaaaaaaaaaaaaaaaaugcaucccccccccccccccccccccccccccccccaaaggcucuuuucagagccaccagaauu

SEQ ID NO: 4974 - RNA, 1840 nt, Artificial Sequence
  mRNA product Design a-2 comprising derived and/or modified sequence from HRSV(A2)__F-del_DSCav1_mut4 (opt1)
gggagaguccgcucagccagguugcagaagcggcuuagcguguguccuaaucuucucucugcguguagguaggccugugccgcaaacaagcuuaccauggagcugcucauccugaaggccaacgccaucaccaccauccugacggcggugaccuucugcuucgccagcggccagaacaucaccgaggaguucuaccaguccacgugcagcgccgucuccaagggguaccucagcgcccugcggaccggcugguacaccuccgugaucaccaucgagcugagcaacaucaaggagaacaagugcaacgggaccgacgccaaggugaagcucaucaagcaggagcuggacaaguacaagaacgcggucacggagcugcagcuccugaugcaguccaccccggcaaccggcuccggcuccgccaucugcagcggcgucgccgugugcaaggugcugcaccucgagggggaggucaacaagaucaagagcgcccugcuguccaccaacaaggccguggugagccucuccaacggcgucagcgugcugaccuucaaggugcuggaccucaagaacuacaucgacaagcagcugcugcccauccugaacaagcagagcugcuccaucagcaacaucgagacggugaucgaguuccagcagaagaacaaccggcuccuggagaucacccgcgaguucagcgugaacgccggggucaccacccccguguccacguacaugcugaccaacagcgagcuccugucccugaucaacgacaugccgaucaccaacgaccagaagaagcucaugagcaacaacgugcagaucguccggcagcaguccuacagcaucaugugcaucaucaaggaggaggugcuggcguacgugguccagcugccccucuacggcgugaucgacacccccugcuggaagcugcacacgagcccccugugcaccaccaacaccaaggagggguccaacaucugccucacgcgcaccgaccggggcugguacugcgacaacgccggcagcgucuccuucuucccgcaggccgagaccugcaaggugcagagcaaccgcguguucugcgacaccaugaacucccggacgcugcccagcgagguaaaccucugcaacgucgacaucuucaaccccaaguacgacugcaagaucaugaccuccaagaccgacgugagcuccagcgugaucaccucccugggggccaucgucagcugcuacggcaagacgaagugcaccgccagcaacaagaaccgggggaucaucaagaccuucuccaacggcugcgacuacgugagcaacaagggcguggacaccguguccgucgggaacacccuguacugcgugaacaagcaggagggcaagagccucuacgugaagggggagcccaucaucaacuucuacgacccgcuggucuuccccuccgacgaguucgacgcgagcaucucccaggugaacgagaagaucaaccagagccuggccuucauccgcaaguccgacgagcugcuccacaacgugaacgccggcaagagcacgaccaacaucaugaucaccaccaucaucaucgucaucaucgugauccugcugucccucaucgccguggggcugcugcucuacugcaaggcccggugaggacuagucccuguucccagagcccacuuuuuuuucuuuuuuugaaauaaaauagccugucuuucagaucuaaaaaaaaaaaaaaaaaaaaaaaaaaaaaaaaaaaaaaaaaaaaaaaaaaaaaaaaaaaaaaaaugcaucccccccccccccccccccccccccccccccaaaggcucuuuucagagccaccagaauu

SEQ ID NO: 4975 - RNA, 1840 nt, Artificial Sequence
  mRNA product Design a-2 comprising derived and/or modified sequence from HRSV(A2)__F-del_DSCav1_mut4 (opt1)
gggagaguccgcucagccagguugcagaagcggcuuagcguguguccuaaucuucucucugcguguagguaggccugugccgcaaacaagcuuaccauggagcugcucauccugaaggccaacgccaucaccaccauccugacggcggugaccuucugcuucgccagcggccagaacaucaccgaggaguucuaccaguccacgugcagcgccgucuccaagggguaccucagcgcccugcgcaccggcugguacaccuccgugaucaccaucgagcugagcaacaucaaggagaacaagugcaacgggaccgacgccaaggugaagcucaucaagcaggagcuggacaaguacaagaacgcggucacggagcugcagcuccugaugcaguccacccccgccaccggcagcggguccgccaucugcagcggcguggccgugugcaagguccugcaccucgagggcgaggugaacaagaucaaguccgcgcugcugagcaccaacaaggccguggucucccucagcaacgggguguccgugcugacguucaagguccuggaccucaagaacuacaucgacaagcagcugcugccgauccucaacaagcagagcugcuccaucagcaacaucgagaccgugaucgaguuccagcagaagaacaaccggcugcuggagaucacccgcgaguucuccgugaacgccggcgucaccacgcccgugagcaccuacaugcucaccaacagcgagcugcugucccucaucaacgacaugcccaucaccaacgaccagaagaagcugaugagcaacaacgugcagaucguccggcagcaguccuacagcaucaugugcaucaucaaggaggaggugcuggccuacgugguccagcucccccuguacggggugaucgacacgccgugcuggaagcugcacaccagcccccucugcaccaccaacacgaaggagggcuccaacaucugccugacccgcaccgaccgggggugguacugcgacaacgccggcuccgugagcuucuucccccaggcggagaccugcaagguccaguccaaccgcguguucugcgacacgaugaacagccggacccuccccuccgaggucaaccugugcaacguggacaucuucaacccgaaguacgacugcaagaucaugaccagcaagaccgacguguccagcuccgucaucacgagccugggcgccaucguguccugcuacgggaagaccaagugcaccgccagcaacaagaaccggggcaucaucaagaccuucuccaacgggugcgacuacgugagcaacaagggcgucgacacggugagcgugggcaacacccucuacugcgucaacaagcaggaggggaagucccuguacgugaagggcgagcccaucaucaacuucuacgacccccugguguuccccagcgacgaguucgacgccuccaucagccaggucaacgagaagaucaaccagucccucgccuucauccgcaagagcgacgagcugcugcacaacgugaacgcggggaaguccaccaccaacaucaugaucaccacgaucaucaucgugaucaucgucauccuccugagccugaucgccgugggccuccugcuguacugcaaggcccggugaggacuagucccuguucccagagcccacuuuuuuuucuuuuuuugaaauaaaauagccugucuuucagaucuaaaaaaaaaaaaaaaaaaaaaaaaaaaaaaaaaaaaaaaaaaaaaaaaaaaaaaaaaaaaaaaaugcaucccccccccccccccccccccccccccccccaaaggcucuuuucagagccaccagaauu

SEQ ID NO: 4976 - RNA, 1840 nt, Artificial Sequence
  mRNA product Design a-2 comprising derived and/or modified sequence from HRSV(A2)__F-del_DSCav1_mut4 (opt2)
gggagaguccgcucagccagguugcagaagcggcuuagcguguguccuaaucuucucucugcguguagguaggccugugccgcaaacaagcuuaccauggagcuccucauccucaaggccaacgccaucaccaccauccucaccgccgucaccuucugcuucgccuccggccagaacaucaccgaggaguucuaccaguccaccugcuccgccgucuccaagggcuaccucuccgcccuccgcaccggcugguacaccuccgucaucaccaucgagcucuccaacaucaaggagaacaagugcaacggcaccgacgccaaggucaagcucaucaagcaggagcucgacaaguacaagaacgccgucaccgagcuccagcuccucaugcaguccacccccgccaccggcuccggcuccgccaucugcuccggcgucgccgucugcaagguccuccaccucgagggcgaggucaacaagaucaaguccgcccuccucuccaccaacaaggccgucgucucccucuccaacggcgucuccguccucaccuucaagguccucgaccucaagaacuacaucgacaagcagcuccuccccauccucaacaagcaguccugcuccaucuccaacaucgagaccgucaucgaguuccagcagaagaacaaccgccuccucgagaucacccgcgaguucuccgucaacgccggcgucaccacccccgucuccaccuacaugcucaccaacuccgagcuccucucccucaucaacgacaugcccaucaccaacgaccagaagaagcucauguccaacaacguccagaucguccgccagcaguccuacuccaucaugugcaucaucaaggaggagguccucgccuacgucguccagcucccccucuacggcgucaucgacacccccugcuggaagcuccacaccuccccccucugcaccaccaacaccaaggagggcuccaacaucugccucacccgcaccgaccgcggcugguacugcgacaacgccggcuccgucuccuucuucccccaggccgagaccugcaagguccaguccaaccgcgucuucugcgacaccaugaacucccgcacccuccccuccgaggucaaccucugcaacgucgacaucuucaaccccaaguacgacugcaagaucaugaccuccaagaccgacgucuccuccuccgucaucaccucccucggcgccaucgucuccugcuacggcaagaccaagugcaccgccuccaacaagaaccgcggcaucaucaagaccuucuccaacggcugcgacuacgucuccaacaagggcgucgacaccgucuccgucggcaacacccucuacugcgucaacaagcaggagggcaagucccucuacgucaagggcgagcccaucaucaacuucuacgacccccucgucuuccccuccgacgaguucgacgccuccaucucccaggucaacgagaagaucaaccagucccucgccuucauccgcaaguccgacgagcuccuccacaacgucaacgccggcaaguccaccaccaacaucaugaucaccaccaucaucaucgucaucaucgucauccuccucucccucaucgccgucggccuccuccucuacugcaaggcccgcugaggacuagucccuguucccagagcccacuuuuuuuucuuuuuuugaaauaaaauagccugucuuucagaucuaaaaaaaaaaaaaaaaaaaaaaaaaaaaaaaaaaaaaaaaaaaaaaaaaaaaaaaaaaaaaaaaugcaucccccccccccccccccccccccccccccccaaaggcucuuuucagagccaccagaauu

SEQ ID NO: 4977 - RNA, 1840 nt, Artificial Sequence
  mRNA product Design a-2 comprising derived and/or modified sequence from HRSV(A2)__F-del_DSCav1_mut4 (opt3)
gggagaguccgcucagccagguugcagaagcggcuuagcguguguccuaaucuucucucugcguguagguaggccugugccgcaaacaagcuuaccauggagcugcucauccuuaaggccaacgcuauuaccacaauacugacugcagugacguucugcuuugccagcggccagaauaucaccgaagaguucuaccaauccacauguucugcggucucaaaaggguauuugagugcuuuaagaacuggaugguacaccagcguuauuacaaucgaacuguccaacauuaaggagaauaaaugcaacgguaccgacgccaaggugaaacuaaucaagcaggaacucgauaaguauaaaaaugcaguaacugagcugcagcuucugaugcagucuacacccgccaccggcucggggucagcuauauguagcggaguggcagucugcaagguguugcaccucgagggcgaaguuaacaaaaucaagagugcccugcuguccacgaauaaagcuguggucucucucagcaacgguguguccguauuaacuuuuaagguucuggaccuuaagaauuacauugauaaacaauugcugccuauccuaaacaagcagucauguaguauuagcaauaucgagaccgugauagaguuccagcagaaaaacaauaggcuccuggaaauuacacgggaguuuucugucaacgccggggugacuaccccaguguccacauauaugcuuaccaauucagaacuguugagccucaucaacgacaugccgauuacgaacgaucaaaagaaacugaugaguaauaacguccagaucguucgccagcagucuuacuccaucaugugcauuauaaaggaggaaguguuagcguauguagugcaacugccccucuacggagucaucgacacuccuuguuggaaacuucauacaagcccacugugcaccacuaauacaaaggagggcucgaacauuuguuugacccgaacggaucguggcugguacugcgacaaugcagggucuguguccuucuuuccccaggccgaaaccuguaagguucagucaaacagaguguucugcgauacaaugaauaguagaacucugccuagcgaggucaaccucugcaauguggacaucuuuaacccaaaauaugauuguaagauaaugaccuccaaaacagacguaucuagcucaguuauuaccagucugggagcuaucguguccugcuacgguaagacuaaauguacagccagcaauaagaacaggggcaucauuaagaccuucucuaaugggugcgauuaugucucaaacaaaggaguggacacugucagugugggcaauacgcuuuacuguguuaacaagcaagaggguaaaagccuguaugugaagggggaacccaucauuaacuuuuacgacccuuugguauucccauccgaugaguuugacgcaucuauaucgcaggucaaugagaaaaucaaccagagccucgcuuucauucggaaguccgaugaacuguuacacaaugugaacgccggaaagucaacaaccaauaucaugaucacuaccauuauaaucguuauuaucgugauucugcuaagucucaucgcggucggccugcuuuuguauugcaaagcccgcugaggacuagucccuguucccagagcccacuuuuuuuucuuuuuuugaaauaaaauagccugucuuucagaucuaaaaaaaaaaaaaaaaaaaaaaaaaaaaaaaaaaaaaaaaaaaaaaaaaaaaaaaaaaaaaaaaugcaucccccccccccccccccccccccccccccccaaaggcucuuuucagagccaccagaauu

SEQ ID NO: 4978 - RNA, 1840 nt, Artificial Sequence
  mRNA product Design a-2 comprising derived and/or modified sequence from HRSV(A2)__F-del_DSCav1_mut4 (opt4)
gggagaguccgcucagccagguugcagaagcggcuuagcguguguccuaaucuucucucugcguguagguaggccugugccgcaaacaagcuuaccauggagcugcugauccugaaggccaacgccaucaccaccauccugaccgccgugaccuucugcuucgccagcggccagaacaucaccgaggaguucuaccagagcaccugcagcgccgugagcaagggcuaccugagcgcccugagaaccggcugguacaccagcgugaucaccaucgagcugagcaacaucaaggagaacaagugcaacggcaccgacgccaaggugaagcugaucaagcaggagcuggacaaguacaagaacgccgugaccgagcugcagcugcugaugcagagcacccccgccaccggcagcggcagcgccaucugcagcggcguggccgugugcaaggugcugcaccuggagggcgaggugaacaagaucaagagcgcccugcugagcaccaacaaggccguggugagccugagcaacggcgugagcgugcugaccuucaaggugcuggaccugaagaacuacaucgacaagcagcugcugcccauccugaacaagcagagcugcagcaucagcaacaucgagaccgugaucgaguuccagcagaagaacaacagacugcuggagaucaccagagaguucagcgugaacgccggcgugaccacccccgugagcaccuacaugcugaccaacagcgagcugcugagccugaucaacgacaugcccaucaccaacgaccagaagaagcugaugagcaacaacgugcagaucgugagacagcagagcuacagcaucaugugcaucaucaaggaggaggugcuggccuacguggugcagcugccccuguacggcgugaucgacacccccugcuggaagcugcacaccagcccccugugcaccaccaacaccaaggagggcagcaacaucugccugaccagaaccgacagaggcugguacugcgacaacgccggcagcgugagcuucuucccccaggccgagaccugcaaggugcagagcaacagaguguucugcgacaccaugaacagcagaacccugcccagcgaggugaaccugugcaacguggacaucuucaaccccaaguacgacugcaagaucaugaccagcaagaccgacgugagcagcagcgugaucaccagccugggcgccaucgugagcugcuacggcaagaccaagugcaccgccagcaacaagaacagaggcaucaucaagaccuucagcaacggcugcgacuacgugagcaacaagggcguggacaccgugagcgugggcaacacccuguacugcgugaacaagcaggagggcaagagccuguacgugaagggcgagcccaucaucaacuucuacgacccccugguguuccccagcgacgaguucgacgccagcaucagccaggugaacgagaagaucaaccagagccuggccuucaucagaaagagcgacgagcugcugcacaacgugaacgccggcaagagcaccaccaacaucaugaucaccaccaucaucaucgugaucaucgugauccugcugagccugaucgccgugggccugcugcuguacugcaaggccagaugaggacuagucccuguucccagagcccacuuuuuuuucuuuuuuugaaauaaaauagccugucuuucagaucuaaaaaaaaaaaaaaaaaaaaaaaaaaaaaaaaaaaaaaaaaaaaaaaaaaaaaaaaaaaaaaaaugcaucccccccccccccccccccccccccccccccaaaggcucuuuucagagccaccagaauu

SEQ ID NO: 4979 - RNA, 1840 nt, Artificial Sequence
  mRNA product Design a-2 comprising derived and/or modified sequence from HRSV(A2)__F-del_DSCav1_mut4 (opt5)
gggagaguccgcucagccagguugcagaagcggcuuagcguguguccuaaucuucucucugcguguagguaggccugugccgcaaacaagcuuaccauggagcugcucauccugaaggccaacgcuauuaccacaauccuuacggccgugaccuucugcuuugcgagcggccagaauauuacagaagaguucuaccaauccaccuguucugcugucagcaaaggguaucuguccgcccucagaacaggaugguacaccucuguuaucacaauugaacugagcaacaucaaggagaauaaaugcaacggcaccgacgccaaggugaaacuuaucaagcaggaacuggauaaguauaaaaaugcugugacggagcuccagcugcugaugcaguccacccccgccacagggucuggaagcgcuauuuguuccggcgucgccgugugcaagguucuccaccuggagggggaagugaacaaaaucaagagcgcgcuucugucuaccaauaaagccgucgugucccucagcaacggaguuucugugcugacauuuaagguccuugaccugaagaauuacauugauaaacaacuccugccuauccugaacaagcaguccuguagcauuucuaauaucgagaccgugauugaguuccagcagaaaaacaaucggcuccuggaaaucacgcgcgaguuuuccgugaacgcuggcgucacaaccccgguuagcacauauaugcuuaccaauuccgaacugcucucucugaucaacgacaugcccauuaccaacgaucaaaagaaacuuaugagcaauaacgugcagaucgugagacagcaguccuacagcauuaugugcaucauuaaggaggaaguccuggccuaugugguucaacucccucuguacggcgugaucgacacacccuguuggaaacugcauacgucuccucucugcaccacaaauaccaaggagggguccaacaucugucugacacggaccgaucgcggaugguacugcgacaaugcuggcagcgucucuuucuuuccccaggccgaaacguguaaggugcagagcaacagaguuuucugcgauacaaugaacuccagaacccugccuucugaggugaaucucugcaaugucgacauuuuuaacccgaaauaugauuguaagaucaugaccagcaaaacagacguguccagcucugucauuaccucccugggggcgaucgugagcugcuacggaaagacaaaauguacggccucuaauaagaaccggggcauuaucaagaccuucuccaaugggugcgauuauguuagcaacaaaggaguggacacagucuccgugggcaauacccuuuacuguguuaacaagcaagagggcaaaucucuguaugugaagggggaacccaucauuaacuuuuacgacccucucgucuuccccagcgaugaguuugacgcuuccaucucucaggugaaugagaaaauuaaccagagccuggccuucauccgcaaguccgaugaacugcuccacaaugugaacgcuggaaagagcacaaccaauauuaugaucacgaccauuaucaucguuauuaucgucauucugcuuucucugaucgccgugggccuccugcuguauugcaaagccagaugaggacuagucccuguucccagagcccacuuuuuuuucuuuuuuugaaauaaaauagccugucuuucagaucuaaaaaaaaaaaaaaaaaaaaaaaaaaaaaaaaaaaaaaaaaaaaaaaaaaaaaaaaaaaaaaaaugcaucccccccccccccccccccccccccccccccaaaggcucuuuucagagccaccagaauu

SEQ ID NO: 4980 - RNA, 1840 nt, Artificial Sequence
  mRNA product Design a-2 comprising derived and/or modified sequence from HRSV(A2)__F-del_DSCav1_mut4 (opt6)
gggagaguccgcucagccagguugcagaagcggcuuagcguguguccuaaucuucucucugcguguagguaggccugugccgcaaacaagcuuaccauggaacuuuuaauacuaaaagcuaacgccauaaccacuauacuaacagcagucacauucugcuucgcaucaggccaaaacauaaccgaagaauuuuaccaauccacuuguucagcagucuccaaaggauauuuauccgcacuucguacaggaugguauacaucaguaauaacaauagaacucuccaacauaaaagaaaauaaaugcaacggcaccgacgcaaaaguaaaacucaucaaacaagaauuagacaaauacaagaacgccguaacagaacuacaauuacuaaugcaaucaacacccgccacaggaucaggaucugcaauaugcucuggaguagcaguaugcaaaguauuacaccuagaaggagaaguaaacaaaaucaaaagcgcacuacuauccacaaacaaagcuguaguaucacuaucaaacggaguaucaguauuaacuuucaaaguacuugaucuaaaaaacuacauagacaaacaacuacuacccauauuaaacaaacaaucaugcucaauaagcaauauagaaacaguaauagaauuucaacaaaaaaacaacagacuacuagaaaucacaagggaauuuucaguaaaugccgguguuacaaccccaguaucaacauacaugcuaacuaacucagaacuacuauccuuaauaaacgauaugccaauaacaaacgaucaaaaaaaacuaauguccaacaacguacaaauaguaagacaacaaucauacucaaucaugugcauuauaaaagaagaagucuuagcauacguaguacaauuaccacuauacgguguaauagauacaccauguuggaaauuacacacaagcccacuaugcacaacuaacacaaaagaaggcucaaauauauguuuaacaagaacagaccgagguugguacugcgacaaugcaggaucaguaucauucuuuccacaagcagaaacauguaaaguucaauccaacagaguauucugcgacacaaugaacuccagaacacuaccuucagaaguaaaccucuguaacguagacauauuuaaucccaaguacgacugcaaaauaaugacaucgaaaacagacguaagcuccucagugauaacaucccucggcgccaucguauccuguuacgguaaaacuaaauguaccgccucaaacaaaaaccgcgguauuauaaaaacuuuuucuaauggcugcgauuacguaagcaacaaaggcgucgacacaguuuccguaggaaacacacuauacugcguaaacaaacaagaagguaaaucucuauacguaaaaggagaaccaauaauaaauuucuaugauccuuuaguauucccauccgaugaauuugacgccucuaucucacaagucaacgaaaaaauaaaucaaucauuagcauucauacgaaaaucagacgaacuacuacacaacguaaacgcaggaaaaucaacaaccaacauaaugauaaccacaauaauaauaguuauuauagugauacuauuauccuuaauugcagucggacuauuauuauacuguaaagcacgcuaaggacuagucccuguucccagagcccacuuuuuuuucuuuuuuugaaauaaaauagccugucuuucagaucuaaaaaaaaaaaaaaaaaaaaaaaaaaaaaaaaaaaaaaaaaaaaaaaaaaaaaaaaaaaaaaaaugcaucccccccccccccccccccccccccccccccaaaggcucuuuucagagccaccagaauu

SEQ ID NO: 4981 - RNA, 1840 nt, Artificial Sequence
  mRNA product Design a-2 comprising derived and/or modified sequence from HRSV(A2)__F-del_DSCav1_mut4 (opt11)
gggagaguccgcucagccagguugcagaagcggcuuagcguguguccuaaucuucucucugcguguagguaggccugugccgcaaacaagcuuaccauggaacuccucauccucaaagccaaugccaucaccacaauccugacagcaguaaccuucugcuucgcauccggacaaaacaucaccgaagaauuuuaccagucaaccugcuccgcugucucaaaaggcuaccucucagcccuucgcaccggcugguacaccucggucauaacaauagaacucuccaauaucaaagaaaacaaaugcaacggcacugacgccaagguaaaacucaucaaacaggaacucgauaaauacaagaacgccguaacagaacuacaacuacucaugcaaucaacaccggccaccggcuccgguuccgccauaugcuccggaguggccgugugcaagguccuccaccuugaaggggaaguuaacaaaaucaaaucagcccuccucuccacuaacaaagccguaguaucccuaagcaacgguguauccguccucaccuucaaaguacuagaccuaaagaauuauaucgacaaacaacuccuccccauacucaacaaacaauccugcuccauaagcaacaucgaaacagucaucgaguuccagcagaaaaacaaccgacuccucgaaauaacccgcgaguucucagucaacgccggagucaccacacccgucagcaccuacaugcugaccaacuccgaacuccucuccuuaaucaaugacaugcccaucaccaaugaccaaaagaaacucaugucaaacaacguccaaauaguacgccaacaauccuacuccaucaugugcaucauaaaagaagaaguacucgccuacgucguccaacucccccucuacggcguaaucgacacccccugcuggaaacuacacacaagcccccucugcaccacaaacacuaaagagggcuccaacaucugucuaacccgcaccgaucgaggcugguacugcgacaacgccggaucugucucauucuucccccaagccgaaaccugcaaaguccaauccaaccgcgucuucugcgacaccaugaacucgagaacccucccuuccgaagucaaccuaugcaacgucgacauuuucaaccccaaauacgacugcaaaaucaugaccucgaaaaccgacguaucauccagcgucaucaccagccuaggcgcaaucgugagcugcuacggcaaaaccaaaugcaccgcgagcaauaaaaaccgcgggaucaucaaaacuuucuccaacggcugcgacuacgucuccaacaagggagucgauaccgucuccguaggcaacacccucuacugcgucaacaaacaagaaggcaaaucacuauacguaaaaggcgagccaaucauaaacuucuacgacccucuaguuuucccauccgacgaguucgacgcuagcaucucccaagucaacgagaaaaucaaccaaucccucgcauucauccgcaaauccgacgaacuccuccacaacguaaacgcaggcaaaucaacuacuaauauaaugaucacaaccaucauaauagucauaaucguaauccuccuaucccucaucgccgucggacuacugcucuacugcaaagcccgcuaaggacuagucccuguucccagagcccacuuuuuuuucuuuuuuugaaauaaaauagccugucuuucagaucuaaaaaaaaaaaaaaaaaaaaaaaaaaaaaaaaaaaaaaaaaaaaaaaaaaaaaaaaaaaaaaaaugcaucccccccccccccccccccccccccccccccaaaggcucuuuucagagccaccagaauu

SEQ ID NO: 4982 - RNA, 1918 nt, Artificial Sequence
  mRNA product Design a-3 comprising derived and/or modified sequence from HRSV(A2)__F-del_DSCav1_mut4 (opt1)
gggagagggcgcuuggcuugcaaggacccugagcugcggcauugaagcacacccaacccaacucgacugaagucagccucacugaaccggaucugagaaucuucucucucugggcuugccagggcucuccgaaccuagcuagcauccucuucaauuccaacuagaaagcuuaccauggagcugcucauccugaaggccaacgccaucaccaccauccugacggcggugaccuucugcuucgccagcggccagaacaucaccgaggaguucuaccaguccacgugcagcgccgucuccaagggguaccucagcgcccugcggaccggcugguacaccuccgugaucaccaucgagcugagcaacaucaaggagaacaagugcaacgggaccgacgccaaggugaagcucaucaagcaggagcuggacaaguacaagaacgcggucacggagcugcagcuccugaugcaguccaccccggcaaccggcuccggcuccgccaucugcagcggcgucgccgugugcaaggugcugcaccucgagggggaggucaacaagaucaagagcgcccugcuguccaccaacaaggccguggugagccucuccaacggcgucagcgugcugaccuucaaggugcuggaccucaagaacuacaucgacaagcagcugcugcccauccugaacaagcagagcugcuccaucagcaacaucgagacggugaucgaguuccagcagaagaacaaccggcuccuggagaucacccgcgaguucagcgugaacgccggggucaccacccccguguccacguacaugcugaccaacagcgagcuccugucccugaucaacgacaugccgaucaccaacgaccagaagaagcucaugagcaacaacgugcagaucguccggcagcaguccuacagcaucaugugcaucaucaaggaggaggugcuggcguacgugguccagcugccccucuacggcgugaucgacacccccugcuggaagcugcacacgagcccccugugcaccaccaacaccaaggagggguccaacaucugccucacgcgcaccgaccggggcugguacugcgacaacgccggcagcgucuccuucuucccgcaggccgagaccugcaaggugcagagcaaccgcguguucugcgacaccaugaacucccggacgcugcccagcgagguaaaccucugcaacgucgacaucuucaaccccaaguacgacugcaagaucaugaccuccaagaccgacgugagcuccagcgugaucaccucccugggggccaucgucagcugcuacggcaagacgaagugcaccgccagcaacaagaaccgggggaucaucaagaccuucuccaacggcugcgacuacgugagcaacaagggcguggacaccguguccgucgggaacacccuguacugcgugaacaagcaggagggcaagagccucuacgugaagggggagcccaucaucaacuucuacgacccgcuggucuuccccuccgacgaguucgacgcgagcaucucccaggugaacgagaagaucaaccagagccuggccuucauccgcaaguccgacgagcugcuccacaacgugaacgccggcaagagcacgaccaacaucaugaucaccaccaucaucaucgucaucaucgugauccugcugucccucaucgccguggggcugcugcucuacugcaaggcccggugaggacuagucccuguucccagagcccacuuuuuuuucuuuuuuugaaauaaaauagccugucuuucagaucuaaaaaaaaaaaaaaaaaaaaaaaaaaaaaaaaaaaaaaaaaaaaaaaaaaaaaaaaaaaaaaaaugcaucccccccccccccccccccccccccccccccaaaggcucuuuucagagccaccagaauu

SEQ ID NO: 4983 - RNA, 1918 nt, Artificial Sequence
  mRNA product Design a-3 comprising derived and/or modified sequence from HRSV(A2)__F-del_DSCav1_mut4 (opt1)
gggagagggcgcuuggcuugcaaggacccugagcugcggcauugaagcacacccaacccaacucgacugaagucagccucacugaaccggaucugagaaucuucucucucugggcuugccagggcucuccgaaccuagcuagcauccucuucaauuccaacuagaaagcuuaccauggagcugcucauccugaaggccaacgccaucaccaccauccugacggcggugaccuucugcuucgccagcggccagaacaucaccgaggaguucuaccaguccacgugcagcgccgucuccaagggguaccucagcgcccugcgcaccggcugguacaccuccgugaucaccaucgagcugagcaacaucaaggagaacaagugcaacgggaccgacgccaaggugaagcucaucaagcaggagcuggacaaguacaagaacgcggucacggagcugcagcuccugaugcaguccacccccgccaccggcagcggguccgccaucugcagcggcguggccgugugcaagguccugcaccucgagggcgaggugaacaagaucaaguccgcgcugcugagcaccaacaaggccguggucucccucagcaacgggguguccgugcugacguucaagguccuggaccucaagaacuacaucgacaagcagcugcugccgauccucaacaagcagagcugcuccaucagcaacaucgagaccgugaucgaguuccagcagaagaacaaccggcugcuggagaucacccgcgaguucuccgugaacgccggcgucaccacgcccgugagcaccuacaugcucaccaacagcgagcugcugucccucaucaacgacaugcccaucaccaacgaccagaagaagcugaugagcaacaacgugcagaucguccggcagcaguccuacagcaucaugugcaucaucaaggaggaggugcuggccuacgugguccagcucccccuguacggggugaucgacacgccgugcuggaagcugcacaccagcccccucugcaccaccaacacgaaggagggcuccaacaucugccugacccgcaccgaccgggggugguacugcgacaacgccggcuccgugagcuucuucccccaggcggagaccugcaagguccaguccaaccgcguguucugcgacacgaugaacagccggacccuccccuccgaggucaaccugugcaacguggacaucuucaacccgaaguacgacugcaagaucaugaccagcaagaccgacguguccagcuccgucaucacgagccugggcgccaucguguccugcuacgggaagaccaagugcaccgccagcaacaagaaccggggcaucaucaagaccuucuccaacgggugcgacuacgugagcaacaagggcgucgacacggugagcgugggcaacacccucuacugcgucaacaagcaggaggggaagucccuguacgugaagggcgagcccaucaucaacuucuacgacccccugguguuccccagcgacgaguucgacgccuccaucagccaggucaacgagaagaucaaccagucccucgccuucauccgcaagagcgacgagcugcugcacaacgugaacgcggggaaguccaccaccaacaucaugaucaccacgaucaucaucgugaucaucgucauccuccugagccugaucgccgugggccuccugcuguacugcaaggcccggugaggacuagucccuguucccagagcccacuuuuuuuucuuuuuuugaaauaaaauagccugucuuucagaucuaaaaaaaaaaaaaaaaaaaaaaaaaaaaaaaaaaaaaaaaaaaaaaaaaaaaaaaaaaaaaaaaugcaucccccccccccccccccccccccccccccccaaaggcucuuuucagagccaccagaauu

SEQ ID NO: 4984 - RNA, 1918 nt, Artificial Sequence
  mRNA product Design a-3 comprising derived and/or modified sequence from HRSV(A2)__F-del_DSCav1_mut4 (opt2)
gggagagggcgcuuggcuugcaaggacccugagcugcggcauugaagcacacccaacccaacucgacugaagucagccucacugaaccggaucugagaaucuucucucucugggcuugccagggcucuccgaaccuagcuagcauccucuucaauuccaacuagaaagcuuaccauggagcuccucauccucaaggccaacgccaucaccaccauccucaccgccgucaccuucugcuucgccuccggccagaacaucaccgaggaguucuaccaguccaccugcuccgccgucuccaagggcuaccucuccgcccuccgcaccggcugguacaccuccgucaucaccaucgagcucuccaacaucaaggagaacaagugcaacggcaccgacgccaaggucaagcucaucaagcaggagcucgacaaguacaagaacgccgucaccgagcuccagcuccucaugcaguccacccccgccaccggcuccggcuccgccaucugcuccggcgucgccgucugcaagguccuccaccucgagggcgaggucaacaagaucaaguccgcccuccucuccaccaacaaggccgucgucucccucuccaacggcgucuccguccucaccuucaagguccucgaccucaagaacuacaucgacaagcagcuccuccccauccucaacaagcaguccugcuccaucuccaacaucgagaccgucaucgaguuccagcagaagaacaaccgccuccucgagaucacccgcgaguucuccgucaacgccggcgucaccacccccgucuccaccuacaugcucaccaacuccgagcuccucucccucaucaacgacaugcccaucaccaacgaccagaagaagcucauguccaacaacguccagaucguccgccagcaguccuacuccaucaugugcaucaucaaggaggagguccucgccuacgucguccagcucccccucuacggcgucaucgacacccccugcuggaagcuccacaccuccccccucugcaccaccaacaccaaggagggcuccaacaucugccucacccgcaccgaccgcggcugguacugcgacaacgccggcuccgucuccuucuucccccaggccgagaccugcaagguccaguccaaccgcgucuucugcgacaccaugaacucccgcacccuccccuccgaggucaaccucugcaacgucgacaucuucaaccccaaguacgacugcaagaucaugaccuccaagaccgacgucuccuccuccgucaucaccucccucggcgccaucgucuccugcuacggcaagaccaagugcaccgccuccaacaagaaccgcggcaucaucaagaccuucuccaacggcugcgacuacgucuccaacaagggcgucgacaccgucuccgucggcaacacccucuacugcgucaacaagcaggagggcaagucccucuacgucaagggcgagcccaucaucaacuucuacgacccccucgucuuccccuccgacgaguucgacgccuccaucucccaggucaacgagaagaucaaccagucccucgccuucauccgcaaguccgacgagcuccuccacaacgucaacgccggcaaguccaccaccaacaucaugaucaccaccaucaucaucgucaucaucgucauccuccucucccucaucgccgucggccuccuccucuacugcaaggcccgcugaggacuagucccuguucccagagcccacuuuuuuuucuuuuuuugaaauaaaauagccugucuuucagaucuaaaaaaaaaaaaaaaaaaaaaaaaaaaaaaaaaaaaaaaaaaaaaaaaaaaaaaaaaaaaaaaaugcaucccccccccccccccccccccccccccccccaaaggcucuuuucagagccaccagaauu

SEQ ID NO: 4985 - RNA, 1918 nt, Artificial Sequence
  mRNA product Design a-3 comprising derived and/or modified sequence from HRSV(A2)__F-del_DSCav1_mut4 (opt3)
gggagagggcgcuuggcuugcaaggacccugagcugcggcauugaagcacacccaacccaacucgacugaagucagccucacugaaccggaucugagaaucuucucucucugggcuugccagggcucuccgaaccuagcuagcauccucuucaauuccaacuagaaagcuuaccauggagcugcucauccuuaaggccaacgcuauuaccacaauacugacugcagugacguucugcuuugccagcggccagaauaucaccgaagaguucuaccaauccacauguucugcggucucaaaaggguauuugagugcuuuaagaacuggaugguacaccagcguuauuacaaucgaacuguccaacauuaaggagaauaaaugcaacgguaccgacgccaaggugaaacuaaucaagcaggaacucgauaaguauaaaaaugcaguaacugagcugcagcuucugaugcagucuacacccgccaccggcucggggucagcuauauguagcggaguggcagucugcaagguguugcaccucgagggcgaaguuaacaaaaucaagagugcccugcuguccacgaauaaagcuguggucucucucagcaacgguguguccguauuaacuuuuaagguucuggaccuuaagaauuacauugauaaacaauugcugccuauccuaaacaagcagucauguaguauuagcaauaucgagaccgugauagaguuccagcagaaaaacaauaggcuccuggaaauuacacgggaguuuucugucaacgccggggugacuaccccaguguccacauauaugcuuaccaauucagaacuguugagccucaucaacgacaugccgauuacgaacgaucaaaagaaacugaugaguaauaacguccagaucguucgccagcagucuuacuccaucaugugcauuauaaaggaggaaguguuagcguauguagugcaacugccccucuacggagucaucgacacuccuuguuggaaacuucauacaagcccacugugcaccacuaauacaaaggagggcucgaacauuuguuugacccgaacggaucguggcugguacugcgacaaugcagggucuguguccuucuuuccccaggccgaaaccuguaagguucagucaaacagaguguucugcgauacaaugaauaguagaacucugccuagcgaggucaaccucugcaauguggacaucuuuaacccaaaauaugauuguaagauaaugaccuccaaaacagacguaucuagcucaguuauuaccagucugggagcuaucguguccugcuacgguaagacuaaauguacagccagcaauaagaacaggggcaucauuaagaccuucucuaaugggugcgauuaugucucaaacaaaggaguggacacugucagugugggcaauacgcuuuacuguguuaacaagcaagaggguaaaagccuguaugugaagggggaacccaucauuaacuuuuacgacccuuugguauucccauccgaugaguuugacgcaucuauaucgcaggucaaugagaaaaucaaccagagccucgcuuucauucggaaguccgaugaacuguuacacaaugugaacgccggaaagucaacaaccaauaucaugaucacuaccauuauaaucguuauuaucgugauucugcuaagucucaucgcggucggccugcuuuuguauugcaaagcccgcugaggacuagucccuguucccagagcccacuuuuuuuucuuuuuuugaaauaaaauagccugucuuucagaucuaaaaaaaaaaaaaaaaaaaaaaaaaaaaaaaaaaaaaaaaaaaaaaaaaaaaaaaaaaaaaaaaugcaucccccccccccccccccccccccccccccccaaaggcucuuuucagagccaccagaauu

SEQ ID NO: 4986 - RNA, 1918 nt, Artificial Sequence
  mRNA product Design a-3 comprising derived and/or modified sequence from HRSV(A2)__F-del_DSCav1_mut4 (opt4)
gggagagggcgcuuggcuugcaaggacccugagcugcggcauugaagcacacccaacccaacucgacugaagucagccucacugaaccggaucugagaaucuucucucucugggcuugccagggcucuccgaaccuagcuagcauccucuucaauuccaacuagaaagcuuaccauggagcugcugauccugaaggccaacgccaucaccaccauccugaccgccgugaccuucugcuucgccagcggccagaacaucaccgaggaguucuaccagagcaccugcagcgccgugagcaagggcuaccugagcgcccugagaaccggcugguacaccagcgugaucaccaucgagcugagcaacaucaaggagaacaagugcaacggcaccgacgccaaggugaagcugaucaagcaggagcuggacaaguacaagaacgccgugaccgagcugcagcugcugaugcagagcacccccgccaccggcagcggcagcgccaucugcagcggcguggccgugugcaaggugcugcaccuggagggcgaggugaacaagaucaagagcgcccugcugagcaccaacaaggccguggugagccugagcaacggcgugagcgugcugaccuucaaggugcuggaccugaagaacuacaucgacaagcagcugcugcccauccugaacaagcagagcugcagcaucagcaacaucgagaccgugaucgaguuccagcagaagaacaacagacugcuggagaucaccagagaguucagcgugaacgccggcgugaccacccccgugagcaccuacaugcugaccaacagcgagcugcugagccugaucaacgacaugcccaucaccaacgaccagaagaagcugaugagcaacaacgugcagaucgugagacagcagagcuacagcaucaugugcaucaucaaggaggaggugcuggccuacguggugcagcugccccuguacggcgugaucgacacccccugcuggaagcugcacaccagcccccugugcaccaccaacaccaaggagggcagcaacaucugccugaccagaaccgacagaggcugguacugcgacaacgccggcagcgugagcuucuucccccaggccgagaccugcaaggugcagagcaacagaguguucugcgacaccaugaacagcagaacccugcccagcgaggugaaccugugcaacguggacaucuucaaccccaaguacgacugcaagaucaugaccagcaagaccgacgugagcagcagcgugaucaccagccugggcgccaucgugagcugcuacggcaagaccaagugcaccgccagcaacaagaacagaggcaucaucaagaccuucagcaacggcugcgacuacgugagcaacaagggcguggacaccgugagcgugggcaacacccuguacugcgugaacaagcaggagggcaagagccuguacgugaagggcgagcccaucaucaacuucuacgacccccugguguuccccagcgacgaguucgacgccagcaucagccaggugaacgagaagaucaaccagagccuggccuucaucagaaagagcgacgagcugcugcacaacgugaacgccggcaagagcaccaccaacaucaugaucaccaccaucaucaucgugaucaucgugauccugcugagccugaucgccgugggccugcugcuguacugcaaggccagaugaggacuagucccuguucccagagcccacuuuuuuuucuuuuuuugaaauaaaauagccugucuuucagaucuaaaaaaaaaaaaaaaaaaaaaaaaaaaaaaaaaaaaaaaaaaaaaaaaaaaaaaaaaaaaaaaaugcaucccccccccccccccccccccccccccccccaaaggcucuuuucagagccaccagaauu

SEQ ID NO: 4987 - RNA, 1918 nt, Artificial Sequence
  mRNA product Design a-3 comprising derived and/or modified sequence from HRSV(A2)__F-del_DSCav1_mut4 (opt5)
gggagagggcgcuuggcuugcaaggacccugagcugcggcauugaagcacacccaacccaacucgacugaagucagccucacugaaccggaucugagaaucuucucucucugggcuugccagggcucuccgaaccuagcuagcauccucuucaauuccaacuagaaagcuuaccauggagcugcucauccugaaggccaacgcuauuaccacaauccuuacggccgugaccuucugcuuugcgagcggccagaauauuacagaagaguucuaccaauccaccuguucugcugucagcaaaggguaucuguccgcccucagaacaggaugguacaccucuguuaucacaauugaacugagcaacaucaaggagaauaaaugcaacggcaccgacgccaaggugaaacuuaucaagcaggaacuggauaaguauaaaaaugcugugacggagcuccagcugcugaugcaguccacccccgccacagggucuggaagcgcuauuuguuccggcgucgccgugugcaagguucuccaccuggagggggaagugaacaaaaucaagagcgcgcuucugucuaccaauaaagccgucgugucccucagcaacggaguuucugugcugacauuuaagguccuugaccugaagaauuacauugauaaacaacuccugccuauccugaacaagcaguccuguagcauuucuaauaucgagaccgugauugaguuccagcagaaaaacaaucggcuccuggaaaucacgcgcgaguuuuccgugaacgcuggcgucacaaccccgguuagcacauauaugcuuaccaauuccgaacugcucucucugaucaacgacaugcccauuaccaacgaucaaaagaaacuuaugagcaauaacgugcagaucgugagacagcaguccuacagcauuaugugcaucauuaaggaggaaguccuggccuaugugguucaacucccucuguacggcgugaucgacacacccuguuggaaacugcauacgucuccucucugcaccacaaauaccaaggagggguccaacaucugucugacacggaccgaucgcggaugguacugcgacaaugcuggcagcgucucuuucuuuccccaggccgaaacguguaaggugcagagcaacagaguuuucugcgauacaaugaacuccagaacccugccuucugaggugaaucucugcaaugucgacauuuuuaacccgaaauaugauuguaagaucaugaccagcaaaacagacguguccagcucugucauuaccucccugggggcgaucgugagcugcuacggaaagacaaaauguacggccucuaauaagaaccggggcauuaucaagaccuucuccaaugggugcgauuauguuagcaacaaaggaguggacacagucuccgugggcaauacccuuuacuguguuaacaagcaagagggcaaaucucuguaugugaagggggaacccaucauuaacuuuuacgacccucucgucuuccccagcgaugaguuugacgcuuccaucucucaggugaaugagaaaauuaaccagagccuggccuucauccgcaaguccgaugaacugcuccacaaugugaacgcuggaaagagcacaaccaauauuaugaucacgaccauuaucaucguuauuaucgucauucugcuuucucugaucgccgugggccuccugcuguauugcaaagccagaugaggacuagucccuguucccagagcccacuuuuuuuucuuuuuuugaaauaaaauagccugucuuucagaucuaaaaaaaaaaaaaaaaaaaaaaaaaaaaaaaaaaaaaaaaaaaaaaaaaaaaaaaaaaaaaaaaugcaucccccccccccccccccccccccccccccccaaaggcucuuuucagagccaccagaauu

SEQ ID NO: 4988 - RNA, 1918 nt, Artificial Sequence
  mRNA product Design a-3 comprising derived and/or modified sequence from HRSV(A2)__F-del_DSCav1_mut4 (opt6)
gggagagggcgcuuggcuugcaaggacccugagcugcggcauugaagcacacccaacccaacucgacugaagucagccucacugaaccggaucugagaaucuucucucucugggcuugccagggcucuccgaaccuagcuagcauccucuucaauuccaacuagaaagcuuaccauggaacuuuuaauacuaaaagcuaacgccauaaccacuauacuaacagcagucacauucugcuucgcaucaggccaaaacauaaccgaagaauuuuaccaauccacuuguucagcagucuccaaaggauauuuauccgcacuucguacaggaugguauacaucaguaauaacaauagaacucuccaacauaaaagaaaauaaaugcaacggcaccgacgcaaaaguaaaacucaucaaacaagaauuagacaaauacaagaacgccguaacagaacuacaauuacuaaugcaaucaacacccgccacaggaucaggaucugcaauaugcucuggaguagcaguaugcaaaguauuacaccuagaaggagaaguaaacaaaaucaaaagcgcacuacuauccacaaacaaagcuguaguaucacuaucaaacggaguaucaguauuaacuuucaaaguacuugaucuaaaaaacuacauagacaaacaacuacuacccauauuaaacaaacaaucaugcucaauaagcaauauagaaacaguaauagaauuucaacaaaaaaacaacagacuacuagaaaucacaagggaauuuucaguaaaugccgguguuacaaccccaguaucaacauacaugcuaacuaacucagaacuacuauccuuaauaaacgauaugccaauaacaaacgaucaaaaaaaacuaauguccaacaacguacaaauaguaagacaacaaucauacucaaucaugugcauuauaaaagaagaagucuuagcauacguaguacaauuaccacuauacgguguaauagauacaccauguuggaaauuacacacaagcccacuaugcacaacuaacacaaaagaaggcucaaauauauguuuaacaagaacagaccgagguugguacugcgacaaugcaggaucaguaucauucuuuccacaagcagaaacauguaaaguucaauccaacagaguauucugcgacacaaugaacuccagaacacuaccuucagaaguaaaccucuguaacguagacauauuuaaucccaaguacgacugcaaaauaaugacaucgaaaacagacguaagcuccucagugauaacaucccucggcgccaucguauccuguuacgguaaaacuaaauguaccgccucaaacaaaaaccgcgguauuauaaaaacuuuuucuaauggcugcgauuacguaagcaacaaaggcgucgacacaguuuccguaggaaacacacuauacugcguaaacaaacaagaagguaaaucucuauacguaaaaggagaaccaauaauaaauuucuaugauccuuuaguauucccauccgaugaauuugacgccucuaucucacaagucaacgaaaaaauaaaucaaucauuagcauucauacgaaaaucagacgaacuacuacacaacguaaacgcaggaaaaucaacaaccaacauaaugauaaccacaauaauaauaguuauuauagugauacuauuauccuuaauugcagucggacuauuauuauacuguaaagcacgcuaaggacuagucccuguucccagagcccacuuuuuuuucuuuuuuugaaauaaaauagccugucuuucagaucuaaaaaaaaaaaaaaaaaaaaaaaaaaaaaaaaaaaaaaaaaaaaaaaaaaaaaaaaaaaaaaaaugcaucccccccccccccccccccccccccccccccaaaggcucuuuucagagccaccagaauu

SEQ ID NO: 4989 - RNA, 1918 nt, Artificial Sequence
  mRNA product Design a-3 comprising derived and/or modified sequence from HRSV(A2)__F-del_DSCav1_mut4 (opt11)
gggagagggcgcuuggcuugcaaggacccugagcugcggcauugaagcacacccaacccaacucgacugaagucagccucacugaaccggaucugagaaucuucucucucugggcuugccagggcucuccgaaccuagcuagcauccucuucaauuccaacuagaaagcuuaccauggaacuccucauccucaaagccaaugccaucaccacaauccugacagcaguaaccuucugcuucgcauccggacaaaacaucaccgaagaauuuuaccagucaaccugcuccgcugucucaaaaggcuaccucucagcccuucgcaccggcugguacaccucggucauaacaauagaacucuccaauaucaaagaaaacaaaugcaacggcacugacgccaagguaaaacucaucaaacaggaacucgauaaauacaagaacgccguaacagaacuacaacuacucaugcaaucaacaccggccaccggcuccgguuccgccauaugcuccggaguggccgugugcaagguccuccaccuugaaggggaaguuaacaaaaucaaaucagcccuccucuccacuaacaaagccguaguaucccuaagcaacgguguauccguccucaccuucaaaguacuagaccuaaagaauuauaucgacaaacaacuccuccccauacucaacaaacaauccugcuccauaagcaacaucgaaacagucaucgaguuccagcagaaaaacaaccgacuccucgaaauaacccgcgaguucucagucaacgccggagucaccacacccgucagcaccuacaugcugaccaacuccgaacuccucuccuuaaucaaugacaugcccaucaccaaugaccaaaagaaacucaugucaaacaacguccaaauaguacgccaacaauccuacuccaucaugugcaucauaaaagaagaaguacucgccuacgucguccaacucccccucuacggcguaaucgacacccccugcuggaaacuacacacaagcccccucugcaccacaaacacuaaagagggcuccaacaucugucuaacccgcaccgaucgaggcugguacugcgacaacgccggaucugucucauucuucccccaagccgaaaccugcaaaguccaauccaaccgcgucuucugcgacaccaugaacucgagaacccucccuuccgaagucaaccuaugcaacgucgacauuuucaaccccaaauacgacugcaaaaucaugaccucgaaaaccgacguaucauccagcgucaucaccagccuaggcgcaaucgugagcugcuacggcaaaaccaaaugcaccgcgagcaauaaaaaccgcgggaucaucaaaacuuucuccaacggcugcgacuacgucuccaacaagggagucgauaccgucuccguaggcaacacccucuacugcgucaacaaacaagaaggcaaaucacuauacguaaaaggcgagccaaucauaaacuucuacgacccucuaguuuucccauccgacgaguucgacgcuagcaucucccaagucaacgagaaaaucaaccaaucccucgcauucauccgcaaauccgacgaacuccuccacaacguaaacgcaggcaaaucaacuacuaauauaaugaucacaaccaucauaauagucauaaucguaauccuccuaucccucaucgccgucggacuacugcucuacugcaaagcccgcuaaggacuagucccuguucccagagcccacuuuuuuuucuuuuuuugaaauaaaauagccugucuuucagaucuaaaaaaaaaaaaaaaaaaaaaaaaaaaaaaaaaaaaaaaaaaaaaaaaaaaaaaaaaaaaaaaaugcaucccccccccccccccccccccccccccccccaaaggcucuuuucagagccaccagaauu

SEQ ID NO: 4990 - RNA, 1867 nt, Artificial Sequence
  mRNA product Design a-4 comprising derived and/or modified sequence from HRSV(A2)__F-del_DSCav1_mut4 (opt1)
gggagacuccugucgggcggaaguaggaggaguagaguuuaaaaacaguacucuuuuuccgguucgggacguaguugaagcaacgacaagccggauaaccgcucuugagacaggaagcuuaccauggagcugcucauccugaaggccaacgccaucaccaccauccugacggcggugaccuucugcuucgccagcggccagaacaucaccgaggaguucuaccaguccacgugcagcgccgucuccaagggguaccucagcgcccugcggaccggcugguacaccuccgugaucaccaucgagcugagcaacaucaaggagaacaagugcaacgggaccgacgccaaggugaagcucaucaagcaggagcuggacaaguacaagaacgcggucacggagcugcagcuccugaugcaguccaccccggcaaccggcuccggcuccgccaucugcagcggcgucgccgugugcaaggugcugcaccucgagggggaggucaacaagaucaagagcgcccugcuguccaccaacaaggccguggugagccucuccaacggcgucagcgugcugaccuucaaggugcuggaccucaagaacuacaucgacaagcagcugcugcccauccugaacaagcagagcugcuccaucagcaacaucgagacggugaucgaguuccagcagaagaacaaccggcuccuggagaucacccgcgaguucagcgugaacgccggggucaccacccccguguccacguacaugcugaccaacagcgagcuccugucccugaucaacgacaugccgaucaccaacgaccagaagaagcucaugagcaacaacgugcagaucguccggcagcaguccuacagcaucaugugcaucaucaaggaggaggugcuggcguacgugguccagcugccccucuacggcgugaucgacacccccugcuggaagcugcacacgagcccccugugcaccaccaacaccaaggagggguccaacaucugccucacgcgcaccgaccggggcugguacugcgacaacgccggcagcgucuccuucuucccgcaggccgagaccugcaaggugcagagcaaccgcguguucugcgacaccaugaacucccggacgcugcccagcgagguaaaccucugcaacgucgacaucuucaaccccaaguacgacugcaagaucaugaccuccaagaccgacgugagcuccagcgugaucaccucccugggggccaucgucagcugcuacggcaagacgaagugcaccgccagcaacaagaaccgggggaucaucaagaccuucuccaacggcugcgacuacgugagcaacaagggcguggacaccguguccgucgggaacacccuguacugcgugaacaagcaggagggcaagagccucuacgugaagggggagcccaucaucaacuucuacgacccgcuggucuuccccuccgacgaguucgacgcgagcaucucccaggugaacgagaagaucaaccagagccuggccuucauccgcaaguccgacgagcugcuccacaacgugaacgccggcaagagcacgaccaacaucaugaucaccaccaucaucaucgucaucaucgugauccugcugucccucaucgccguggggcugcugcucuacugcaaggcccggugaggacuagucccuguucccagagcccacuuuuuuuucuuuuuuugaaauaaaauagccugucuuucagaucuaaaaaaaaaaaaaaaaaaaaaaaaaaaaaaaaaaaaaaaaaaaaaaaaaaaaaaaaaaaaaaaaugcaucccccccccccccccccccccccccccccccaaaggcucuuuucagagccaccagaauu

SEQ ID NO: 4991 - RNA, 1867 nt, Artificial Sequence
  mRNA product Design a-4 comprising derived and/or modified sequence from HRSV(A2)__F-del_DSCav1_mut4 (opt1)
gggagacuccugucgggcggaaguaggaggaguagaguuuaaaaacaguacucuuuuuccgguucgggacguaguugaagcaacgacaagccggauaaccgcucuugagacaggaagcuuaccauggagcugcucauccugaaggccaacgccaucaccaccauccugacggcggugaccuucugcuucgccagcggccagaacaucaccgaggaguucuaccaguccacgugcagcgccgucuccaagggguaccucagcgcccugcgcaccggcugguacaccuccgugaucaccaucgagcugagcaacaucaaggagaacaagugcaacgggaccgacgccaaggugaagcucaucaagcaggagcuggacaaguacaagaacgcggucacggagcugcagcuccugaugcaguccacccccgccaccggcagcggguccgccaucugcagcggcguggccgugugcaagguccugcaccucgagggcgaggugaacaagaucaaguccgcgcugcugagcaccaacaaggccguggucucccucagcaacgggguguccgugcugacguucaagguccuggaccucaagaacuacaucgacaagcagcugcugccgauccucaacaagcagagcugcuccaucagcaacaucgagaccgugaucgaguuccagcagaagaacaaccggcugcuggagaucacccgcgaguucuccgugaacgccggcgucaccacgcccgugagcaccuacaugcucaccaacagcgagcugcugucccucaucaacgacaugcccaucaccaacgaccagaagaagcugaugagcaacaacgugcagaucguccggcagcaguccuacagcaucaugugcaucaucaaggaggaggugcuggccuacgugguccagcucccccuguacggggugaucgacacgccgugcuggaagcugcacaccagcccccucugcaccaccaacacgaaggagggcuccaacaucugccugacccgcaccgaccgggggugguacugcgacaacgccggcuccgugagcuucuucccccaggcggagaccugcaagguccaguccaaccgcguguucugcgacacgaugaacagccggacccuccccuccgaggucaaccugugcaacguggacaucuucaacccgaaguacgacugcaagaucaugaccagcaagaccgacguguccagcuccgucaucacgagccugggcgccaucguguccugcuacgggaagaccaagugcaccgccagcaacaagaaccggggcaucaucaagaccuucuccaacgggugcgacuacgugagcaacaagggcgucgacacggugagcgugggcaacacccucuacugcgucaacaagcaggaggggaagucccuguacgugaagggcgagcccaucaucaacuucuacgacccccugguguuccccagcgacgaguucgacgccuccaucagccaggucaacgagaagaucaaccagucccucgccuucauccgcaagagcgacgagcugcugcacaacgugaacgcggggaaguccaccaccaacaucaugaucaccacgaucaucaucgugaucaucgucauccuccugagccugaucgccgugggccuccugcuguacugcaaggcccggugaggacuagucccuguucccagagcccacuuuuuuuucuuuuuuugaaauaaaauagccugucuuucagaucuaaaaaaaaaaaaaaaaaaaaaaaaaaaaaaaaaaaaaaaaaaaaaaaaaaaaaaaaaaaaaaaaugcaucccccccccccccccccccccccccccccccaaaggcucuuuucagagccaccagaauu

SEQ ID NO: 4992 - RNA, 1867 nt, Artificial Sequence
  mRNA product Design a-4 comprising derived and/or modified sequence from HRSV(A2)__F-del_DSCav1_mut4 (opt2)
gggagacuccugucgggcggaaguaggaggaguagaguuuaaaaacaguacucuuuuuccgguucgggacguaguugaagcaacgacaagccggauaaccgcucuugagacaggaagcuuaccauggagcuccucauccucaaggccaacgccaucaccaccauccucaccgccgucaccuucugcuucgccuccggccagaacaucaccgaggaguucuaccaguccaccugcuccgccgucuccaagggcuaccucuccgcccuccgcaccggcugguacaccuccgucaucaccaucgagcucuccaacaucaaggagaacaagugcaacggcaccgacgccaaggucaagcucaucaagcaggagcucgacaaguacaagaacgccgucaccgagcuccagcuccucaugcaguccacccccgccaccggcuccggcuccgccaucugcuccggcgucgccgucugcaagguccuccaccucgagggcgaggucaacaagaucaaguccgcccuccucuccaccaacaaggccgucgucucccucuccaacggcgucuccguccucaccuucaagguccucgaccucaagaacuacaucgacaagcagcuccuccccauccucaacaagcaguccugcuccaucuccaacaucgagaccgucaucgaguuccagcagaagaacaaccgccuccucgagaucacccgcgaguucuccgucaacgccggcgucaccacccccgucuccaccuacaugcucaccaacuccgagcuccucucccucaucaacgacaugcccaucaccaacgaccagaagaagcucauguccaacaacguccagaucguccgccagcaguccuacuccaucaugugcaucaucaaggaggagguccucgccuacgucguccagcucccccucuacggcgucaucgacacccccugcuggaagcuccacaccuccccccucugcaccaccaacaccaaggagggcuccaacaucugccucacccgcaccgaccgcggcugguacugcgacaacgccggcuccgucuccuucuucccccaggccgagaccugcaagguccaguccaaccgcgucuucugcgacaccaugaacucccgcacccuccccuccgaggucaaccucugcaacgucgacaucuucaaccccaaguacgacugcaagaucaugaccuccaagaccgacgucuccuccuccgucaucaccucccucggcgccaucgucuccugcuacggcaagaccaagugcaccgccuccaacaagaaccgcggcaucaucaagaccuucuccaacggcugcgacuacgucuccaacaagggcgucgacaccgucuccgucggcaacacccucuacugcgucaacaagcaggagggcaagucccucuacgucaagggcgagcccaucaucaacuucuacgacccccucgucuuccccuccgacgaguucgacgccuccaucucccaggucaacgagaagaucaaccagucccucgccuucauccgcaaguccgacgagcuccuccacaacgucaacgccggcaaguccaccaccaacaucaugaucaccaccaucaucaucgucaucaucgucauccuccucucccucaucgccgucggccuccuccucuacugcaaggcccgcugaggacuagucccuguucccagagcccacuuuuuuuucuuuuuuugaaauaaaauagccugucuuucagaucuaaaaaaaaaaaaaaaaaaaaaaaaaaaaaaaaaaaaaaaaaaaaaaaaaaaaaaaaaaaaaaaaugcaucccccccccccccccccccccccccccccccaaaggcucuuuucagagccaccagaauu

SEQ ID NO: 4993 - RNA, 1867 nt, Artificial Sequence
  mRNA product Design a-4 comprising derived and/or modified sequence from HRSV(A2)__F-del_DSCav1_mut4 (opt3)
gggagacuccugucgggcggaaguaggaggaguagaguuuaaaaacaguacucuuuuuccgguucgggacguaguugaagcaacgacaagccggauaaccgcucuugagacaggaagcuuaccauggagcugcucauccuuaaggccaacgcuauuaccacaauacugacugcagugacguucugcuuugccagcggccagaauaucaccgaagaguucuaccaauccacauguucugcggucucaaaaggguauuugagugcuuuaagaacuggaugguacaccagcguuauuacaaucgaacuguccaacauuaaggagaauaaaugcaacgguaccgacgccaaggugaaacuaaucaagcaggaacucgauaaguauaaaaaugcaguaacugagcugcagcuucugaugcagucuacacccgccaccggcucggggucagcuauauguagcggaguggcagucugcaagguguugcaccucgagggcgaaguuaacaaaaucaagagugcccugcuguccacgaauaaagcuguggucucucucagcaacgguguguccguauuaacuuuuaagguucuggaccuuaagaauuacauugauaaacaauugcugccuauccuaaacaagcagucauguaguauuagcaauaucgagaccgugauagaguuccagcagaaaaacaauaggcuccuggaaauuacacgggaguuuucugucaacgccggggugacuaccccaguguccacauauaugcuuaccaauucagaacuguugagccucaucaacgacaugccgauuacgaacgaucaaaagaaacugaugaguaauaacguccagaucguucgccagcagucuuacuccaucaugugcauuauaaaggaggaaguguuagcguauguagugcaacugccccucuacggagucaucgacacuccuuguuggaaacuucauacaagcccacugugcaccacuaauacaaaggagggcucgaacauuuguuugacccgaacggaucguggcugguacugcgacaaugcagggucuguguccuucuuuccccaggccgaaaccuguaagguucagucaaacagaguguucugcgauacaaugaauaguagaacucugccuagcgaggucaaccucugcaauguggacaucuuuaacccaaaauaugauuguaagauaaugaccuccaaaacagacguaucuagcucaguuauuaccagucugggagcuaucguguccugcuacgguaagacuaaauguacagccagcaauaagaacaggggcaucauuaagaccuucucuaaugggugcgauuaugucucaaacaaaggaguggacacugucagugugggcaauacgcuuuacuguguuaacaagcaagaggguaaaagccuguaugugaagggggaacccaucauuaacuuuuacgacccuuugguauucccauccgaugaguuugacgcaucuauaucgcaggucaaugagaaaaucaaccagagccucgcuuucauucggaaguccgaugaacuguuacacaaugugaacgccggaaagucaacaaccaauaucaugaucacuaccauuauaaucguuauuaucgugauucugcuaagucucaucgcggucggccugcuuuuguauugcaaagcccgcugaggacuagucccuguucccagagcccacuuuuuuuucuuuuuuugaaauaaaauagccugucuuucagaucuaaaaaaaaaaaaaaaaaaaaaaaaaaaaaaaaaaaaaaaaaaaaaaaaaaaaaaaaaaaaaaaaugcaucccccccccccccccccccccccccccccccaaaggcucuuuucagagccaccagaauu

SEQ ID NO: 4994 - RNA, 1867 nt, Artificial Sequence
  mRNA product Design a-4 comprising derived and/or modified sequence from HRSV(A2)__F-del_DSCav1_mut4 (opt4)
gggagacuccugucgggcggaaguaggaggaguagaguuuaaaaacaguacucuuuuuccgguucgggacguaguugaagcaacgacaagccggauaaccgcucuugagacaggaagcuuaccauggagcugcugauccugaaggccaacgccaucaccaccauccugaccgccgugaccuucugcuucgccagcggccagaacaucaccgaggaguucuaccagagcaccugcagcgccgugagcaagggcuaccugagcgcccugagaaccggcugguacaccagcgugaucaccaucgagcugagcaacaucaaggagaacaagugcaacggcaccgacgccaaggugaagcugaucaagcaggagcuggacaaguacaagaacgccgugaccgagcugcagcugcugaugcagagcacccccgccaccggcagcggcagcgccaucugcagcggcguggccgugugcaaggugcugcaccuggagggcgaggugaacaagaucaagagcgcccugcugagcaccaacaaggccguggugagccugagcaacggcgugagcgugcugaccuucaaggugcuggaccugaagaacuacaucgacaagcagcugcugcccauccugaacaagcagagcugcagcaucagcaacaucgagaccgugaucgaguuccagcagaagaacaacagacugcuggagaucaccagagaguucagcgugaacgccggcgugaccacccccgugagcaccuacaugcugaccaacagcgagcugcugagccugaucaacgacaugcccaucaccaacgaccagaagaagcugaugagcaacaacgugcagaucgugagacagcagagcuacagcaucaugugcaucaucaaggaggaggugcuggccuacguggugcagcugccccuguacggcgugaucgacacccccugcuggaagcugcacaccagcccccugugcaccaccaacaccaaggagggcagcaacaucugccugaccagaaccgacagaggcugguacugcgacaacgccggcagcgugagcuucuucccccaggccgagaccugcaaggugcagagcaacagaguguucugcgacaccaugaacagcagaacccugcccagcgaggugaaccugugcaacguggacaucuucaaccccaaguacgacugcaagaucaugaccagcaagaccgacgugagcagcagcgugaucaccagccugggcgccaucgugagcugcuacggcaagaccaagugcaccgccagcaacaagaacagaggcaucaucaagaccuucagcaacggcugcgacuacgugagcaacaagggcguggacaccgugagcgugggcaacacccuguacugcgugaacaagcaggagggcaagagccuguacgugaagggcgagcccaucaucaacuucuacgacccccugguguuccccagcgacgaguucgacgccagcaucagccaggugaacgagaagaucaaccagagccuggccuucaucagaaagagcgacgagcugcugcacaacgugaacgccggcaagagcaccaccaacaucaugaucaccaccaucaucaucgugaucaucgugauccugcugagccugaucgccgugggccugcugcuguacugcaaggccagaugaggacuagucccuguucccagagcccacuuuuuuuucuuuuuuugaaauaaaauagccugucuuucagaucuaaaaaaaaaaaaaaaaaaaaaaaaaaaaaaaaaaaaaaaaaaaaaaaaaaaaaaaaaaaaaaaaugcaucccccccccccccccccccccccccccccccaaaggcucuuuucagagccaccagaauu

SEQ ID NO: 4995 - RNA, 1867 nt, Artificial Sequence
  mRNA product Design a-4 comprising derived and/or modified sequence from HRSV(A2)__F-del_DSCav1_mut4 (opt5)
gggagacuccugucgggcggaaguaggaggaguagaguuuaaaaacaguacucuuuuuccgguucgggacguaguugaagcaacgacaagccggauaaccgcucuugagacaggaagcuuaccauggagcugcucauccugaaggccaacgcuauuaccacaauccuuacggccgugaccuucugcuuugcgagcggccagaauauuacagaagaguucuaccaauccaccuguucugcugucagcaaaggguaucuguccgcccucagaacaggaugguacaccucuguuaucacaauugaacugagcaacaucaaggagaauaaaugcaacggcaccgacgccaaggugaaacuuaucaagcaggaacuggauaaguauaaaaaugcugugacggagcuccagcugcugaugcaguccacccccgccacagggucuggaagcgcuauuuguuccggcgucgccgugugcaagguucuccaccuggagggggaagugaacaaaaucaagagcgcgcuucugucuaccaauaaagccgucgugucccucagcaacggaguuucugugcugacauuuaagguccuugaccugaagaauuacauugauaaacaacuccugccuauccugaacaagcaguccuguagcauuucuaauaucgagaccgugauugaguuccagcagaaaaacaaucggcuccuggaaaucacgcgcgaguuuuccgugaacgcuggcgucacaaccccgguuagcacauauaugcuuaccaauuccgaacugcucucucugaucaacgacaugcccauuaccaacgaucaaaagaaacuuaugagcaauaacgugcagaucgugagacagcaguccuacagcauuaugugcaucauuaaggaggaaguccuggccuaugugguucaacucccucuguacggcgugaucgacacacccuguuggaaacugcauacgucuccucucugcaccacaaauaccaaggagggguccaacaucugucugacacggaccgaucgcggaugguacugcgacaaugcuggcagcgucucuuucuuuccccaggccgaaacguguaaggugcagagcaacagaguuuucugcgauacaaugaacuccagaacccugccuucugaggugaaucucugcaaugucgacauuuuuaacccgaaauaugauuguaagaucaugaccagcaaaacagacguguccagcucugucauuaccucccugggggcgaucgugagcugcuacggaaagacaaaauguacggccucuaauaagaaccggggcauuaucaagaccuucuccaaugggugcgauuauguuagcaacaaaggaguggacacagucuccgugggcaauacccuuuacuguguuaacaagcaagagggcaaaucucuguaugugaagggggaacccaucauuaacuuuuacgacccucucgucuuccccagcgaugaguuugacgcuuccaucucucaggugaaugagaaaauuaaccagagccuggccuucauccgcaaguccgaugaacugcuccacaaugugaacgcuggaaagagcacaaccaauauuaugaucacgaccauuaucaucguuauuaucgucauucugcuuucucugaucgccgugggccuccugcuguauugcaaagccagaugaggacuagucccuguucccagagcccacuuuuuuuucuuuuuuugaaauaaaauagccugucuuucagaucuaaaaaaaaaaaaaaaaaaaaaaaaaaaaaaaaaaaaaaaaaaaaaaaaaaaaaaaaaaaaaaaaugcaucccccccccccccccccccccccccccccccaaaggcucuuuucagagccaccagaauu

SEQ ID NO: 4996 - RNA, 1867 nt, Artificial Sequence
  mRNA product Design a-4 comprising derived and/or modified sequence from HRSV(A2)__F-del_DSCav1_mut4 (opt6)
gggagacuccugucgggcggaaguaggaggaguagaguuuaaaaacaguacucuuuuuccgguucgggacguaguugaagcaacgacaagccggauaaccgcucuugagacaggaagcuuaccauggaacuuuuaauacuaaaagcuaacgccauaaccacuauacuaacagcagucacauucugcuucgcaucaggccaaaacauaaccgaagaauuuuaccaauccacuuguucagcagucuccaaaggauauuuauccgcacuucguacaggaugguauacaucaguaauaacaauagaacucuccaacauaaaagaaaauaaaugcaacggcaccgacgcaaaaguaaaacucaucaaacaagaauuagacaaauacaagaacgccguaacagaacuacaauuacuaaugcaaucaacacccgccacaggaucaggaucugcaauaugcucuggaguagcaguaugcaaaguauuacaccuagaaggagaaguaaacaaaaucaaaagcgcacuacuauccacaaacaaagcuguaguaucacuaucaaacggaguaucaguauuaacuuucaaaguacuugaucuaaaaaacuacauagacaaacaacuacuacccauauuaaacaaacaaucaugcucaauaagcaauauagaaacaguaauagaauuucaacaaaaaaacaacagacuacuagaaaucacaagggaauuuucaguaaaugccgguguuacaaccccaguaucaacauacaugcuaacuaacucagaacuacuauccuuaauaaacgauaugccaauaacaaacgaucaaaaaaaacuaauguccaacaacguacaaauaguaagacaacaaucauacucaaucaugugcauuauaaaagaagaagucuuagcauacguaguacaauuaccacuauacgguguaauagauacaccauguuggaaauuacacacaagcccacuaugcacaacuaacacaaaagaaggcucaaauauauguuuaacaagaacagaccgagguugguacugcgacaaugcaggaucaguaucauucuuuccacaagcagaaacauguaaaguucaauccaacagaguauucugcgacacaaugaacuccagaacacuaccuucagaaguaaaccucuguaacguagacauauuuaaucccaaguacgacugcaaaauaaugacaucgaaaacagacguaagcuccucagugauaacaucccucggcgccaucguauccuguuacgguaaaacuaaauguaccgccucaaacaaaaaccgcgguauuauaaaaacuuuuucuaauggcugcgauuacguaagcaacaaaggcgucgacacaguuuccguaggaaacacacuauacugcguaaacaaacaagaagguaaaucucuauacguaaaaggagaaccaauaauaaauuucuaugauccuuuaguauucccauccgaugaauuugacgccucuaucucacaagucaacgaaaaaauaaaucaaucauuagcauucauacgaaaaucagacgaacuacuacacaacguaaacgcaggaaaaucaacaaccaacauaaugauaaccacaauaauaauaguuauuauagugauacuauuauccuuaauugcagucggacuauuauuauacuguaaagcacgcuaaggacuagucccuguucccagagcccacuuuuuuuucuuuuuuugaaauaaaauagccugucuuucagaucuaaaaaaaaaaaaaaaaaaaaaaaaaaaaaaaaaaaaaaaaaaaaaaaaaaaaaaaaaaaaaaaaugcaucccccccccccccccccccccccccccccccaaaggcucuuuucagagccaccagaauu

SEQ ID NO: 4997 - RNA, 1867 nt, Artificial Sequence
  mRNA product Design a-4 comprising derived and/or modified sequence from HRSV(A2)__F-del_DSCav1_mut4 (opt11)
gggagacuccugucgggcggaaguaggaggaguagaguuuaaaaacaguacucuuuuuccgguucgggacguaguugaagcaacgacaagccggauaaccgcucuugagacaggaagcuuaccauggaacuccucauccucaaagccaaugccaucaccacaauccugacagcaguaaccuucugcuucgcauccggacaaaacaucaccgaagaauuuuaccagucaaccugcuccgcugucucaaaaggcuaccucucagcccuucgcaccggcugguacaccucggucauaacaauagaacucuccaauaucaaagaaaacaaaugcaacggcacugacgccaagguaaaacucaucaaacaggaacucgauaaauacaagaacgccguaacagaacuacaacuacucaugcaaucaacaccggccaccggcuccgguuccgccauaugcuccggaguggccgugugcaagguccuccaccuugaaggggaaguuaacaaaaucaaaucagcccuccucuccacuaacaaagccguaguaucccuaagcaacgguguauccguccucaccuucaaaguacuagaccuaaagaauuauaucgacaaacaacuccuccccauacucaacaaacaauccugcuccauaagcaacaucgaaacagucaucgaguuccagcagaaaaacaaccgacuccucgaaauaacccgcgaguucucagucaacgccggagucaccacacccgucagcaccuacaugcugaccaacuccgaacuccucuccuuaaucaaugacaugcccaucaccaaugaccaaaagaaacucaugucaaacaacguccaaauaguacgccaacaauccuacuccaucaugugcaucauaaaagaagaaguacucgccuacgucguccaacucccccucuacggcguaaucgacacccccugcuggaaacuacacacaagcccccucugcaccacaaacacuaaagagggcuccaacaucugucuaacccgcaccgaucgaggcugguacugcgacaacgccggaucugucucauucuucccccaagccgaaaccugcaaaguccaauccaaccgcgucuucugcgacaccaugaacucgagaacccucccuuccgaagucaaccuaugcaacgucgacauuuucaaccccaaauacgacugcaaaaucaugaccucgaaaaccgacguaucauccagcgucaucaccagccuaggcgcaaucgugagcugcuacggcaaaaccaaaugcaccgcgagcaauaaaaaccgcgggaucaucaaaacuuucuccaacggcugcgacuacgucuccaacaagggagucgauaccgucuccguaggcaacacccucuacugcgucaacaaacaagaaggcaaaucacuauacguaaaaggcgagccaaucauaaacuucuacgacccucuaguuuucccauccgacgaguucgacgcuagcaucucccaagucaacgagaaaaucaaccaaucccucgcauucauccgcaaauccgacgaacuccuccacaacguaaacgcaggcaaaucaacuacuaauauaaugaucacaaccaucauaauagucauaaucguaauccuccuaucccucaucgccgucggacuacugcucuacugcaaagcccgcuaaggacuagucccuguucccagagcccacuuuuuuuucuuuuuuugaaauaaaauagccugucuuucagaucuaaaaaaaaaaaaaaaaaaaaaaaaaaaaaaaaaaaaaaaaaaaaaaaaaaaaaaaaaaaaaaaaugcaucccccccccccccccccccccccccccccccaaaggcucuuuucagagccaccagaauu

SEQ ID NO: 4998 - RNA, 1813 nt, Artificial Sequence
  mRNA product Design a-5 comprising derived and/or modified sequence from HRSV(A2)__F-del_DSCav1_mut4 (opt1)
gggagacuuucccauucuguagcagaauuugguguugccuguggucuuggucccgcggagaagcuuaccauggagcugcucauccugaaggccaacgccaucaccaccauccugacggcggugaccuucugcuucgccagcggccagaacaucaccgaggaguucuaccaguccacgugcagcgccgucuccaagggguaccucagcgcccugcggaccggcugguacaccuccgugaucaccaucgagcugagcaacaucaaggagaacaagugcaacgggaccgacgccaaggugaagcucaucaagcaggagcuggacaaguacaagaacgcggucacggagcugcagcuccugaugcaguccaccccggcaaccggcuccggcuccgccaucugcagcggcgucgccgugugcaaggugcugcaccucgagggggaggucaacaagaucaagagcgcccugcuguccaccaacaaggccguggugagccucuccaacggcgucagcgugcugaccuucaaggugcuggaccucaagaacuacaucgacaagcagcugcugcccauccugaacaagcagagcugcuccaucagcaacaucgagacggugaucgaguuccagcagaagaacaaccggcuccuggagaucacccgcgaguucagcgugaacgccggggucaccacccccguguccacguacaugcugaccaacagcgagcuccugucccugaucaacgacaugccgaucaccaacgaccagaagaagcucaugagcaacaacgugcagaucguccggcagcaguccuacagcaucaugugcaucaucaaggaggaggugcuggcguacgugguccagcugccccucuacggcgugaucgacacccccugcuggaagcugcacacgagcccccugugcaccaccaacaccaaggagggguccaacaucugccucacgcgcaccgaccggggcugguacugcgacaacgccggcagcgucuccuucuucccgcaggccgagaccugcaaggugcagagcaaccgcguguucugcgacaccaugaacucccggacgcugcccagcgagguaaaccucugcaacgucgacaucuucaaccccaaguacgacugcaagaucaugaccuccaagaccgacgugagcuccagcgugaucaccucccugggggccaucgucagcugcuacggcaagacgaagugcaccgccagcaacaagaaccgggggaucaucaagaccuucuccaacggcugcgacuacgugagcaacaagggcguggacaccguguccgucgggaacacccuguacugcgugaacaagcaggagggcaagagccucuacgugaagggggagcccaucaucaacuucuacgacccgcuggucuuccccuccgacgaguucgacgcgagcaucucccaggugaacgagaagaucaaccagagccuggccuucauccgcaaguccgacgagcugcuccacaacgugaacgccggcaagagcacgaccaacaucaugaucaccaccaucaucaucgucaucaucgugauccugcugucccucaucgccguggggcugcugcucuacugcaaggcccggugaggacuagucccuguucccagagcccacuuuuuuuucuuuuuuugaaauaaaauagccugucuuucagaucuaaaaaaaaaaaaaaaaaaaaaaaaaaaaaaaaaaaaaaaaaaaaaaaaaaaaaaaaaaaaaaaaugcaucccccccccccccccccccccccccccccccaaaggcucuuuucagagccaccagaauu

SEQ ID NO: 4999 - RNA, 1813 nt, Artificial Sequence
  mRNA product Design a-5 comprising derived and/or modified sequence from HRSV(A2)__F-del_DSCav1_mut4 (opt1)
gggagacuuucccauucuguagcagaauuugguguugccuguggucuuggucccgcggagaagcuuaccauggagcugcucauccugaaggccaacgccaucaccaccauccugacggcggugaccuucugcuucgccagcggccagaacaucaccgaggaguucuaccaguccacgugcagcgccgucuccaagggguaccucagcgcccugcgcaccggcugguacaccuccgugaucaccaucgagcugagcaacaucaaggagaacaagugcaacgggaccgacgccaaggugaagcucaucaagcaggagcuggacaaguacaagaacgcggucacggagcugcagcuccugaugcaguccacccccgccaccggcagcggguccgccaucugcagcggcguggccgugugcaagguccugcaccucgagggcgaggugaacaagaucaaguccgcgcugcugagcaccaacaaggccguggucucccucagcaacgggguguccgugcugacguucaagguccuggaccucaagaacuacaucgacaagcagcugcugccgauccucaacaagcagagcugcuccaucagcaacaucgagaccgugaucgaguuccagcagaagaacaaccggcugcuggagaucacccgcgaguucuccgugaacgccggcgucaccacgcccgugagcaccuacaugcucaccaacagcgagcugcugucccucaucaacgacaugcccaucaccaacgaccagaagaagcugaugagcaacaacgugcagaucguccggcagcaguccuacagcaucaugugcaucaucaaggaggaggugcuggccuacgugguccagcucccccuguacggggugaucgacacgccgugcuggaagcugcacaccagcccccucugcaccaccaacacgaaggagggcuccaacaucugccugacccgcaccgaccgggggugguacugcgacaacgccggcuccgugagcuucuucccccaggcggagaccugcaagguccaguccaaccgcguguucugcgacacgaugaacagccggacccuccccuccgaggucaaccugugcaacguggacaucuucaacccgaaguacgacugcaagaucaugaccagcaagaccgacguguccagcuccgucaucacgagccugggcgccaucguguccugcuacgggaagaccaagugcaccgccagcaacaagaaccggggcaucaucaagaccuucuccaacgggugcgacuacgugagcaacaagggcgucgacacggugagcgugggcaacacccucuacugcgucaacaagcaggaggggaagucccuguacgugaagggcgagcccaucaucaacuucuacgacccccugguguuccccagcgacgaguucgacgccuccaucagccaggucaacgagaagaucaaccagucccucgccuucauccgcaagagcgacgagcugcugcacaacgugaacgcggggaaguccaccaccaacaucaugaucaccacgaucaucaucgugaucaucgucauccuccugagccugaucgccgugggccuccugcuguacugcaaggcccggugaggacuagucccuguucccagagcccacuuuuuuuucuuuuuuugaaauaaaauagccugucuuucagaucuaaaaaaaaaaaaaaaaaaaaaaaaaaaaaaaaaaaaaaaaaaaaaaaaaaaaaaaaaaaaaaaaugcaucccccccccccccccccccccccccccccccaaaggcucuuuucagagccaccagaauu

SEQ ID NO: 5000 - RNA, 1813 nt, Artificial Sequence
  mRNA product Design a-5 comprising derived and/or modified sequence from HRSV(A2)__F-del_DSCav1_mut4 (opt2)
gggagacuuucccauucuguagcagaauuugguguugccuguggucuuggucccgcggagaagcuuaccauggagcuccucauccucaaggccaacgccaucaccaccauccucaccgccgucaccuucugcuucgccuccggccagaacaucaccgaggaguucuaccaguccaccugcuccgccgucuccaagggcuaccucuccgcccuccgcaccggcugguacaccuccgucaucaccaucgagcucuccaacaucaaggagaacaagugcaacggcaccgacgccaaggucaagcucaucaagcaggagcucgacaaguacaagaacgccgucaccgagcuccagcuccucaugcaguccacccccgccaccggcuccggcuccgccaucugcuccggcgucgccgucugcaagguccuccaccucgagggcgaggucaacaagaucaaguccgcccuccucuccaccaacaaggccgucgucucccucuccaacggcgucuccguccucaccuucaagguccucgaccucaagaacuacaucgacaagcagcuccuccccauccucaacaagcaguccugcuccaucuccaacaucgagaccgucaucgaguuccagcagaagaacaaccgccuccucgagaucacccgcgaguucuccgucaacgccggcgucaccacccccgucuccaccuacaugcucaccaacuccgagcuccucucccucaucaacgacaugcccaucaccaacgaccagaagaagcucauguccaacaacguccagaucguccgccagcaguccuacuccaucaugugcaucaucaaggaggagguccucgccuacgucguccagcucccccucuacggcgucaucgacacccccugcuggaagcuccacaccuccccccucugcaccaccaacaccaaggagggcuccaacaucugccucacccgcaccgaccgcggcugguacugcgacaacgccggcuccgucuccuucuucccccaggccgagaccugcaagguccaguccaaccgcgucuucugcgacaccaugaacucccgcacccuccccuccgaggucaaccucugcaacgucgacaucuucaaccccaaguacgacugcaagaucaugaccuccaagaccgacgucuccuccuccgucaucaccucccucggcgccaucgucuccugcuacggcaagaccaagugcaccgccuccaacaagaaccgcggcaucaucaagaccuucuccaacggcugcgacuacgucuccaacaagggcgucgacaccgucuccgucggcaacacccucuacugcgucaacaagcaggagggcaagucccucuacgucaagggcgagcccaucaucaacuucuacgacccccucgucuuccccuccgacgaguucgacgccuccaucucccaggucaacgagaagaucaaccagucccucgccuucauccgcaaguccgacgagcuccuccacaacgucaacgccggcaaguccaccaccaacaucaugaucaccaccaucaucaucgucaucaucgucauccuccucucccucaucgccgucggccuccuccucuacugcaaggcccgcugaggacuagucccuguucccagagcccacuuuuuuuucuuuuuuugaaauaaaauagccugucuuucagaucuaaaaaaaaaaaaaaaaaaaaaaaaaaaaaaaaaaaaaaaaaaaaaaaaaaaaaaaaaaaaaaaaugcaucccccccccccccccccccccccccccccccaaaggcucuuuucagagccaccagaauu

SEQ ID NO: 5001 - RNA, 1813 nt, Artificial Sequence
  mRNA product Design a-5 comprising derived and/or modified sequence from HRSV(A2)__F-del_DSCav1_mut4 (opt3)
gggagacuuucccauucuguagcagaauuugguguugccuguggucuuggucccgcggagaagcuuaccauggagcugcucauccuuaaggccaacgcuauuaccacaauacugacugcagugacguucugcuuugccagcggccagaauaucaccgaagaguucuaccaauccacauguucugcggucucaaaaggguauuugagugcuuuaagaacuggaugguacaccagcguuauuacaaucgaacuguccaacauuaaggagaauaaaugcaacgguaccgacgccaaggugaaacuaaucaagcaggaacucgauaaguauaaaaaugcaguaacugagcugcagcuucugaugcagucuacacccgccaccggcucggggucagcuauauguagcggaguggcagucugcaagguguugcaccucgagggcgaaguuaacaaaaucaagagugcccugcuguccacgaauaaagcuguggucucucucagcaacgguguguccguauuaacuuuuaagguucuggaccuuaagaauuacauugauaaacaauugcugccuauccuaaacaagcagucauguaguauuagcaauaucgagaccgugauagaguuccagcagaaaaacaauaggcuccuggaaauuacacgggaguuuucugucaacgccggggugacuaccccaguguccacauauaugcuuaccaauucagaacuguugagccucaucaacgacaugccgauuacgaacgaucaaaagaaacugaugaguaauaacguccagaucguucgccagcagucuuacuccaucaugugcauuauaaaggaggaaguguuagcguauguagugcaacugccccucuacggagucaucgacacuccuuguuggaaacuucauacaagcccacugugcaccacuaauacaaaggagggcucgaacauuuguuugacccgaacggaucguggcugguacugcgacaaugcagggucuguguccuucuuuccccaggccgaaaccuguaagguucagucaaacagaguguucugcgauacaaugaauaguagaacucugccuagcgaggucaaccucugcaauguggacaucuuuaacccaaaauaugauuguaagauaaugaccuccaaaacagacguaucuagcucaguuauuaccagucugggagcuaucguguccugcuacgguaagacuaaauguacagccagcaauaagaacaggggcaucauuaagaccuucucuaaugggugcgauuaugucucaaacaaaggaguggacacugucagugugggcaauacgcuuuacuguguuaacaagcaagaggguaaaagccuguaugugaagggggaacccaucauuaacuuuuacgacccuuugguauucccauccgaugaguuugacgcaucuauaucgcaggucaaugagaaaaucaaccagagccucgcuuucauucggaaguccgaugaacuguuacacaaugugaacgccggaaagucaacaaccaauaucaugaucacuaccauuauaaucguuauuaucgugauucugcuaagucucaucgcggucggccugcuuuuguauugcaaagcccgcugaggacuagucccuguucccagagcccacuuuuuuuucuuuuuuugaaauaaaauagccugucuuucagaucuaaaaaaaaaaaaaaaaaaaaaaaaaaaaaaaaaaaaaaaaaaaaaaaaaaaaaaaaaaaaaaaaugcaucccccccccccccccccccccccccccccccaaaggcucuuuucagagccaccagaauu

SEQ ID NO: 5002 - RNA, 1813 nt, Artificial Sequence
  mRNA product Design a-5 comprising derived and/or modified sequence from HRSV(A2)__F-del_DSCav1_mut4 (opt4)
gggagacuuucccauucuguagcagaauuugguguugccuguggucuuggucccgcggagaagcuuaccauggagcugcugauccugaaggccaacgccaucaccaccauccugaccgccgugaccuucugcuucgccagcggccagaacaucaccgaggaguucuaccagagcaccugcagcgccgugagcaagggcuaccugagcgcccugagaaccggcugguacaccagcgugaucaccaucgagcugagcaacaucaaggagaacaagugcaacggcaccgacgccaaggugaagcugaucaagcaggagcuggacaaguacaagaacgccgugaccgagcugcagcugcugaugcagagcacccccgccaccggcagcggcagcgccaucugcagcggcguggccgugugcaaggugcugcaccuggagggcgaggugaacaagaucaagagcgcccugcugagcaccaacaaggccguggugagccugagcaacggcgugagcgugcugaccuucaaggugcuggaccugaagaacuacaucgacaagcagcugcugcccauccugaacaagcagagcugcagcaucagcaacaucgagaccgugaucgaguuccagcagaagaacaacagacugcuggagaucaccagagaguucagcgugaacgccggcgugaccacccccgugagcaccuacaugcugaccaacagcgagcugcugagccugaucaacgacaugcccaucaccaacgaccagaagaagcugaugagcaacaacgugcagaucgugagacagcagagcuacagcaucaugugcaucaucaaggaggaggugcuggccuacguggugcagcugccccuguacggcgugaucgacacccccugcuggaagcugcacaccagcccccugugcaccaccaacaccaaggagggcagcaacaucugccugaccagaaccgacagaggcugguacugcgacaacgccggcagcgugagcuucuucccccaggccgagaccugcaaggugcagagcaacagaguguucugcgacaccaugaacagcagaacccugcccagcgaggugaaccugugcaacguggacaucuucaaccccaaguacgacugcaagaucaugaccagcaagaccgacgugagcagcagcgugaucaccagccugggcgccaucgugagcugcuacggcaagaccaagugcaccgccagcaacaagaacagaggcaucaucaagaccuucagcaacggcugcgacuacgugagcaacaagggcguggacaccgugagcgugggcaacacccuguacugcgugaacaagcaggagggcaagagccuguacgugaagggcgagcccaucaucaacuucuacgacccccugguguuccccagcgacgaguucgacgccagcaucagccaggugaacgagaagaucaaccagagccuggccuucaucagaaagagcgacgagcugcugcacaacgugaacgccggcaagagcaccaccaacaucaugaucaccaccaucaucaucgugaucaucgugauccugcugagccugaucgccgugggccugcugcuguacugcaaggccagaugaggacuagucccuguucccagagcccacuuuuuuuucuuuuuuugaaauaaaauagccugucuuucagaucuaaaaaaaaaaaaaaaaaaaaaaaaaaaaaaaaaaaaaaaaaaaaaaaaaaaaaaaaaaaaaaaaugcaucccccccccccccccccccccccccccccccaaaggcucuuuucagagccaccagaauu

SEQ ID NO: 5003 - RNA, 1813 nt, Artificial Sequence
  mRNA product Design a-5 comprising derived and/or modified sequence from HRSV(A2)__F-del_DSCav1_mut4 (opt5)
gggagacuuucccauucuguagcagaauuugguguugccuguggucuuggucccgcggagaagcuuaccauggagcugcucauccugaaggccaacgcuauuaccacaauccuuacggccgugaccuucugcuuugcgagcggccagaauauuacagaagaguucuaccaauccaccuguucugcugucagcaaaggguaucuguccgcccucagaacaggaugguacaccucuguuaucacaauugaacugagcaacaucaaggagaauaaaugcaacggcaccgacgccaaggugaaacuuaucaagcaggaacuggauaaguauaaaaaugcugugacggagcuccagcugcugaugcaguccacccccgccacagggucuggaagcgcuauuuguuccggcgucgccgugugcaagguucuccaccuggagggggaagugaacaaaaucaagagcgcgcuucugucuaccaauaaagccgucgugucccucagcaacggaguuucugugcugacauuuaagguccuugaccugaagaauuacauugauaaacaacuccugccuauccugaacaagcaguccuguagcauuucuaauaucgagaccgugauugaguuccagcagaaaaacaaucggcuccuggaaaucacgcgcgaguuuuccgugaacgcuggcgucacaaccccgguuagcacauauaugcuuaccaauuccgaacugcucucucugaucaacgacaugcccauuaccaacgaucaaaagaaacuuaugagcaauaacgugcagaucgugagacagcaguccuacagcauuaugugcaucauuaaggaggaaguccuggccuaugugguucaacucccucuguacggcgugaucgacacacccuguuggaaacugcauacgucuccucucugcaccacaaauaccaaggagggguccaacaucugucugacacggaccgaucgcggaugguacugcgacaaugcuggcagcgucucuuucuuuccccaggccgaaacguguaaggugcagagcaacagaguuuucugcgauacaaugaacuccagaacccugccuucugaggugaaucucugcaaugucgacauuuuuaacccgaaauaugauuguaagaucaugaccagcaaaacagacguguccagcucugucauuaccucccugggggcgaucgugagcugcuacggaaagacaaaauguacggccucuaauaagaaccggggcauuaucaagaccuucuccaaugggugcgauuauguuagcaacaaaggaguggacacagucuccgugggcaauacccuuuacuguguuaacaagcaagagggcaaaucucuguaugugaagggggaacccaucauuaacuuuuacgacccucucgucuuccccagcgaugaguuugacgcuuccaucucucaggugaaugagaaaauuaaccagagccuggccuucauccgcaaguccgaugaacugcuccacaaugugaacgcuggaaagagcacaaccaauauuaugaucacgaccauuaucaucguuauuaucgucauucugcuuucucugaucgccgugggccuccugcuguauugcaaagccagaugaggacuagucccuguucccagagcccacuuuuuuuucuuuuuuugaaauaaaauagccugucuuucagaucuaaaaaaaaaaaaaaaaaaaaaaaaaaaaaaaaaaaaaaaaaaaaaaaaaaaaaaaaaaaaaaaaugcaucccccccccccccccccccccccccccccccaaaggcucuuuucagagccaccagaauu

SEQ ID NO: 5004 - RNA, 1813 nt, Artificial Sequence
  mRNA product Design a-5 comprising derived and/or modified sequence from HRSV(A2)__F-del_DSCav1_mut4 (opt6)
gggagacuuucccauucuguagcagaauuugguguugccuguggucuuggucccgcggagaagcuuaccauggaacuuuuaauacuaaaagcuaacgccauaaccacuauacuaacagcagucacauucugcuucgcaucaggccaaaacauaaccgaagaauuuuaccaauccacuuguucagcagucuccaaaggauauuuauccgcacuucguacaggaugguauacaucaguaauaacaauagaacucuccaacauaaaagaaaauaaaugcaacggcaccgacgcaaaaguaaaacucaucaaacaagaauuagacaaauacaagaacgccguaacagaacuacaauuacuaaugcaaucaacacccgccacaggaucaggaucugcaauaugcucuggaguagcaguaugcaaaguauuacaccuagaaggagaaguaaacaaaaucaaaagcgcacuacuauccacaaacaaagcuguaguaucacuaucaaacggaguaucaguauuaacuuucaaaguacuugaucuaaaaaacuacauagacaaacaacuacuacccauauuaaacaaacaaucaugcucaauaagcaauauagaaacaguaauagaauuucaacaaaaaaacaacagacuacuagaaaucacaagggaauuuucaguaaaugccgguguuacaaccccaguaucaacauacaugcuaacuaacucagaacuacuauccuuaauaaacgauaugccaauaacaaacgaucaaaaaaaacuaauguccaacaacguacaaauaguaagacaacaaucauacucaaucaugugcauuauaaaagaagaagucuuagcauacguaguacaauuaccacuauacgguguaauagauacaccauguuggaaauuacacacaagcccacuaugcacaacuaacacaaaagaaggcucaaauauauguuuaacaagaacagaccgagguugguacugcgacaaugcaggaucaguaucauucuuuccacaagcagaaacauguaaaguucaauccaacagaguauucugcgacacaaugaacuccagaacacuaccuucagaaguaaaccucuguaacguagacauauuuaaucccaaguacgacugcaaaauaaugacaucgaaaacagacguaagcuccucagugauaacaucccucggcgccaucguauccuguuacgguaaaacuaaauguaccgccucaaacaaaaaccgcgguauuauaaaaacuuuuucuaauggcugcgauuacguaagcaacaaaggcgucgacacaguuuccguaggaaacacacuauacugcguaaacaaacaagaagguaaaucucuauacguaaaaggagaaccaauaauaaauuucuaugauccuuuaguauucccauccgaugaauuugacgccucuaucucacaagucaacgaaaaaauaaaucaaucauuagcauucauacgaaaaucagacgaacuacuacacaacguaaacgcaggaaaaucaacaaccaacauaaugauaaccacaauaauaauaguuauuauagugauacuauuauccuuaauugcagucggacuauuauuauacuguaaagcacgcuaaggacuagucccuguucccagagcccacuuuuuuuucuuuuuuugaaauaaaauagccugucuuucagaucuaaaaaaaaaaaaaaaaaaaaaaaaaaaaaaaaaaaaaaaaaaaaaaaaaaaaaaaaaaaaaaaaugcaucccccccccccccccccccccccccccccccaaaggcucuuuucagagccaccagaauu

SEQ ID NO: 5005 - RNA, 1813 nt, Artificial Sequence
  mRNA product Design a-5 comprising derived and/or modified sequence from HRSV(A2)__F-del_DSCav1_mut4 (opt11)
gggagacuuucccauucuguagcagaauuugguguugccuguggucuuggucccgcggagaagcuuaccauggaacuccucauccucaaagccaaugccaucaccacaauccugacagcaguaaccuucugcuucgcauccggacaaaacaucaccgaagaauuuuaccagucaaccugcuccgcugucucaaaaggcuaccucucagcccuucgcaccggcugguacaccucggucauaacaauagaacucuccaauaucaaagaaaacaaaugcaacggcacugacgccaagguaaaacucaucaaacaggaacucgauaaauacaagaacgccguaacagaacuacaacuacucaugcaaucaacaccggccaccggcuccgguuccgccauaugcuccggaguggccgugugcaagguccuccaccuugaaggggaaguuaacaaaaucaaaucagcccuccucuccacuaacaaagccguaguaucccuaagcaacgguguauccguccucaccuucaaaguacuagaccuaaagaauuauaucgacaaacaacuccuccccauacucaacaaacaauccugcuccauaagcaacaucgaaacagucaucgaguuccagcagaaaaacaaccgacuccucgaaauaacccgcgaguucucagucaacgccggagucaccacacccgucagcaccuacaugcugaccaacuccgaacuccucuccuuaaucaaugacaugcccaucaccaaugaccaaaagaaacucaugucaaacaacguccaaauaguacgccaacaauccuacuccaucaugugcaucauaaaagaagaaguacucgccuacgucguccaacucccccucuacggcguaaucgacacccccugcuggaaacuacacacaagcccccucugcaccacaaacacuaaagagggcuccaacaucugucuaacccgcaccgaucgaggcugguacugcgacaacgccggaucugucucauucuucccccaagccgaaaccugcaaaguccaauccaaccgcgucuucugcgacaccaugaacucgagaacccucccuuccgaagucaaccuaugcaacgucgacauuuucaaccccaaauacgacugcaaaaucaugaccucgaaaaccgacguaucauccagcgucaucaccagccuaggcgcaaucgugagcugcuacggcaaaaccaaaugcaccgcgagcaauaaaaaccgcgggaucaucaaaacuuucuccaacggcugcgacuacgucuccaacaagggagucgauaccgucuccguaggcaacacccucuacugcgucaacaaacaagaaggcaaaucacuauacguaaaaggcgagccaaucauaaacuucuacgacccucuaguuuucccauccgacgaguucgacgcuagcaucucccaagucaacgagaaaaucaaccaaucccucgcauucauccgcaaauccgacgaacuccuccacaacguaaacgcaggcaaaucaacuacuaauauaaugaucacaaccaucauaauagucauaaucguaauccuccuaucccucaucgccgucggacuacugcucuacugcaaagcccgcuaaggacuagucccuguucccagagcccacuuuuuuuucuuuuuuugaaauaaaauagccugucuuucagaucuaaaaaaaaaaaaaaaaaaaaaaaaaaaaaaaaaaaaaaaaaaaaaaaaaaaaaaaaaaaaaaaaugcaucccccccccccccccccccccccccccccccaaaggcucuuuucagagccaccagaauu

SEQ ID NO: 5006 - RNA, 1994 nt, Artificial Sequence
  mRNA product Design b-1 comprising derived and/or modified sequence from HRSV(A2)__F-del_DSCav1_mut4 (opt1)
gggagacggagacggccugcaggaccugcucucucagcccucagccgaggccuacgccgagccgagugcgcagccgacgaccgggaggagccgcagccuucaacucugagguacugugauccgcgcugcccgccgggccgccccaguccgcugcugcggcaccuccuucccucgcgcccucuucgcucgccagcgccuucccugugagccugcgucaccgcggccgccaagcuuaccauggagcugcucauccugaaggccaacgccaucaccaccauccugacggcggugaccuucugcuucgccagcggccagaacaucaccgaggaguucuaccaguccacgugcagcgccgucuccaagggguaccucagcgcccugcggaccggcugguacaccuccgugaucaccaucgagcugagcaacaucaaggagaacaagugcaacgggaccgacgccaaggugaagcucaucaagcaggagcuggacaaguacaagaacgcggucacggagcugcagcuccugaugcaguccaccccggcaaccggcuccggcuccgccaucugcagcggcgucgccgugugcaaggugcugcaccucgagggggaggucaacaagaucaagagcgcccugcuguccaccaacaaggccguggugagccucuccaacggcgucagcgugcugaccuucaaggugcuggaccucaagaacuacaucgacaagcagcugcugcccauccugaacaagcagagcugcuccaucagcaacaucgagacggugaucgaguuccagcagaagaacaaccggcuccuggagaucacccgcgaguucagcgugaacgccggggucaccacccccguguccacguacaugcugaccaacagcgagcuccugucccugaucaacgacaugccgaucaccaacgaccagaagaagcucaugagcaacaacgugcagaucguccggcagcaguccuacagcaucaugugcaucaucaaggaggaggugcuggcguacgugguccagcugccccucuacggcgugaucgacacccccugcuggaagcugcacacgagcccccugugcaccaccaacaccaaggagggguccaacaucugccucacgcgcaccgaccggggcugguacugcgacaacgccggcagcgucuccuucuucccgcaggccgagaccugcaaggugcagagcaaccgcguguucugcgacaccaugaacucccggacgcugcccagcgagguaaaccucugcaacgucgacaucuucaaccccaaguacgacugcaagaucaugaccuccaagaccgacgugagcuccagcgugaucaccucccugggggccaucgucagcugcuacggcaagacgaagugcaccgccagcaacaagaaccgggggaucaucaagaccuucuccaacggcugcgacuacgugagcaacaagggcguggacaccguguccgucgggaacacccuguacugcgugaacaagcaggagggcaagagccucuacgugaagggggagcccaucaucaacuucuacgacccgcuggucuuccccuccgacgaguucgacgcgagcaucucccaggugaacgagaagaucaaccagagccuggccuucauccgcaaguccgacgagcugcuccacaacgugaacgccggcaagagcacgaccaacaucaugaucaccaccaucaucaucgucaucaucgugauccugcugucccucaucgccguggggcugcugcucuacugcaaggcccggugaggacuaguguccaccugucccuccugggcugcuggauugucucguuuuccugccaaauaaacaggaucagcgcuuuacagaucuaaaaaaaaaaaaaaaaaaaaaaaaaaaaaaaaaaaaaaaaaaaaaaaaaaaaaaaaaaaaaaaaugcaucccccccccccccccccccccccccccccccaaaggcucuuuucagagccaccagaauu

SEQ ID NO: 5007 - RNA, 1994 nt, Artificial Sequence
  mRNA product Design b-1 comprising derived and/or modified sequence from HRSV(A2)__F-del_DSCav1_mut4 (opt1)
gggagacggagacggccugcaggaccugcucucucagcccucagccgaggccuacgccgagccgagugcgcagccgacgaccgggaggagccgcagccuucaacucugagguacugugauccgcgcugcccgccgggccgccccaguccgcugcugcggcaccuccuucccucgcgcccucuucgcucgccagcgccuucccugugagccugcgucaccgcggccgccaagcuuaccauggagcugcucauccugaaggccaacgccaucaccaccauccugacggcggugaccuucugcuucgccagcggccagaacaucaccgaggaguucuaccaguccacgugcagcgccgucuccaagggguaccucagcgcccugcgcaccggcugguacaccuccgugaucaccaucgagcugagcaacaucaaggagaacaagugcaacgggaccgacgccaaggugaagcucaucaagcaggagcuggacaaguacaagaacgcggucacggagcugcagcuccugaugcaguccacccccgccaccggcagcggguccgccaucugcagcggcguggccgugugcaagguccugcaccucgagggcgaggugaacaagaucaaguccgcgcugcugagcaccaacaaggccguggucucccucagcaacgggguguccgugcugacguucaagguccuggaccucaagaacuacaucgacaagcagcugcugccgauccucaacaagcagagcugcuccaucagcaacaucgagaccgugaucgaguuccagcagaagaacaaccggcugcuggagaucacccgcgaguucuccgugaacgccggcgucaccacgcccgugagcaccuacaugcucaccaacagcgagcugcugucccucaucaacgacaugcccaucaccaacgaccagaagaagcugaugagcaacaacgugcagaucguccggcagcaguccuacagcaucaugugcaucaucaaggaggaggugcuggccuacgugguccagcucccccuguacggggugaucgacacgccgugcuggaagcugcacaccagcccccucugcaccaccaacacgaaggagggcuccaacaucugccugacccgcaccgaccgggggugguacugcgacaacgccggcuccgugagcuucuucccccaggcggagaccugcaagguccaguccaaccgcguguucugcgacacgaugaacagccggacccuccccuccgaggucaaccugugcaacguggacaucuucaacccgaaguacgacugcaagaucaugaccagcaagaccgacguguccagcuccgucaucacgagccugggcgccaucguguccugcuacgggaagaccaagugcaccgccagcaacaagaaccggggcaucaucaagaccuucuccaacgggugcgacuacgugagcaacaagggcgucgacacggugagcgugggcaacacccucuacugcgucaacaagcaggaggggaagucccuguacgugaagggcgagcccaucaucaacuucuacgacccccugguguuccccagcgacgaguucgacgccuccaucagccaggucaacgagaagaucaaccagucccucgccuucauccgcaagagcgacgagcugcugcacaacgugaacgcggggaaguccaccaccaacaucaugaucaccacgaucaucaucgugaucaucgucauccuccugagccugaucgccgugggccuccugcuguacugcaaggcccggugaggacuaguguccaccugucccuccugggcugcuggauugucucguuuuccugccaaauaaacaggaucagcgcuuuacagaucuaaaaaaaaaaaaaaaaaaaaaaaaaaaaaaaaaaaaaaaaaaaaaaaaaaaaaaaaaaaaaaaaugcaucccccccccccccccccccccccccccccccaaaggcucuuuucagagccaccagaauu

SEQ ID NO: 5008 - RNA, 1994 nt, Artificial Sequence
  mRNA product Design b-1 comprising derived and/or modified sequence from HRSV(A2)__F-del_DSCav1_mut4 (opt2)
gggagacggagacggccugcaggaccugcucucucagcccucagccgaggccuacgccgagccgagugcgcagccgacgaccgggaggagccgcagccuucaacucugagguacugugauccgcgcugcccgccgggccgccccaguccgcugcugcggcaccuccuucccucgcgcccucuucgcucgccagcgccuucccugugagccugcgucaccgcggccgccaagcuuaccauggagcuccucauccucaaggccaacgccaucaccaccauccucaccgccgucaccuucugcuucgccuccggccagaacaucaccgaggaguucuaccaguccaccugcuccgccgucuccaagggcuaccucuccgcccuccgcaccggcugguacaccuccgucaucaccaucgagcucuccaacaucaaggagaacaagugcaacggcaccgacgccaaggucaagcucaucaagcaggagcucgacaaguacaagaacgccgucaccgagcuccagcuccucaugcaguccacccccgccaccggcuccggcuccgccaucugcuccggcgucgccgucugcaagguccuccaccucgagggcgaggucaacaagaucaaguccgcccuccucuccaccaacaaggccgucgucucccucuccaacggcgucuccguccucaccuucaagguccucgaccucaagaacuacaucgacaagcagcuccuccccauccucaacaagcaguccugcuccaucuccaacaucgagaccgucaucgaguuccagcagaagaacaaccgccuccucgagaucacccgcgaguucuccgucaacgccggcgucaccacccccgucuccaccuacaugcucaccaacuccgagcuccucucccucaucaacgacaugcccaucaccaacgaccagaagaagcucauguccaacaacguccagaucguccgccagcaguccuacuccaucaugugcaucaucaaggaggagguccucgccuacgucguccagcucccccucuacggcgucaucgacacccccugcuggaagcuccacaccuccccccucugcaccaccaacaccaaggagggcuccaacaucugccucacccgcaccgaccgcggcugguacugcgacaacgccggcuccgucuccuucuucccccaggccgagaccugcaagguccaguccaaccgcgucuucugcgacaccaugaacucccgcacccuccccuccgaggucaaccucugcaacgucgacaucuucaaccccaaguacgacugcaagaucaugaccuccaagaccgacgucuccuccuccgucaucaccucccucggcgccaucgucuccugcuacggcaagaccaagugcaccgccuccaacaagaaccgcggcaucaucaagaccuucuccaacggcugcgacuacgucuccaacaagggcgucgacaccgucuccgucggcaacacccucuacugcgucaacaagcaggagggcaagucccucuacgucaagggcgagcccaucaucaacuucuacgacccccucgucuuccccuccgacgaguucgacgccuccaucucccaggucaacgagaagaucaaccagucccucgccuucauccgcaaguccgacgagcuccuccacaacgucaacgccggcaaguccaccaccaacaucaugaucaccaccaucaucaucgucaucaucgucauccuccucucccucaucgccgucggccuccuccucuacugcaaggcccgcugaggacuaguguccaccugucccuccugggcugcuggauugucucguuuuccugccaaauaaacaggaucagcgcuuuacagaucuaaaaaaaaaaaaaaaaaaaaaaaaaaaaaaaaaaaaaaaaaaaaaaaaaaaaaaaaaaaaaaaaugcaucccccccccccccccccccccccccccccccaaaggcucuuuucagagccaccagaauu

SEQ ID NO: 5009 - RNA, 1994 nt, Artificial Sequence
  mRNA product Design b-1 comprising derived and/or modified sequence from HRSV(A2)__F-del_DSCav1_mut4 (opt3)
gggagacggagacggccugcaggaccugcucucucagcccucagccgaggccuacgccgagccgagugcgcagccgacgaccgggaggagccgcagccuucaacucugagguacugugauccgcgcugcccgccgggccgccccaguccgcugcugcggcaccuccuucccucgcgcccucuucgcucgccagcgccuucccugugagccugcgucaccgcggccgccaagcuuaccauggagcugcucauccuuaaggccaacgcuauuaccacaauacugacugcagugacguucugcuuugccagcggccagaauaucaccgaagaguucuaccaauccacauguucugcggucucaaaaggguauuugagugcuuuaagaacuggaugguacaccagcguuauuacaaucgaacuguccaacauuaaggagaauaaaugcaacgguaccgacgccaaggugaaacuaaucaagcaggaacucgauaaguauaaaaaugcaguaacugagcugcagcuucugaugcagucuacacccgccaccggcucggggucagcuauauguagcggaguggcagucugcaagguguugcaccucgagggcgaaguuaacaaaaucaagagugcccugcuguccacgaauaaagcuguggucucucucagcaacgguguguccguauuaacuuuuaagguucuggaccuuaagaauuacauugauaaacaauugcugccuauccuaaacaagcagucauguaguauuagcaauaucgagaccgugauagaguuccagcagaaaaacaauaggcuccuggaaauuacacgggaguuuucugucaacgccggggugacuaccccaguguccacauauaugcuuaccaauucagaacuguugagccucaucaacgacaugccgauuacgaacgaucaaaagaaacugaugaguaauaacguccagaucguucgccagcagucuuacuccaucaugugcauuauaaaggaggaaguguuagcguauguagugcaacugccccucuacggagucaucgacacuccuuguuggaaacuucauacaagcccacugugcaccacuaauacaaaggagggcucgaacauuuguuugacccgaacggaucguggcugguacugcgacaaugcagggucuguguccuucuuuccccaggccgaaaccuguaagguucagucaaacagaguguucugcgauacaaugaauaguagaacucugccuagcgaggucaaccucugcaauguggacaucuuuaacccaaaauaugauuguaagauaaugaccuccaaaacagacguaucuagcucaguuauuaccagucugggagcuaucguguccugcuacgguaagacuaaauguacagccagcaauaagaacaggggcaucauuaagaccuucucuaaugggugcgauuaugucucaaacaaaggaguggacacugucagugugggcaauacgcuuuacuguguuaacaagcaagaggguaaaagccuguaugugaagggggaacccaucauuaacuuuuacgacccuuugguauucccauccgaugaguuugacgcaucuauaucgcaggucaaugagaaaaucaaccagagccucgcuuucauucggaaguccgaugaacuguuacacaaugugaacgccggaaagucaacaaccaauaucaugaucacuaccauuauaaucguuauuaucgugauucugcuaagucucaucgcggucggccugcuuuuguauugcaaagcccgcugaggacuaguguccaccugucccuccugggcugcuggauugucucguuuuccugccaaauaaacaggaucagcgcuuuacagaucuaaaaaaaaaaaaaaaaaaaaaaaaaaaaaaaaaaaaaaaaaaaaaaaaaaaaaaaaaaaaaaaaugcaucccccccccccccccccccccccccccccccaaaggcucuuuucagagccaccagaauu

SEQ ID NO: 5010 - RNA, 1994 nt, Artificial Sequence
  mRNA product Design b-1 comprising derived and/or modified sequence from HRSV(A2)__F-del_DSCav1_mut4 (opt4)
gggagacggagacggccugcaggaccugcucucucagcccucagccgaggccuacgccgagccgagugcgcagccgacgaccgggaggagccgcagccuucaacucugagguacugugauccgcgcugcccgccgggccgccccaguccgcugcugcggcaccuccuucccucgcgcccucuucgcucgccagcgccuucccugugagccugcgucaccgcggccgccaagcuuaccauggagcugcugauccugaaggccaacgccaucaccaccauccugaccgccgugaccuucugcuucgccagcggccagaacaucaccgaggaguucuaccagagcaccugcagcgccgugagcaagggcuaccugagcgcccugagaaccggcugguacaccagcgugaucaccaucgagcugagcaacaucaaggagaacaagugcaacggcaccgacgccaaggugaagcugaucaagcaggagcuggacaaguacaagaacgccgugaccgagcugcagcugcugaugcagagcacccccgccaccggcagcggcagcgccaucugcagcggcguggccgugugcaaggugcugcaccuggagggcgaggugaacaagaucaagagcgcccugcugagcaccaacaaggccguggugagccugagcaacggcgugagcgugcugaccuucaaggugcuggaccugaagaacuacaucgacaagcagcugcugcccauccugaacaagcagagcugcagcaucagcaacaucgagaccgugaucgaguuccagcagaagaacaacagacugcuggagaucaccagagaguucagcgugaacgccggcgugaccacccccgugagcaccuacaugcugaccaacagcgagcugcugagccugaucaacgacaugcccaucaccaacgaccagaagaagcugaugagcaacaacgugcagaucgugagacagcagagcuacagcaucaugugcaucaucaaggaggaggugcuggccuacguggugcagcugccccuguacggcgugaucgacacccccugcuggaagcugcacaccagcccccugugcaccaccaacaccaaggagggcagcaacaucugccugaccagaaccgacagaggcugguacugcgacaacgccggcagcgugagcuucuucccccaggccgagaccugcaaggugcagagcaacagaguguucugcgacaccaugaacagcagaacccugcccagcgaggugaaccugugcaacguggacaucuucaaccccaaguacgacugcaagaucaugaccagcaagaccgacgugagcagcagcgugaucaccagccugggcgccaucgugagcugcuacggcaagaccaagugcaccgccagcaacaagaacagaggcaucaucaagaccuucagcaacggcugcgacuacgugagcaacaagggcguggacaccgugagcgugggcaacacccuguacugcgugaacaagcaggagggcaagagccuguacgugaagggcgagcccaucaucaacuucuacgacccccugguguuccccagcgacgaguucgacgccagcaucagccaggugaacgagaagaucaaccagagccuggccuucaucagaaagagcgacgagcugcugcacaacgugaacgccggcaagagcaccaccaacaucaugaucaccaccaucaucaucgugaucaucgugauccugcugagccugaucgccgugggccugcugcuguacugcaaggccagaugaggacuaguguccaccugucccuccugggcugcuggauugucucguuuuccugccaaauaaacaggaucagcgcuuuacagaucuaaaaaaaaaaaaaaaaaaaaaaaaaaaaaaaaaaaaaaaaaaaaaaaaaaaaaaaaaaaaaaaaugcaucccccccccccccccccccccccccccccccaaaggcucuuuucagagccaccagaauu

SEQ ID NO: 5011 - RNA, 1994 nt, Artificial Sequence
  mRNA product Design b-1 comprising derived and/or modified sequence from HRSV(A2)__F-del_DSCav1_mut4 (opt5)
gggagacggagacggccugcaggaccugcucucucagcccucagccgaggccuacgccgagccgagugcgcagccgacgaccgggaggagccgcagccuucaacucugagguacugugauccgcgcugcccgccgggccgccccaguccgcugcugcggcaccuccuucccucgcgcccucuucgcucgccagcgccuucccugugagccugcgucaccgcggccgccaagcuuaccauggagcugcucauccugaaggccaacgcuauuaccacaauccuuacggccgugaccuucugcuuugcgagcggccagaauauuacagaagaguucuaccaauccaccuguucugcugucagcaaaggguaucuguccgcccucagaacaggaugguacaccucuguuaucacaauugaacugagcaacaucaaggagaauaaaugcaacggcaccgacgccaaggugaaacuuaucaagcaggaacuggauaaguauaaaaaugcugugacggagcuccagcugcugaugcaguccacccccgccacagggucuggaagcgcuauuuguuccggcgucgccgugugcaagguucuccaccuggagggggaagugaacaaaaucaagagcgcgcuucugucuaccaauaaagccgucgugucccucagcaacggaguuucugugcugacauuuaagguccuugaccugaagaauuacauugauaaacaacuccugccuauccugaacaagcaguccuguagcauuucuaauaucgagaccgugauugaguuccagcagaaaaacaaucggcuccuggaaaucacgcgcgaguuuuccgugaacgcuggcgucacaaccccgguuagcacauauaugcuuaccaauuccgaacugcucucucugaucaacgacaugcccauuaccaacgaucaaaagaaacuuaugagcaauaacgugcagaucgugagacagcaguccuacagcauuaugugcaucauuaaggaggaaguccuggccuaugugguucaacucccucuguacggcgugaucgacacacccuguuggaaacugcauacgucuccucucugcaccacaaauaccaaggagggguccaacaucugucugacacggaccgaucgcggaugguacugcgacaaugcuggcagcgucucuuucuuuccccaggccgaaacguguaaggugcagagcaacagaguuuucugcgauacaaugaacuccagaacccugccuucugaggugaaucucugcaaugucgacauuuuuaacccgaaauaugauuguaagaucaugaccagcaaaacagacguguccagcucugucauuaccucccugggggcgaucgugagcugcuacggaaagacaaaauguacggccucuaauaagaaccggggcauuaucaagaccuucuccaaugggugcgauuauguuagcaacaaaggaguggacacagucuccgugggcaauacccuuuacuguguuaacaagcaagagggcaaaucucuguaugugaagggggaacccaucauuaacuuuuacgacccucucgucuuccccagcgaugaguuugacgcuuccaucucucaggugaaugagaaaauuaaccagagccuggccuucauccgcaaguccgaugaacugcuccacaaugugaacgcuggaaagagcacaaccaauauuaugaucacgaccauuaucaucguuauuaucgucauucugcuuucucugaucgccgugggccuccugcuguauugcaaagccagaugaggacuaguguccaccugucccuccugggcugcuggauugucucguuuuccugccaaauaaacaggaucagcgcuuuacagaucuaaaaaaaaaaaaaaaaaaaaaaaaaaaaaaaaaaaaaaaaaaaaaaaaaaaaaaaaaaaaaaaaugcaucccccccccccccccccccccccccccccccaaaggcucuuuucagagccaccagaauu

SEQ ID NO: 5012 - RNA, 1994 nt, Artificial Sequence
  mRNA product Design b-1 comprising derived and/or modified sequence from HRSV(A2)__F-del_DSCav1_mut4 (opt6)
gggagacggagacggccugcaggaccugcucucucagcccucagccgaggccuacgccgagccgagugcgcagccgacgaccgggaggagccgcagccuucaacucugagguacugugauccgcgcugcccgccgggccgccccaguccgcugcugcggcaccuccuucccucgcgcccucuucgcucgccagcgccuucccugugagccugcgucaccgcggccgccaagcuuaccauggaacuuuuaauacuaaaagcuaacgccauaaccacuauacuaacagcagucacauucugcuucgcaucaggccaaaacauaaccgaagaauuuuaccaauccacuuguucagcagucuccaaaggauauuuauccgcacuucguacaggaugguauacaucaguaauaacaauagaacucuccaacauaaaagaaaauaaaugcaacggcaccgacgcaaaaguaaaacucaucaaacaagaauuagacaaauacaagaacgccguaacagaacuacaauuacuaaugcaaucaacacccgccacaggaucaggaucugcaauaugcucuggaguagcaguaugcaaaguauuacaccuagaaggagaaguaaacaaaaucaaaagcgcacuacuauccacaaacaaagcuguaguaucacuaucaaacggaguaucaguauuaacuuucaaaguacuugaucuaaaaaacuacauagacaaacaacuacuacccauauuaaacaaacaaucaugcucaauaagcaauauagaaacaguaauagaauuucaacaaaaaaacaacagacuacuagaaaucacaagggaauuuucaguaaaugccgguguuacaaccccaguaucaacauacaugcuaacuaacucagaacuacuauccuuaauaaacgauaugccaauaacaaacgaucaaaaaaaacuaauguccaacaacguacaaauaguaagacaacaaucauacucaaucaugugcauuauaaaagaagaagucuuagcauacguaguacaauuaccacuauacgguguaauagauacaccauguuggaaauuacacacaagcccacuaugcacaacuaacacaaaagaaggcucaaauauauguuuaacaagaacagaccgagguugguacugcgacaaugcaggaucaguaucauucuuuccacaagcagaaacauguaaaguucaauccaacagaguauucugcgacacaaugaacuccagaacacuaccuucagaaguaaaccucuguaacguagacauauuuaaucccaaguacgacugcaaaauaaugacaucgaaaacagacguaagcuccucagugauaacaucccucggcgccaucguauccuguuacgguaaaacuaaauguaccgccucaaacaaaaaccgcgguauuauaaaaacuuuuucuaauggcugcgauuacguaagcaacaaaggcgucgacacaguuuccguaggaaacacacuauacugcguaaacaaacaagaagguaaaucucuauacguaaaaggagaaccaauaauaaauuucuaugauccuuuaguauucccauccgaugaauuugacgccucuaucucacaagucaacgaaaaaauaaaucaaucauuagcauucauacgaaaaucagacgaacuacuacacaacguaaacgcaggaaaaucaacaaccaacauaaugauaaccacaauaauaauaguuauuauagugauacuauuauccuuaauugcagucggacuauuauuauacuguaaagcacgcuaaggacuaguguccaccugucccuccugggcugcuggauugucucguuuuccugccaaauaaacaggaucagcgcuuuacagaucuaaaaaaaaaaaaaaaaaaaaaaaaaaaaaaaaaaaaaaaaaaaaaaaaaaaaaaaaaaaaaaaaugcaucccccccccccccccccccccccccccccccaaaggcucuuuucagagccaccagaauu

SEQ ID NO: 5013 - RNA, 1994 nt, Artificial Sequence
  mRNA product Design b-1 comprising derived and/or modified sequence from HRSV(A2)__F-del_DSCav1_mut4 (opt11)
gggagacggagacggccugcaggaccugcucucucagcccucagccgaggccuacgccgagccgagugcgcagccgacgaccgggaggagccgcagccuucaacucugagguacugugauccgcgcugcccgccgggccgccccaguccgcugcugcggcaccuccuucccucgcgcccucuucgcucgccagcgccuucccugugagccugcgucaccgcggccgccaagcuuaccauggaacuccucauccucaaagccaaugccaucaccacaauccugacagcaguaaccuucugcuucgcauccggacaaaacaucaccgaagaauuuuaccagucaaccugcuccgcugucucaaaaggcuaccucucagcccuucgcaccggcugguacaccucggucauaacaauagaacucuccaauaucaaagaaaacaaaugcaacggcacugacgccaagguaaaacucaucaaacaggaacucgauaaauacaagaacgccguaacagaacuacaacuacucaugcaaucaacaccggccaccggcuccgguuccgccauaugcuccggaguggccgugugcaagguccuccaccuugaaggggaaguuaacaaaaucaaaucagcccuccucuccacuaacaaagccguaguaucccuaagcaacgguguauccguccucaccuucaaaguacuagaccuaaagaauuauaucgacaaacaacuccuccccauacucaacaaacaauccugcuccauaagcaacaucgaaacagucaucgaguuccagcagaaaaacaaccgacuccucgaaauaacccgcgaguucucagucaacgccggagucaccacacccgucagcaccuacaugcugaccaacuccgaacuccucuccuuaaucaaugacaugcccaucaccaaugaccaaaagaaacucaugucaaacaacguccaaauaguacgccaacaauccuacuccaucaugugcaucauaaaagaagaaguacucgccuacgucguccaacucccccucuacggcguaaucgacacccccugcuggaaacuacacacaagcccccucugcaccacaaacacuaaagagggcuccaacaucugucuaacccgcaccgaucgaggcugguacugcgacaacgccggaucugucucauucuucccccaagccgaaaccugcaaaguccaauccaaccgcgucuucugcgacaccaugaacucgagaacccucccuuccgaagucaaccuaugcaacgucgacauuuucaaccccaaauacgacugcaaaaucaugaccucgaaaaccgacguaucauccagcgucaucaccagccuaggcgcaaucgugagcugcuacggcaaaaccaaaugcaccgcgagcaauaaaaaccgcgggaucaucaaaacuuucuccaacggcugcgacuacgucuccaacaagggagucgauaccgucuccguaggcaacacccucuacugcgucaacaaacaagaaggcaaaucacuauacguaaaaggcgagccaaucauaaacuucuacgacccucuaguuuucccauccgacgaguucgacgcuagcaucucccaagucaacgagaaaaucaaccaaucccucgcauucauccgcaaauccgacgaacuccuccacaacguaaacgcaggcaaaucaacuacuaauauaaugaucacaaccaucauaauagucauaaucguaauccuccuaucccucaucgccgucggacuacugcucuacugcaaagcccgcuaaggacuaguguccaccugucccuccugggcugcuggauugucucguuuuccugccaaauaaacaggaucagcgcuuuacagaucuaaaaaaaaaaaaaaaaaaaaaaaaaaaaaaaaaaaaaaaaaaaaaaaaaaaaaaaaaaaaaaaaugcaucccccccccccccccccccccccccccccccaaaggcucuuuucagagccaccagaauu

SEQ ID NO: 5014 - RNA, 1814 nt, Artificial Sequence
  mRNA product Design b-2 comprising derived and/or modified sequence from HRSV(A2)__F-del_DSCav1_mut4 (opt1)
gggagagccucugcuggaguccggggaguggcguuggcugcuagagcgaagcuuaccauggagcugcucauccugaaggccaacgccaucaccaccauccugacggcggugaccuucugcuucgccagcggccagaacaucaccgaggaguucuaccaguccacgugcagcgccgucuccaagggguaccucagcgcccugcggaccggcugguacaccuccgugaucaccaucgagcugagcaacaucaaggagaacaagugcaacgggaccgacgccaaggugaagcucaucaagcaggagcuggacaaguacaagaacgcggucacggagcugcagcuccugaugcaguccaccccggcaaccggcuccggcuccgccaucugcagcggcgucgccgugugcaaggugcugcaccucgagggggaggucaacaagaucaagagcgcccugcuguccaccaacaaggccguggugagccucuccaacggcgucagcgugcugaccuucaaggugcuggaccucaagaacuacaucgacaagcagcugcugcccauccugaacaagcagagcugcuccaucagcaacaucgagacggugaucgaguuccagcagaagaacaaccggcuccuggagaucacccgcgaguucagcgugaacgccggggucaccacccccguguccacguacaugcugaccaacagcgagcuccugucccugaucaacgacaugccgaucaccaacgaccagaagaagcucaugagcaacaacgugcagaucguccggcagcaguccuacagcaucaugugcaucaucaaggaggaggugcuggcguacgugguccagcugccccucuacggcgugaucgacacccccugcuggaagcugcacacgagcccccugugcaccaccaacaccaaggagggguccaacaucugccucacgcgcaccgaccggggcugguacugcgacaacgccggcagcgucuccuucuucccgcaggccgagaccugcaaggugcagagcaaccgcguguucugcgacaccaugaacucccggacgcugcccagcgagguaaaccucugcaacgucgacaucuucaaccccaaguacgacugcaagaucaugaccuccaagaccgacgugagcuccagcgugaucaccucccugggggccaucgucagcugcuacggcaagacgaagugcaccgccagcaacaagaaccgggggaucaucaagaccuucuccaacggcugcgacuacgugagcaacaagggcguggacaccguguccgucgggaacacccuguacugcgugaacaagcaggagggcaagagccucuacgugaagggggagcccaucaucaacuucuacgacccgcuggucuuccccuccgacgaguucgacgcgagcaucucccaggugaacgagaagaucaaccagagccuggccuucauccgcaaguccgacgagcugcuccacaacgugaacgccggcaagagcacgaccaacaucaugaucaccaccaucaucaucgucaucaucgugauccugcugucccucaucgccguggggcugcugcucuacugcaaggcccggugaggacuaguguccaccugucccuccugggcugcuggauugucucguuuuccugccaaauaaacaggaucagcgcuuuacagaucuaaaaaaaaaaaaaaaaaaaaaaaaaaaaaaaaaaaaaaaaaaaaaaaaaaaaaaaaaaaaaaaaugcaucccccccccccccccccccccccccccccccaaaggcucuuuucagagccaccagaauu

SEQ ID NO: 5015 - RNA, 1814 nt, Artificial Sequence
  mRNA product Design b-2 comprising derived and/or modified sequence from HRSV(A2)__F-del_DSCav1_mut4 (opt1)
gggagagccucugcuggaguccggggaguggcguuggcugcuagagcgaagcuuaccauggagcugcucauccugaaggccaacgccaucaccaccauccugacggcggugaccuucugcuucgccagcggccagaacaucaccgaggaguucuaccaguccacgugcagcgccgucuccaagggguaccucagcgcccugcgcaccggcugguacaccuccgugaucaccaucgagcugagcaacaucaaggagaacaagugcaacgggaccgacgccaaggugaagcucaucaagcaggagcuggacaaguacaagaacgcggucacggagcugcagcuccugaugcaguccacccccgccaccggcagcggguccgccaucugcagcggcguggccgugugcaagguccugcaccucgagggcgaggugaacaagaucaaguccgcgcugcugagcaccaacaaggccguggucucccucagcaacgggguguccgugcugacguucaagguccuggaccucaagaacuacaucgacaagcagcugcugccgauccucaacaagcagagcugcuccaucagcaacaucgagaccgugaucgaguuccagcagaagaacaaccggcugcuggagaucacccgcgaguucuccgugaacgccggcgucaccacgcccgugagcaccuacaugcucaccaacagcgagcugcugucccucaucaacgacaugcccaucaccaacgaccagaagaagcugaugagcaacaacgugcagaucguccggcagcaguccuacagcaucaugugcaucaucaaggaggaggugcuggccuacgugguccagcucccccuguacggggugaucgacacgccgugcuggaagcugcacaccagcccccucugcaccaccaacacgaaggagggcuccaacaucugccugacccgcaccgaccgggggugguacugcgacaacgccggcuccgugagcuucuucccccaggcggagaccugcaagguccaguccaaccgcguguucugcgacacgaugaacagccggacccuccccuccgaggucaaccugugcaacguggacaucuucaacccgaaguacgacugcaagaucaugaccagcaagaccgacguguccagcuccgucaucacgagccugggcgccaucguguccugcuacgggaagaccaagugcaccgccagcaacaagaaccggggcaucaucaagaccuucuccaacgggugcgacuacgugagcaacaagggcgucgacacggugagcgugggcaacacccucuacugcgucaacaagcaggaggggaagucccuguacgugaagggcgagcccaucaucaacuucuacgacccccugguguuccccagcgacgaguucgacgccuccaucagccaggucaacgagaagaucaaccagucccucgccuucauccgcaagagcgacgagcugcugcacaacgugaacgcggggaaguccaccaccaacaucaugaucaccacgaucaucaucgugaucaucgucauccuccugagccugaucgccgugggccuccugcuguacugcaaggcccggugaggacuaguguccaccugucccuccugggcugcuggauugucucguuuuccugccaaauaaacaggaucagcgcuuuacagaucuaaaaaaaaaaaaaaaaaaaaaaaaaaaaaaaaaaaaaaaaaaaaaaaaaaaaaaaaaaaaaaaaugcaucccccccccccccccccccccccccccccccaaaggcucuuuucagagccaccagaauu

SEQ ID NO: 5016 - RNA, 1814 nt, Artificial Sequence
  mRNA product Design b-2 comprising derived and/or modified sequence from HRSV(A2)__F-del_DSCav1_mut4 (opt2)
gggagagccucugcuggaguccggggaguggcguuggcugcuagagcgaagcuuaccauggagcuccucauccucaaggccaacgccaucaccaccauccucaccgccgucaccuucugcuucgccuccggccagaacaucaccgaggaguucuaccaguccaccugcuccgccgucuccaagggcuaccucuccgcccuccgcaccggcugguacaccuccgucaucaccaucgagcucuccaacaucaaggagaacaagugcaacggcaccgacgccaaggucaagcucaucaagcaggagcucgacaaguacaagaacgccgucaccgagcuccagcuccucaugcaguccacccccgccaccggcuccggcuccgccaucugcuccggcgucgccgucugcaagguccuccaccucgagggcgaggucaacaagaucaaguccgcccuccucuccaccaacaaggccgucgucucccucuccaacggcgucuccguccucaccuucaagguccucgaccucaagaacuacaucgacaagcagcuccuccccauccucaacaagcaguccugcuccaucuccaacaucgagaccgucaucgaguuccagcagaagaacaaccgccuccucgagaucacccgcgaguucuccgucaacgccggcgucaccacccccgucuccaccuacaugcucaccaacuccgagcuccucucccucaucaacgacaugcccaucaccaacgaccagaagaagcucauguccaacaacguccagaucguccgccagcaguccuacuccaucaugugcaucaucaaggaggagguccucgccuacgucguccagcucccccucuacggcgucaucgacacccccugcuggaagcuccacaccuccccccucugcaccaccaacaccaaggagggcuccaacaucugccucacccgcaccgaccgcggcugguacugcgacaacgccggcuccgucuccuucuucccccaggccgagaccugcaagguccaguccaaccgcgucuucugcgacaccaugaacucccgcacccuccccuccgaggucaaccucugcaacgucgacaucuucaaccccaaguacgacugcaagaucaugaccuccaagaccgacgucuccuccuccgucaucaccucccucggcgccaucgucuccugcuacggcaagaccaagugcaccgccuccaacaagaaccgcggcaucaucaagaccuucuccaacggcugcgacuacgucuccaacaagggcgucgacaccgucuccgucggcaacacccucuacugcgucaacaagcaggagggcaagucccucuacgucaagggcgagcccaucaucaacuucuacgacccccucgucuuccccuccgacgaguucgacgccuccaucucccaggucaacgagaagaucaaccagucccucgccuucauccgcaaguccgacgagcuccuccacaacgucaacgccggcaaguccaccaccaacaucaugaucaccaccaucaucaucgucaucaucgucauccuccucucccucaucgccgucggccuccuccucuacugcaaggcccgcugaggacuaguguccaccugucccuccugggcugcuggauugucucguuuuccugccaaauaaacaggaucagcgcuuuacagaucuaaaaaaaaaaaaaaaaaaaaaaaaaaaaaaaaaaaaaaaaaaaaaaaaaaaaaaaaaaaaaaaaugcaucccccccccccccccccccccccccccccccaaaggcucuuuucagagccaccagaauu

SEQ ID NO: 5017 - RNA, 1814 nt, Artificial Sequence
  mRNA product Design b-2 comprising derived and/or modified sequence from HRSV(A2)__F-del_DSCav1_mut4 (opt3)
gggagagccucugcuggaguccggggaguggcguuggcugcuagagcgaagcuuaccauggagcugcucauccuuaaggccaacgcuauuaccacaauacugacugcagugacguucugcuuugccagcggccagaauaucaccgaagaguucuaccaauccacauguucugcggucucaaaaggguauuugagugcuuuaagaacuggaugguacaccagcguuauuacaaucgaacuguccaacauuaaggagaauaaaugcaacgguaccgacgccaaggugaaacuaaucaagcaggaacucgauaaguauaaaaaugcaguaacugagcugcagcuucugaugcagucuacacccgccaccggcucggggucagcuauauguagcggaguggcagucugcaagguguugcaccucgagggcgaaguuaacaaaaucaagagugcccugcuguccacgaauaaagcuguggucucucucagcaacgguguguccguauuaacuuuuaagguucuggaccuuaagaauuacauugauaaacaauugcugccuauccuaaacaagcagucauguaguauuagcaauaucgagaccgugauagaguuccagcagaaaaacaauaggcuccuggaaauuacacgggaguuuucugucaacgccggggugacuaccccaguguccacauauaugcuuaccaauucagaacuguugagccucaucaacgacaugccgauuacgaacgaucaaaagaaacugaugaguaauaacguccagaucguucgccagcagucuuacuccaucaugugcauuauaaaggaggaaguguuagcguauguagugcaacugccccucuacggagucaucgacacuccuuguuggaaacuucauacaagcccacugugcaccacuaauacaaaggagggcucgaacauuuguuugacccgaacggaucguggcugguacugcgacaaugcagggucuguguccuucuuuccccaggccgaaaccuguaagguucagucaaacagaguguucugcgauacaaugaauaguagaacucugccuagcgaggucaaccucugcaauguggacaucuuuaacccaaaauaugauuguaagauaaugaccuccaaaacagacguaucuagcucaguuauuaccagucugggagcuaucguguccugcuacgguaagacuaaauguacagccagcaauaagaacaggggcaucauuaagaccuucucuaaugggugcgauuaugucucaaacaaaggaguggacacugucagugugggcaauacgcuuuacuguguuaacaagcaagaggguaaaagccuguaugugaagggggaacccaucauuaacuuuuacgacccuuugguauucccauccgaugaguuugacgcaucuauaucgcaggucaaugagaaaaucaaccagagccucgcuuucauucggaaguccgaugaacuguuacacaaugugaacgccggaaagucaacaaccaauaucaugaucacuaccauuauaaucguuauuaucgugauucugcuaagucucaucgcggucggccugcuuuuguauugcaaagcccgcugaggacuaguguccaccugucccuccugggcugcuggauugucucguuuuccugccaaauaaacaggaucagcgcuuuacagaucuaaaaaaaaaaaaaaaaaaaaaaaaaaaaaaaaaaaaaaaaaaaaaaaaaaaaaaaaaaaaaaaaugcaucccccccccccccccccccccccccccccccaaaggcucuuuucagagccaccagaauu

SEQ ID NO: 5018 - RNA, 1814 nt, Artificial Sequence
  mRNA product Design b-2 comprising derived and/or modified sequence from HRSV(A2)__F-del_DSCav1_mut4 (opt4)
gggagagccucugcuggaguccggggaguggcguuggcugcuagagcgaagcuuaccauggagcugcugauccugaaggccaacgccaucaccaccauccugaccgccgugaccuucugcuucgccagcggccagaacaucaccgaggaguucuaccagagcaccugcagcgccgugagcaagggcuaccugagcgcccugagaaccggcugguacaccagcgugaucaccaucgagcugagcaacaucaaggagaacaagugcaacggcaccgacgccaaggugaagcugaucaagcaggagcuggacaaguacaagaacgccgugaccgagcugcagcugcugaugcagagcacccccgccaccggcagcggcagcgccaucugcagcggcguggccgugugcaaggugcugcaccuggagggcgaggugaacaagaucaagagcgcccugcugagcaccaacaaggccguggugagccugagcaacggcgugagcgugcugaccuucaaggugcuggaccugaagaacuacaucgacaagcagcugcugcccauccugaacaagcagagcugcagcaucagcaacaucgagaccgugaucgaguuccagcagaagaacaacagacugcuggagaucaccagagaguucagcgugaacgccggcgugaccacccccgugagcaccuacaugcugaccaacagcgagcugcugagccugaucaacgacaugcccaucaccaacgaccagaagaagcugaugagcaacaacgugcagaucgugagacagcagagcuacagcaucaugugcaucaucaaggaggaggugcuggccuacguggugcagcugccccuguacggcgugaucgacacccccugcuggaagcugcacaccagcccccugugcaccaccaacaccaaggagggcagcaacaucugccugaccagaaccgacagaggcugguacugcgacaacgccggcagcgugagcuucuucccccaggccgagaccugcaaggugcagagcaacagaguguucugcgacaccaugaacagcagaacccugcccagcgaggugaaccugugcaacguggacaucuucaaccccaaguacgacugcaagaucaugaccagcaagaccgacgugagcagcagcgugaucaccagccugggcgccaucgugagcugcuacggcaagaccaagugcaccgccagcaacaagaacagaggcaucaucaagaccuucagcaacggcugcgacuacgugagcaacaagggcguggacaccgugagcgugggcaacacccuguacugcgugaacaagcaggagggcaagagccuguacgugaagggcgagcccaucaucaacuucuacgacccccugguguuccccagcgacgaguucgacgccagcaucagccaggugaacgagaagaucaaccagagccuggccuucaucagaaagagcgacgagcugcugcacaacgugaacgccggcaagagcaccaccaacaucaugaucaccaccaucaucaucgugaucaucgugauccugcugagccugaucgccgugggccugcugcuguacugcaaggccagaugaggacuaguguccaccugucccuccugggcugcuggauugucucguuuuccugccaaauaaacaggaucagcgcuuuacagaucuaaaaaaaaaaaaaaaaaaaaaaaaaaaaaaaaaaaaaaaaaaaaaaaaaaaaaaaaaaaaaaaaugcaucccccccccccccccccccccccccccccccaaaggcucuuuucagagccaccagaauu

SEQ ID NO: 5019 - RNA, 1814 nt, Artificial Sequence
  mRNA product Design b-2 comprising derived and/or modified sequence from HRSV(A2)__F-del_DSCav1_mut4 (opt5)
gggagagccucugcuggaguccggggaguggcguuggcugcuagagcgaagcuuaccauggagcugcucauccugaaggccaacgcuauuaccacaauccuuacggccgugaccuucugcuuugcgagcggccagaauauuacagaagaguucuaccaauccaccuguucugcugucagcaaaggguaucuguccgcccucagaacaggaugguacaccucuguuaucacaauugaacugagcaacaucaaggagaauaaaugcaacggcaccgacgccaaggugaaacuuaucaagcaggaacuggauaaguauaaaaaugcugugacggagcuccagcugcugaugcaguccacccccgccacagggucuggaagcgcuauuuguuccggcgucgccgugugcaagguucuccaccuggagggggaagugaacaaaaucaagagcgcgcuucugucuaccaauaaagccgucgugucccucagcaacggaguuucugugcugacauuuaagguccuugaccugaagaauuacauugauaaacaacuccugccuauccugaacaagcaguccuguagcauuucuaauaucgagaccgugauugaguuccagcagaaaaacaaucggcuccuggaaaucacgcgcgaguuuuccgugaacgcuggcgucacaaccccgguuagcacauauaugcuuaccaauuccgaacugcucucucugaucaacgacaugcccauuaccaacgaucaaaagaaacuuaugagcaauaacgugcagaucgugagacagcaguccuacagcauuaugugcaucauuaaggaggaaguccuggccuaugugguucaacucccucuguacggcgugaucgacacacccuguuggaaacugcauacgucuccucucugcaccacaaauaccaaggagggguccaacaucugucugacacggaccgaucgcggaugguacugcgacaaugcuggcagcgucucuuucuuuccccaggccgaaacguguaaggugcagagcaacagaguuuucugcgauacaaugaacuccagaacccugccuucugaggugaaucucugcaaugucgacauuuuuaacccgaaauaugauuguaagaucaugaccagcaaaacagacguguccagcucugucauuaccucccugggggcgaucgugagcugcuacggaaagacaaaauguacggccucuaauaagaaccggggcauuaucaagaccuucuccaaugggugcgauuauguuagcaacaaaggaguggacacagucuccgugggcaauacccuuuacuguguuaacaagcaagagggcaaaucucuguaugugaagggggaacccaucauuaacuuuuacgacccucucgucuuccccagcgaugaguuugacgcuuccaucucucaggugaaugagaaaauuaaccagagccuggccuucauccgcaaguccgaugaacugcuccacaaugugaacgcuggaaagagcacaaccaauauuaugaucacgaccauuaucaucguuauuaucgucauucugcuuucucugaucgccgugggccuccugcuguauugcaaagccagaugaggacuaguguccaccugucccuccugggcugcuggauugucucguuuuccugccaaauaaacaggaucagcgcuuuacagaucuaaaaaaaaaaaaaaaaaaaaaaaaaaaaaaaaaaaaaaaaaaaaaaaaaaaaaaaaaaaaaaaaugcaucccccccccccccccccccccccccccccccaaaggcucuuuucagagccaccagaauu

SEQ ID NO: 5020 - RNA, 1814 nt, Artificial Sequence
  mRNA product Design b-2 comprising derived and/or modified sequence from HRSV(A2)__F-del_DSCav1_mut4 (opt6)
gggagagccucugcuggaguccggggaguggcguuggcugcuagagcgaagcuuaccauggaacuuuuaauacuaaaagcuaacgccauaaccacuauacuaacagcagucacauucugcuucgcaucaggccaaaacauaaccgaagaauuuuaccaauccacuuguucagcagucuccaaaggauauuuauccgcacuucguacaggaugguauacaucaguaauaacaauagaacucuccaacauaaaagaaaauaaaugcaacggcaccgacgcaaaaguaaaacucaucaaacaagaauuagacaaauacaagaacgccguaacagaacuacaauuacuaaugcaaucaacacccgccacaggaucaggaucugcaauaugcucuggaguagcaguaugcaaaguauuacaccuagaaggagaaguaaacaaaaucaaaagcgcacuacuauccacaaacaaagcuguaguaucacuaucaaacggaguaucaguauuaacuuucaaaguacuugaucuaaaaaacuacauagacaaacaacuacuacccauauuaaacaaacaaucaugcucaauaagcaauauagaaacaguaauagaauuucaacaaaaaaacaacagacuacuagaaaucacaagggaauuuucaguaaaugccgguguuacaaccccaguaucaacauacaugcuaacuaacucagaacuacuauccuuaauaaacgauaugccaauaacaaacgaucaaaaaaaacuaauguccaacaacguacaaauaguaagacaacaaucauacucaaucaugugcauuauaaaagaagaagucuuagcauacguaguacaauuaccacuauacgguguaauagauacaccauguuggaaauuacacacaagcccacuaugcacaacuaacacaaaagaaggcucaaauauauguuuaacaagaacagaccgagguugguacugcgacaaugcaggaucaguaucauucuuuccacaagcagaaacauguaaaguucaauccaacagaguauucugcgacacaaugaacuccagaacacuaccuucagaaguaaaccucuguaacguagacauauuuaaucccaaguacgacugcaaaauaaugacaucgaaaacagacguaagcuccucagugauaacaucccucggcgccaucguauccuguuacgguaaaacuaaauguaccgccucaaacaaaaaccgcgguauuauaaaaacuuuuucuaauggcugcgauuacguaagcaacaaaggcgucgacacaguuuccguaggaaacacacuauacugcguaaacaaacaagaagguaaaucucuauacguaaaaggagaaccaauaauaaauuucuaugauccuuuaguauucccauccgaugaauuugacgccucuaucucacaagucaacgaaaaaauaaaucaaucauuagcauucauacgaaaaucagacgaacuacuacacaacguaaacgcaggaaaaucaacaaccaacauaaugauaaccacaauaauaauaguuauuauagugauacuauuauccuuaauugcagucggacuauuauuauacuguaaagcacgcuaaggacuaguguccaccugucccuccugggcugcuggauugucucguuuuccugccaaauaaacaggaucagcgcuuuacagaucuaaaaaaaaaaaaaaaaaaaaaaaaaaaaaaaaaaaaaaaaaaaaaaaaaaaaaaaaaaaaaaaaugcaucccccccccccccccccccccccccccccccaaaggcucuuuucagagccaccagaauu

SEQ ID NO: 5021 - RNA, 1814 nt, Artificial Sequence
  mRNA product Design b-2 comprising derived and/or modified sequence from HRSV(A2)__F-del_DSCav1_mut4 (opt11)
gggagagccucugcuggaguccggggaguggcguuggcugcuagagcgaagcuuaccauggaacuccucauccucaaagccaaugccaucaccacaauccugacagcaguaaccuucugcuucgcauccggacaaaacaucaccgaagaauuuuaccagucaaccugcuccgcugucucaaaaggcuaccucucagcccuucgcaccggcugguacaccucggucauaacaauagaacucuccaauaucaaagaaaacaaaugcaacggcacugacgccaagguaaaacucaucaaacaggaacucgauaaauacaagaacgccguaacagaacuacaacuacucaugcaaucaacaccggccaccggcuccgguuccgccauaugcuccggaguggccgugugcaagguccuccaccuugaaggggaaguuaacaaaaucaaaucagcccuccucuccacuaacaaagccguaguaucccuaagcaacgguguauccguccucaccuucaaaguacuagaccuaaagaauuauaucgacaaacaacuccuccccauacucaacaaacaauccugcuccauaagcaacaucgaaacagucaucgaguuccagcagaaaaacaaccgacuccucgaaauaacccgcgaguucucagucaacgccggagucaccacacccgucagcaccuacaugcugaccaacuccgaacuccucuccuuaaucaaugacaugcccaucaccaaugaccaaaagaaacucaugucaaacaacguccaaauaguacgccaacaauccuacuccaucaugugcaucauaaaagaagaaguacucgccuacgucguccaacucccccucuacggcguaaucgacacccccugcuggaaacuacacacaagcccccucugcaccacaaacacuaaagagggcuccaacaucugucuaacccgcaccgaucgaggcugguacugcgacaacgccggaucugucucauucuucccccaagccgaaaccugcaaaguccaauccaaccgcgucuucugcgacaccaugaacucgagaacccucccuuccgaagucaaccuaugcaacgucgacauuuucaaccccaaauacgacugcaaaaucaugaccucgaaaaccgacguaucauccagcgucaucaccagccuaggcgcaaucgugagcugcuacggcaaaaccaaaugcaccgcgagcaauaaaaaccgcgggaucaucaaaacuuucuccaacggcugcgacuacgucuccaacaagggagucgauaccgucuccguaggcaacacccucuacugcgucaacaaacaagaaggcaaaucacuauacguaaaaggcgagccaaucauaaacuucuacgacccucuaguuuucccauccgacgaguucgacgcuagcaucucccaagucaacgagaaaaucaaccaaucccucgcauucauccgcaaauccgacgaacuccuccacaacguaaacgcaggcaaaucaacuacuaauauaaugaucacaaccaucauaauagucauaaucguaauccuccuaucccucaucgccgucggacuacugcucuacugcaaagcccgcuaaggacuaguguccaccugucccuccugggcugcuggauugucucguuuuccugccaaauaaacaggaucagcgcuuuacagaucuaaaaaaaaaaaaaaaaaaaaaaaaaaaaaaaaaaaaaaaaaaaaaaaaaaaaaaaaaaaaaaaaugcaucccccccccccccccccccccccccccccccaaaggcucuuuucagagccaccagaauu

SEQ ID NO: 5022 - RNA, 1834 nt, Artificial Sequence
  mRNA product Design b-3 comprising derived and/or modified sequence from HRSV(A2)__F-del_DSCav1_mut4 (opt1)
gggagagucccgcagucggcguccagcggcucugcuuguucgugugugugucguugcaggccuuauucaagcuuaccauggagcugcucauccugaaggccaacgccaucaccaccauccugacggcggugaccuucugcuucgccagcggccagaacaucaccgaggaguucuaccaguccacgugcagcgccgucuccaagggguaccucagcgcccugcggaccggcugguacaccuccgugaucaccaucgagcugagcaacaucaaggagaacaagugcaacgggaccgacgccaaggugaagcucaucaagcaggagcuggacaaguacaagaacgcggucacggagcugcagcuccugaugcaguccaccccggcaaccggcuccggcuccgccaucugcagcggcgucgccgugugcaaggugcugcaccucgagggggaggucaacaagaucaagagcgcccugcuguccaccaacaaggccguggugagccucuccaacggcgucagcgugcugaccuucaaggugcuggaccucaagaacuacaucgacaagcagcugcugcccauccugaacaagcagagcugcuccaucagcaacaucgagacggugaucgaguuccagcagaagaacaaccggcuccuggagaucacccgcgaguucagcgugaacgccggggucaccacccccguguccacguacaugcugaccaacagcgagcuccugucccugaucaacgacaugccgaucaccaacgaccagaagaagcucaugagcaacaacgugcagaucguccggcagcaguccuacagcaucaugugcaucaucaaggaggaggugcuggcguacgugguccagcugccccucuacggcgugaucgacacccccugcuggaagcugcacacgagcccccugugcaccaccaacaccaaggagggguccaacaucugccucacgcgcaccgaccggggcugguacugcgacaacgccggcagcgucuccuucuucccgcaggccgagaccugcaaggugcagagcaaccgcguguucugcgacaccaugaacucccggacgcugcccagcgagguaaaccucugcaacgucgacaucuucaaccccaaguacgacugcaagaucaugaccuccaagaccgacgugagcuccagcgugaucaccucccugggggccaucgucagcugcuacggcaagacgaagugcaccgccagcaacaagaaccgggggaucaucaagaccuucuccaacggcugcgacuacgugagcaacaagggcguggacaccguguccgucgggaacacccuguacugcgugaacaagcaggagggcaagagccucuacgugaagggggagcccaucaucaacuucuacgacccgcuggucuuccccuccgacgaguucgacgcgagcaucucccaggugaacgagaagaucaaccagagccuggccuucauccgcaaguccgacgagcugcuccacaacgugaacgccggcaagagcacgaccaacaucaugaucaccaccaucaucaucgucaucaucgugauccugcugucccucaucgccguggggcugcugcucuacugcaaggcccggugaggacuaguguccaccugucccuccugggcugcuggauugucucguuuuccugccaaauaaacaggaucagcgcuuuacagaucuaaaaaaaaaaaaaaaaaaaaaaaaaaaaaaaaaaaaaaaaaaaaaaaaaaaaaaaaaaaaaaaaugcaucccccccccccccccccccccccccccccccaaaggcucuuuucagagccaccagaauu

SEQ ID NO: 5023 - RNA, 1834 nt, Artificial Sequence
  mRNA product Design b-3 comprising derived and/or modified sequence from HRSV(A2)__F-del_DSCav1_mut4 (opt1)
gggagagucccgcagucggcguccagcggcucugcuuguucgugugugugucguugcaggccuuauucaagcuuaccauggagcugcucauccugaaggccaacgccaucaccaccauccugacggcggugaccuucugcuucgccagcggccagaacaucaccgaggaguucuaccaguccacgugcagcgccgucuccaagggguaccucagcgcccugcgcaccggcugguacaccuccgugaucaccaucgagcugagcaacaucaaggagaacaagugcaacgggaccgacgccaaggugaagcucaucaagcaggagcuggacaaguacaagaacgcggucacggagcugcagcuccugaugcaguccacccccgccaccggcagcggguccgccaucugcagcggcguggccgugugcaagguccugcaccucgagggcgaggugaacaagaucaaguccgcgcugcugagcaccaacaaggccguggucucccucagcaacgggguguccgugcugacguucaagguccuggaccucaagaacuacaucgacaagcagcugcugccgauccucaacaagcagagcugcuccaucagcaacaucgagaccgugaucgaguuccagcagaagaacaaccggcugcuggagaucacccgcgaguucuccgugaacgccggcgucaccacgcccgugagcaccuacaugcucaccaacagcgagcugcugucccucaucaacgacaugcccaucaccaacgaccagaagaagcugaugagcaacaacgugcagaucguccggcagcaguccuacagcaucaugugcaucaucaaggaggaggugcuggccuacgugguccagcucccccuguacggggugaucgacacgccgugcuggaagcugcacaccagcccccucugcaccaccaacacgaaggagggcuccaacaucugccugacccgcaccgaccgggggugguacugcgacaacgccggcuccgugagcuucuucccccaggcggagaccugcaagguccaguccaaccgcguguucugcgacacgaugaacagccggacccuccccuccgaggucaaccugugcaacguggacaucuucaacccgaaguacgacugcaagaucaugaccagcaagaccgacguguccagcuccgucaucacgagccugggcgccaucguguccugcuacgggaagaccaagugcaccgccagcaacaagaaccggggcaucaucaagaccuucuccaacgggugcgacuacgugagcaacaagggcgucgacacggugagcgugggcaacacccucuacugcgucaacaagcaggaggggaagucccuguacgugaagggcgagcccaucaucaacuucuacgacccccugguguuccccagcgacgaguucgacgccuccaucagccaggucaacgagaagaucaaccagucccucgccuucauccgcaagagcgacgagcugcugcacaacgugaacgcggggaaguccaccaccaacaucaugaucaccacgaucaucaucgugaucaucgucauccuccugagccugaucgccgugggccuccugcuguacugcaaggcccggugaggacuaguguccaccugucccuccugggcugcuggauugucucguuuuccugccaaauaaacaggaucagcgcuuuacagaucuaaaaaaaaaaaaaaaaaaaaaaaaaaaaaaaaaaaaaaaaaaaaaaaaaaaaaaaaaaaaaaaaugcaucccccccccccccccccccccccccccccccaaaggcucuuuucagagccaccagaauu

SEQ ID NO: 5024 - RNA, 1834 nt, Artificial Sequence
  mRNA product Design b-3 comprising derived and/or modified sequence from HRSV(A2)__F-del_DSCav1_mut4 (opt2)
gggagagucccgcagucggcguccagcggcucugcuuguucgugugugugucguugcaggccuuauucaagcuuaccauggagcuccucauccucaaggccaacgccaucaccaccauccucaccgccgucaccuucugcuucgccuccggccagaacaucaccgaggaguucuaccaguccaccugcuccgccgucuccaagggcuaccucuccgcccuccgcaccggcugguacaccuccgucaucaccaucgagcucuccaacaucaaggagaacaagugcaacggcaccgacgccaaggucaagcucaucaagcaggagcucgacaaguacaagaacgccgucaccgagcuccagcuccucaugcaguccacccccgccaccggcuccggcuccgccaucugcuccggcgucgccgucugcaagguccuccaccucgagggcgaggucaacaagaucaaguccgcccuccucuccaccaacaaggccgucgucucccucuccaacggcgucuccguccucaccuucaagguccucgaccucaagaacuacaucgacaagcagcuccuccccauccucaacaagcaguccugcuccaucuccaacaucgagaccgucaucgaguuccagcagaagaacaaccgccuccucgagaucacccgcgaguucuccgucaacgccggcgucaccacccccgucuccaccuacaugcucaccaacuccgagcuccucucccucaucaacgacaugcccaucaccaacgaccagaagaagcucauguccaacaacguccagaucguccgccagcaguccuacuccaucaugugcaucaucaaggaggagguccucgccuacgucguccagcucccccucuacggcgucaucgacacccccugcuggaagcuccacaccuccccccucugcaccaccaacaccaaggagggcuccaacaucugccucacccgcaccgaccgcggcugguacugcgacaacgccggcuccgucuccuucuucccccaggccgagaccugcaagguccaguccaaccgcgucuucugcgacaccaugaacucccgcacccuccccuccgaggucaaccucugcaacgucgacaucuucaaccccaaguacgacugcaagaucaugaccuccaagaccgacgucuccuccuccgucaucaccucccucggcgccaucgucuccugcuacggcaagaccaagugcaccgccuccaacaagaaccgcggcaucaucaagaccuucuccaacggcugcgacuacgucuccaacaagggcgucgacaccgucuccgucggcaacacccucuacugcgucaacaagcaggagggcaagucccucuacgucaagggcgagcccaucaucaacuucuacgacccccucgucuuccccuccgacgaguucgacgccuccaucucccaggucaacgagaagaucaaccagucccucgccuucauccgcaaguccgacgagcuccuccacaacgucaacgccggcaaguccaccaccaacaucaugaucaccaccaucaucaucgucaucaucgucauccuccucucccucaucgccgucggccuccuccucuacugcaaggcccgcugaggacuaguguccaccugucccuccugggcugcuggauugucucguuuuccugccaaauaaacaggaucagcgcuuuacagaucuaaaaaaaaaaaaaaaaaaaaaaaaaaaaaaaaaaaaaaaaaaaaaaaaaaaaaaaaaaaaaaaaugcaucccccccccccccccccccccccccccccccaaaggcucuuuucagagccaccagaauu

SEQ ID NO: 5025 - RNA, 1834 nt, Artificial Sequence
  mRNA product Design b-3 comprising derived and/or modified sequence from HRSV(A2)__F-del_DSCav1_mut4 (opt3)
gggagagucccgcagucggcguccagcggcucugcuuguucgugugugugucguugcaggccuuauucaagcuuaccauggagcugcucauccuuaaggccaacgcuauuaccacaauacugacugcagugacguucugcuuugccagcggccagaauaucaccgaagaguucuaccaauccacauguucugcggucucaaaaggguauuugagugcuuuaagaacuggaugguacaccagcguuauuacaaucgaacuguccaacauuaaggagaauaaaugcaacgguaccgacgccaaggugaaacuaaucaagcaggaacucgauaaguauaaaaaugcaguaacugagcugcagcuucugaugcagucuacacccgccaccggcucggggucagcuauauguagcggaguggcagucugcaagguguugcaccucgagggcgaaguuaacaaaaucaagagugcccugcuguccacgaauaaagcuguggucucucucagcaacgguguguccguauuaacuuuuaagguucuggaccuuaagaauuacauugauaaacaauugcugccuauccuaaacaagcagucauguaguauuagcaauaucgagaccgugauagaguuccagcagaaaaacaauaggcuccuggaaauuacacgggaguuuucugucaacgccggggugacuaccccaguguccacauauaugcuuaccaauucagaacuguugagccucaucaacgacaugccgauuacgaacgaucaaaagaaacugaugaguaauaacguccagaucguucgccagcagucuuacuccaucaugugcauuauaaaggaggaaguguuagcguauguagugcaacugccccucuacggagucaucgacacuccuuguuggaaacuucauacaagcccacugugcaccacuaauacaaaggagggcucgaacauuuguuugacccgaacggaucguggcugguacugcgacaaugcagggucuguguccuucuuuccccaggccgaaaccuguaagguucagucaaacagaguguucugcgauacaaugaauaguagaacucugccuagcgaggucaaccucugcaauguggacaucuuuaacccaaaauaugauuguaagauaaugaccuccaaaacagacguaucuagcucaguuauuaccagucugggagcuaucguguccugcuacgguaagacuaaauguacagccagcaauaagaacaggggcaucauuaagaccuucucuaaugggugcgauuaugucucaaacaaaggaguggacacugucagugugggcaauacgcuuuacuguguuaacaagcaagaggguaaaagccuguaugugaagggggaacccaucauuaacuuuuacgacccuuugguauucccauccgaugaguuugacgcaucuauaucgcaggucaaugagaaaaucaaccagagccucgcuuucauucggaaguccgaugaacuguuacacaaugugaacgccggaaagucaacaaccaauaucaugaucacuaccauuauaaucguuauuaucgugauucugcuaagucucaucgcggucggccugcuuuuguauugcaaagcccgcugaggacuaguguccaccugucccuccugggcugcuggauugucucguuuuccugccaaauaaacaggaucagcgcuuuacagaucuaaaaaaaaaaaaaaaaaaaaaaaaaaaaaaaaaaaaaaaaaaaaaaaaaaaaaaaaaaaaaaaaugcaucccccccccccccccccccccccccccccccaaaggcucuuuucagagccaccagaauu

SEQ ID NO: 5026 - RNA, 1834 nt, Artificial Sequence
  mRNA product Design b-3 comprising derived and/or modified sequence from HRSV(A2)__F-del_DSCav1_mut4 (opt4)
gggagagucccgcagucggcguccagcggcucugcuuguucgugugugugucguugcaggccuuauucaagcuuaccauggagcugcugauccugaaggccaacgccaucaccaccauccugaccgccgugaccuucugcuucgccagcggccagaacaucaccgaggaguucuaccagagcaccugcagcgccgugagcaagggcuaccugagcgcccugagaaccggcugguacaccagcgugaucaccaucgagcugagcaacaucaaggagaacaagugcaacggcaccgacgccaaggugaagcugaucaagcaggagcuggacaaguacaagaacgccgugaccgagcugcagcugcugaugcagagcacccccgccaccggcagcggcagcgccaucugcagcggcguggccgugugcaaggugcugcaccuggagggcgaggugaacaagaucaagagcgcccugcugagcaccaacaaggccguggugagccugagcaacggcgugagcgugcugaccuucaaggugcuggaccugaagaacuacaucgacaagcagcugcugcccauccugaacaagcagagcugcagcaucagcaacaucgagaccgugaucgaguuccagcagaagaacaacagacugcuggagaucaccagagaguucagcgugaacgccggcgugaccacccccgugagcaccuacaugcugaccaacagcgagcugcugagccugaucaacgacaugcccaucaccaacgaccagaagaagcugaugagcaacaacgugcagaucgugagacagcagagcuacagcaucaugugcaucaucaaggaggaggugcuggccuacguggugcagcugccccuguacggcgugaucgacacccccugcuggaagcugcacaccagcccccugugcaccaccaacaccaaggagggcagcaacaucugccugaccagaaccgacagaggcugguacugcgacaacgccggcagcgugagcuucuucccccaggccgagaccugcaaggugcagagcaacagaguguucugcgacaccaugaacagcagaacccugcccagcgaggugaaccugugcaacguggacaucuucaaccccaaguacgacugcaagaucaugaccagcaagaccgacgugagcagcagcgugaucaccagccugggcgccaucgugagcugcuacggcaagaccaagugcaccgccagcaacaagaacagaggcaucaucaagaccuucagcaacggcugcgacuacgugagcaacaagggcguggacaccgugagcgugggcaacacccuguacugcgugaacaagcaggagggcaagagccuguacgugaagggcgagcccaucaucaacuucuacgacccccugguguuccccagcgacgaguucgacgccagcaucagccaggugaacgagaagaucaaccagagccuggccuucaucagaaagagcgacgagcugcugcacaacgugaacgccggcaagagcaccaccaacaucaugaucaccaccaucaucaucgugaucaucgugauccugcugagccugaucgccgugggccugcugcuguacugcaaggccagaugaggacuaguguccaccugucccuccugggcugcuggauugucucguuuuccugccaaauaaacaggaucagcgcuuuacagaucuaaaaaaaaaaaaaaaaaaaaaaaaaaaaaaaaaaaaaaaaaaaaaaaaaaaaaaaaaaaaaaaaugcaucccccccccccccccccccccccccccccccaaaggcucuuuucagagccaccagaauu

SEQ ID NO: 5027 - RNA, 1834 nt, Artificial Sequence
  mRNA product Design b-3 comprising derived and/or modified sequence from HRSV(A2)__F-del_DSCav1_mut4 (opt5)
gggagagucccgcagucggcguccagcggcucugcuuguucgugugugugucguugcaggccuuauucaagcuuaccauggagcugcucauccugaaggccaacgcuauuaccacaauccuuacggccgugaccuucugcuuugcgagcggccagaauauuacagaagaguucuaccaauccaccuguucugcugucagcaaaggguaucuguccgcccucagaacaggaugguacaccucuguuaucacaauugaacugagcaacaucaaggagaauaaaugcaacggcaccgacgccaaggugaaacuuaucaagcaggaacuggauaaguauaaaaaugcugugacggagcuccagcugcugaugcaguccacccccgccacagggucuggaagcgcuauuuguuccggcgucgccgugugcaagguucuccaccuggagggggaagugaacaaaaucaagagcgcgcuucugucuaccaauaaagccgucgugucccucagcaacggaguuucugugcugacauuuaagguccuugaccugaagaauuacauugauaaacaacuccugccuauccugaacaagcaguccuguagcauuucuaauaucgagaccgugauugaguuccagcagaaaaacaaucggcuccuggaaaucacgcgcgaguuuuccgugaacgcuggcgucacaaccccgguuagcacauauaugcuuaccaauuccgaacugcucucucugaucaacgacaugcccauuaccaacgaucaaaagaaacuuaugagcaauaacgugcagaucgugagacagcaguccuacagcauuaugugcaucauuaaggaggaaguccuggccuaugugguucaacucccucuguacggcgugaucgacacacccuguuggaaacugcauacgucuccucucugcaccacaaauaccaaggagggguccaacaucugucugacacggaccgaucgcggaugguacugcgacaaugcuggcagcgucucuuucuuuccccaggccgaaacguguaaggugcagagcaacagaguuuucugcgauacaaugaacuccagaacccugccuucugaggugaaucucugcaaugucgacauuuuuaacccgaaauaugauuguaagaucaugaccagcaaaacagacguguccagcucugucauuaccucccugggggcgaucgugagcugcuacggaaagacaaaauguacggccucuaauaagaaccggggcauuaucaagaccuucuccaaugggugcgauuauguuagcaacaaaggaguggacacagucuccgugggcaauacccuuuacuguguuaacaagcaagagggcaaaucucuguaugugaagggggaacccaucauuaacuuuuacgacccucucgucuuccccagcgaugaguuugacgcuuccaucucucaggugaaugagaaaauuaaccagagccuggccuucauccgcaaguccgaugaacugcuccacaaugugaacgcuggaaagagcacaaccaauauuaugaucacgaccauuaucaucguuauuaucgucauucugcuuucucugaucgccgugggccuccugcuguauugcaaagccagaugaggacuaguguccaccugucccuccugggcugcuggauugucucguuuuccugccaaauaaacaggaucagcgcuuuacagaucuaaaaaaaaaaaaaaaaaaaaaaaaaaaaaaaaaaaaaaaaaaaaaaaaaaaaaaaaaaaaaaaaugcaucccccccccccccccccccccccccccccccaaaggcucuuuucagagccaccagaauu

SEQ ID NO: 5028 - RNA, 1834 nt, Artificial Sequence
  mRNA product Design b-3 comprising derived and/or modified sequence from HRSV(A2)__F-del_DSCav1_mut4 (opt6)
gggagagucccgcagucggcguccagcggcucugcuuguucgugugugugucguugcaggccuuauucaagcuuaccauggaacuuuuaauacuaaaagcuaacgccauaaccacuauacuaacagcagucacauucugcuucgcaucaggccaaaacauaaccgaagaauuuuaccaauccacuuguucagcagucuccaaaggauauuuauccgcacuucguacaggaugguauacaucaguaauaacaauagaacucuccaacauaaaagaaaauaaaugcaacggcaccgacgcaaaaguaaaacucaucaaacaagaauuagacaaauacaagaacgccguaacagaacuacaauuacuaaugcaaucaacacccgccacaggaucaggaucugcaauaugcucuggaguagcaguaugcaaaguauuacaccuagaaggagaaguaaacaaaaucaaaagcgcacuacuauccacaaacaaagcuguaguaucacuaucaaacggaguaucaguauuaacuuucaaaguacuugaucuaaaaaacuacauagacaaacaacuacuacccauauuaaacaaacaaucaugcucaauaagcaauauagaaacaguaauagaauuucaacaaaaaaacaacagacuacuagaaaucacaagggaauuuucaguaaaugccgguguuacaaccccaguaucaacauacaugcuaacuaacucagaacuacuauccuuaauaaacgauaugccaauaacaaacgaucaaaaaaaacuaauguccaacaacguacaaauaguaagacaacaaucauacucaaucaugugcauuauaaaagaagaagucuuagcauacguaguacaauuaccacuauacgguguaauagauacaccauguuggaaauuacacacaagcccacuaugcacaacuaacacaaaagaaggcucaaauauauguuuaacaagaacagaccgagguugguacugcgacaaugcaggaucaguaucauucuuuccacaagcagaaacauguaaaguucaauccaacagaguauucugcgacacaaugaacuccagaacacuaccuucagaaguaaaccucuguaacguagacauauuuaaucccaaguacgacugcaaaauaaugacaucgaaaacagacguaagcuccucagugauaacaucccucggcgccaucguauccuguuacgguaaaacuaaauguaccgccucaaacaaaaaccgcgguauuauaaaaacuuuuucuaauggcugcgauuacguaagcaacaaaggcgucgacacaguuuccguaggaaacacacuauacugcguaaacaaacaagaagguaaaucucuauacguaaaaggagaaccaauaauaaauuucuaugauccuuuaguauucccauccgaugaauuugacgccucuaucucacaagucaacgaaaaaauaaaucaaucauuagcauucauacgaaaaucagacgaacuacuacacaacguaaacgcaggaaaaucaacaaccaacauaaugauaaccacaauaauaauaguuauuauagugauacuauuauccuuaauugcagucggacuauuauuauacuguaaagcacgcuaaggacuaguguccaccugucccuccugggcugcuggauugucucguuuuccugccaaauaaacaggaucagcgcuuuacagaucuaaaaaaaaaaaaaaaaaaaaaaaaaaaaaaaaaaaaaaaaaaaaaaaaaaaaaaaaaaaaaaaaugcaucccccccccccccccccccccccccccccccaaaggcucuuuucagagccaccagaauu

SEQ ID NO: 5029 - RNA, 1834 nt, Artificial Sequence
  mRNA product Design b-3 comprising derived and/or modified sequence from HRSV(A2)__F-del_DSCav1_mut4 (opt11)
gggagagucccgcagucggcguccagcggcucugcuuguucgugugugugucguugcaggccuuauucaagcuuaccauggaacuccucauccucaaagccaaugccaucaccacaauccugacagcaguaaccuucugcuucgcauccggacaaaacaucaccgaagaauuuuaccagucaaccugcuccgcugucucaaaaggcuaccucucagcccuucgcaccggcugguacaccucggucauaacaauagaacucuccaauaucaaagaaaacaaaugcaacggcacugacgccaagguaaaacucaucaaacaggaacucgauaaauacaagaacgccguaacagaacuacaacuacucaugcaaucaacaccggccaccggcuccgguuccgccauaugcuccggaguggccgugugcaagguccuccaccuugaaggggaaguuaacaaaaucaaaucagcccuccucuccacuaacaaagccguaguaucccuaagcaacgguguauccguccucaccuucaaaguacuagaccuaaagaauuauaucgacaaacaacuccuccccauacucaacaaacaauccugcuccauaagcaacaucgaaacagucaucgaguuccagcagaaaaacaaccgacuccucgaaauaacccgcgaguucucagucaacgccggagucaccacacccgucagcaccuacaugcugaccaacuccgaacuccucuccuuaaucaaugacaugcccaucaccaaugaccaaaagaaacucaugucaaacaacguccaaauaguacgccaacaauccuacuccaucaugugcaucauaaaagaagaaguacucgccuacgucguccaacucccccucuacggcguaaucgacacccccugcuggaaacuacacacaagcccccucugcaccacaaacacuaaagagggcuccaacaucugucuaacccgcaccgaucgaggcugguacugcgacaacgccggaucugucucauucuucccccaagccgaaaccugcaaaguccaauccaaccgcgucuucugcgacaccaugaacucgagaacccucccuuccgaagucaaccuaugcaacgucgacauuuucaaccccaaauacgacugcaaaaucaugaccucgaaaaccgacguaucauccagcgucaucaccagccuaggcgcaaucgugagcugcuacggcaaaaccaaaugcaccgcgagcaauaaaaaccgcgggaucaucaaaacuuucuccaacggcugcgacuacgucuccaacaagggagucgauaccgucuccguaggcaacacccucuacugcgucaacaaacaagaaggcaaaucacuauacguaaaaggcgagccaaucauaaacuucuacgacccucuaguuuucccauccgacgaguucgacgcuagcaucucccaagucaacgagaaaaucaaccaaucccucgcauucauccgcaaauccgacgaacuccuccacaacguaaacgcaggcaaaucaacuacuaauauaaugaucacaaccaucauaauagucauaaucguaauccuccuaucccucaucgccgucggacuacugcucuacugcaaagcccgcuaaggacuaguguccaccugucccuccugggcugcuggauugucucguuuuccugccaaauaaacaggaucagcgcuuuacagaucuaaaaaaaaaaaaaaaaaaaaaaaaaaaaaaaaaaaaaaaaaaaaaaaaaaaaaaaaaaaaaaaaugcaucccccccccccccccccccccccccccccccaaaggcucuuuucagagccaccagaauu

SEQ ID NO: 5030 - RNA, 1885 nt, Artificial Sequence
  mRNA product Design b-4 comprising derived and/or modified sequence from HRSV(A2)__F-del_DSCav1_mut4 (opt1)
gggagagucccgcagucggcguccagcggcucugcuuguucgugugugugucguugcaggccuuauucaagcuuaccauggagcugcucauccugaaggccaacgccaucaccaccauccugacggcggugaccuucugcuucgccagcggccagaacaucaccgaggaguucuaccaguccacgugcagcgccgucuccaagggguaccucagcgcccugcggaccggcugguacaccuccgugaucaccaucgagcugagcaacaucaaggagaacaagugcaacgggaccgacgccaaggugaagcucaucaagcaggagcuggacaaguacaagaacgcggucacggagcugcagcuccugaugcaguccaccccggcaaccggcuccggcuccgccaucugcagcggcgucgccgugugcaaggugcugcaccucgagggggaggucaacaagaucaagagcgcccugcuguccaccaacaaggccguggugagccucuccaacggcgucagcgugcugaccuucaaggugcuggaccucaagaacuacaucgacaagcagcugcugcccauccugaacaagcagagcugcuccaucagcaacaucgagacggugaucgaguuccagcagaagaacaaccggcuccuggagaucacccgcgaguucagcgugaacgccggggucaccacccccguguccacguacaugcugaccaacagcgagcuccugucccugaucaacgacaugccgaucaccaacgaccagaagaagcucaugagcaacaacgugcagaucguccggcagcaguccuacagcaucaugugcaucaucaaggaggaggugcuggcguacgugguccagcugccccucuacggcgugaucgacacccccugcuggaagcugcacacgagcccccugugcaccaccaacaccaaggagggguccaacaucugccucacgcgcaccgaccggggcugguacugcgacaacgccggcagcgucuccuucuucccgcaggccgagaccugcaaggugcagagcaaccgcguguucugcgacaccaugaacucccggacgcugcccagcgagguaaaccucugcaacgucgacaucuucaaccccaaguacgacugcaagaucaugaccuccaagaccgacgugagcuccagcgugaucaccucccugggggccaucgucagcugcuacggcaagacgaagugcaccgccagcaacaagaaccgggggaucaucaagaccuucuccaacggcugcgacuacgugagcaacaagggcguggacaccguguccgucgggaacacccuguacugcgugaacaagcaggagggcaagagccucuacgugaagggggagcccaucaucaacuucuacgacccgcuggucuuccccuccgacgaguucgacgcgagcaucucccaggugaacgagaagaucaaccagagccuggccuucauccgcaaguccgacgagcugcuccacaacgugaacgccggcaagagcacgaccaacaucaugaucaccaccaucaucaucgucaucaucgugauccugcugucccucaucgccguggggcugcugcucuacugcaaggcccggugaggacuaguaauaaggaaacuguaugaaugucugugggcaggaagugaagagauccuucuguaaagguuuuuggaauuaugucugcugaauaauaaacuuuuuugaaauaauaaaucugguagaaaaaugagaucuaaaaaaaaaaaaaaaaaaaaaaaaaaaaaaaaaaaaaaaaaaaaaaaaaaaaaaaaaaaaaaaaugcaucccccccccccccccccccccccccccccccaaaggcucuuuucagagccaccagaauu

SEQ ID NO: 5031 - RNA, 1885 nt, Artificial Sequence
  mRNA product Design b-4 comprising derived and/or modified sequence from HRSV(A2)__F-del_DSCav1_mut4 (opt1)
gggagagucccgcagucggcguccagcggcucugcuuguucgugugugugucguugcaggccuuauucaagcuuaccauggagcugcucauccugaaggccaacgccaucaccaccauccugacggcggugaccuucugcuucgccagcggccagaacaucaccgaggaguucuaccaguccacgugcagcgccgucuccaagggguaccucagcgcccugcgcaccggcugguacaccuccgugaucaccaucgagcugagcaacaucaaggagaacaagugcaacgggaccgacgccaaggugaagcucaucaagcaggagcuggacaaguacaagaacgcggucacggagcugcagcuccugaugcaguccacccccgccaccggcagcggguccgccaucugcagcggcguggccgugugcaagguccugcaccucgagggcgaggugaacaagaucaaguccgcgcugcugagcaccaacaaggccguggucucccucagcaacgggguguccgugcugacguucaagguccuggaccucaagaacuacaucgacaagcagcugcugccgauccucaacaagcagagcugcuccaucagcaacaucgagaccgugaucgaguuccagcagaagaacaaccggcugcuggagaucacccgcgaguucuccgugaacgccggcgucaccacgcccgugagcaccuacaugcucaccaacagcgagcugcugucccucaucaacgacaugcccaucaccaacgaccagaagaagcugaugagcaacaacgugcagaucguccggcagcaguccuacagcaucaugugcaucaucaaggaggaggugcuggccuacgugguccagcucccccuguacggggugaucgacacgccgugcuggaagcugcacaccagcccccucugcaccaccaacacgaaggagggcuccaacaucugccugacccgcaccgaccgggggugguacugcgacaacgccggcuccgugagcuucuucccccaggcggagaccugcaagguccaguccaaccgcguguucugcgacacgaugaacagccggacccuccccuccgaggucaaccugugcaacguggacaucuucaacccgaaguacgacugcaagaucaugaccagcaagaccgacguguccagcuccgucaucacgagccugggcgccaucguguccugcuacgggaagaccaagugcaccgccagcaacaagaaccggggcaucaucaagaccuucuccaacgggugcgacuacgugagcaacaagggcgucgacacggugagcgugggcaacacccucuacugcgucaacaagcaggaggggaagucccuguacgugaagggcgagcccaucaucaacuucuacgacccccugguguuccccagcgacgaguucgacgccuccaucagccaggucaacgagaagaucaaccagucccucgccuucauccgcaagagcgacgagcugcugcacaacgugaacgcggggaaguccaccaccaacaucaugaucaccacgaucaucaucgugaucaucgucauccuccugagccugaucgccgugggccuccugcuguacugcaaggcccggugaggacuaguaauaaggaaacuguaugaaugucugugggcaggaagugaagagauccuucuguaaagguuuuuggaauuaugucugcugaauaauaaacuuuuuugaaauaauaaaucugguagaaaaaugagaucuaaaaaaaaaaaaaaaaaaaaaaaaaaaaaaaaaaaaaaaaaaaaaaaaaaaaaaaaaaaaaaaaugcaucccccccccccccccccccccccccccccccaaaggcucuuuucagagccaccagaauu

SEQ ID NO: 5032 - RNA, 1885 nt, Artificial Sequence
  mRNA product Design b-4 comprising derived and/or modified sequence from HRSV(A2)__F-del_DSCav1_mut4 (opt2)
gggagagucccgcagucggcguccagcggcucugcuuguucgugugugugucguugcaggccuuauucaagcuuaccauggagcuccucauccucaaggccaacgccaucaccaccauccucaccgccgucaccuucugcuucgccuccggccagaacaucaccgaggaguucuaccaguccaccugcuccgccgucuccaagggcuaccucuccgcccuccgcaccggcugguacaccuccgucaucaccaucgagcucuccaacaucaaggagaacaagugcaacggcaccgacgccaaggucaagcucaucaagcaggagcucgacaaguacaagaacgccgucaccgagcuccagcuccucaugcaguccacccccgccaccggcuccggcuccgccaucugcuccggcgucgccgucugcaagguccuccaccucgagggcgaggucaacaagaucaaguccgcccuccucuccaccaacaaggccgucgucucccucuccaacggcgucuccguccucaccuucaagguccucgaccucaagaacuacaucgacaagcagcuccuccccauccucaacaagcaguccugcuccaucuccaacaucgagaccgucaucgaguuccagcagaagaacaaccgccuccucgagaucacccgcgaguucuccgucaacgccggcgucaccacccccgucuccaccuacaugcucaccaacuccgagcuccucucccucaucaacgacaugcccaucaccaacgaccagaagaagcucauguccaacaacguccagaucguccgccagcaguccuacuccaucaugugcaucaucaaggaggagguccucgccuacgucguccagcucccccucuacggcgucaucgacacccccugcuggaagcuccacaccuccccccucugcaccaccaacaccaaggagggcuccaacaucugccucacccgcaccgaccgcggcugguacugcgacaacgccggcuccgucuccuucuucccccaggccgagaccugcaagguccaguccaaccgcgucuucugcgacaccaugaacucccgcacccuccccuccgaggucaaccucugcaacgucgacaucuucaaccccaaguacgacugcaagaucaugaccuccaagaccgacgucuccuccuccgucaucaccucccucggcgccaucgucuccugcuacggcaagaccaagugcaccgccuccaacaagaaccgcggcaucaucaagaccuucuccaacggcugcgacuacgucuccaacaagggcgucgacaccgucuccgucggcaacacccucuacugcgucaacaagcaggagggcaagucccucuacgucaagggcgagcccaucaucaacuucuacgacccccucgucuuccccuccgacgaguucgacgccuccaucucccaggucaacgagaagaucaaccagucccucgccuucauccgcaaguccgacgagcuccuccacaacgucaacgccggcaaguccaccaccaacaucaugaucaccaccaucaucaucgucaucaucgucauccuccucucccucaucgccgucggccuccuccucuacugcaaggcccgcugaggacuaguaauaaggaaacuguaugaaugucugugggcaggaagugaagagauccuucuguaaagguuuuuggaauuaugucugcugaauaauaaacuuuuuugaaauaauaaaucugguagaaaaaugagaucuaaaaaaaaaaaaaaaaaaaaaaaaaaaaaaaaaaaaaaaaaaaaaaaaaaaaaaaaaaaaaaaaugcaucccccccccccccccccccccccccccccccaaaggcucuuuucagagccaccagaauu

SEQ ID NO: 5033 - RNA, 1885 nt, Artificial Sequence
  mRNA product Design b-4 comprising derived and/or modified sequence from HRSV(A2)__F-del_DSCav1_mut4 (opt3)
gggagagucccgcagucggcguccagcggcucugcuuguucgugugugugucguugcaggccuuauucaagcuuaccauggagcugcucauccuuaaggccaacgcuauuaccacaauacugacugcagugacguucugcuuugccagcggccagaauaucaccgaagaguucuaccaauccacauguucugcggucucaaaaggguauuugagugcuuuaagaacuggaugguacaccagcguuauuacaaucgaacuguccaacauuaaggagaauaaaugcaacgguaccgacgccaaggugaaacuaaucaagcaggaacucgauaaguauaaaaaugcaguaacugagcugcagcuucugaugcagucuacacccgccaccggcucggggucagcuauauguagcggaguggcagucugcaagguguugcaccucgagggcgaaguuaacaaaaucaagagugcccugcuguccacgaauaaagcuguggucucucucagcaacgguguguccguauuaacuuuuaagguucuggaccuuaagaauuacauugauaaacaauugcugccuauccuaaacaagcagucauguaguauuagcaauaucgagaccgugauagaguuccagcagaaaaacaauaggcuccuggaaauuacacgggaguuuucugucaacgccggggugacuaccccaguguccacauauaugcuuaccaauucagaacuguugagccucaucaacgacaugccgauuacgaacgaucaaaagaaacugaugaguaauaacguccagaucguucgccagcagucuuacuccaucaugugcauuauaaaggaggaaguguuagcguauguagugcaacugccccucuacggagucaucgacacuccuuguuggaaacuucauacaagcccacugugcaccacuaauacaaaggagggcucgaacauuuguuugacccgaacggaucguggcugguacugcgacaaugcagggucuguguccuucuuuccccaggccgaaaccuguaagguucagucaaacagaguguucugcgauacaaugaauaguagaacucugccuagcgaggucaaccucugcaauguggacaucuuuaacccaaaauaugauuguaagauaaugaccuccaaaacagacguaucuagcucaguuauuaccagucugggagcuaucguguccugcuacgguaagacuaaauguacagccagcaauaagaacaggggcaucauuaagaccuucucuaaugggugcgauuaugucucaaacaaaggaguggacacugucagugugggcaauacgcuuuacuguguuaacaagcaagaggguaaaagccuguaugugaagggggaacccaucauuaacuuuuacgacccuuugguauucccauccgaugaguuugacgcaucuauaucgcaggucaaugagaaaaucaaccagagccucgcuuucauucggaaguccgaugaacuguuacacaaugugaacgccggaaagucaacaaccaauaucaugaucacuaccauuauaaucguuauuaucgugauucugcuaagucucaucgcggucggccugcuuuuguauugcaaagcccgcugaggacuaguaauaaggaaacuguaugaaugucugugggcaggaagugaagagauccuucuguaaagguuuuuggaauuaugucugcugaauaauaaacuuuuuugaaauaauaaaucugguagaaaaaugagaucuaaaaaaaaaaaaaaaaaaaaaaaaaaaaaaaaaaaaaaaaaaaaaaaaaaaaaaaaaaaaaaaaugcaucccccccccccccccccccccccccccccccaaaggcucuuuucagagccaccagaauu

SEQ ID NO: 5034 - RNA, 1885 nt, Artificial Sequence
  mRNA product Design b-4 comprising derived and/or modified sequence from HRSV(A2)__F-del_DSCav1_mut4 (opt4)
gggagagucccgcagucggcguccagcggcucugcuuguucgugugugugucguugcaggccuuauucaagcuuaccauggagcugcugauccugaaggccaacgccaucaccaccauccugaccgccgugaccuucugcuucgccagcggccagaacaucaccgaggaguucuaccagagcaccugcagcgccgugagcaagggcuaccugagcgcccugagaaccggcugguacaccagcgugaucaccaucgagcugagcaacaucaaggagaacaagugcaacggcaccgacgccaaggugaagcugaucaagcaggagcuggacaaguacaagaacgccgugaccgagcugcagcugcugaugcagagcacccccgccaccggcagcggcagcgccaucugcagcggcguggccgugugcaaggugcugcaccuggagggcgaggugaacaagaucaagagcgcccugcugagcaccaacaaggccguggugagccugagcaacggcgugagcgugcugaccuucaaggugcuggaccugaagaacuacaucgacaagcagcugcugcccauccugaacaagcagagcugcagcaucagcaacaucgagaccgugaucgaguuccagcagaagaacaacagacugcuggagaucaccagagaguucagcgugaacgccggcgugaccacccccgugagcaccuacaugcugaccaacagcgagcugcugagccugaucaacgacaugcccaucaccaacgaccagaagaagcugaugagcaacaacgugcagaucgugagacagcagagcuacagcaucaugugcaucaucaaggaggaggugcuggccuacguggugcagcugccccuguacggcgugaucgacacccccugcuggaagcugcacaccagcccccugugcaccaccaacaccaaggagggcagcaacaucugccugaccagaaccgacagaggcugguacugcgacaacgccggcagcgugagcuucuucccccaggccgagaccugcaaggugcagagcaacagaguguucugcgacaccaugaacagcagaacccugcccagcgaggugaaccugugcaacguggacaucuucaaccccaaguacgacugcaagaucaugaccagcaagaccgacgugagcagcagcgugaucaccagccugggcgccaucgugagcugcuacggcaagaccaagugcaccgccagcaacaagaacagaggcaucaucaagaccuucagcaacggcugcgacuacgugagcaacaagggcguggacaccgugagcgugggcaacacccuguacugcgugaacaagcaggagggcaagagccuguacgugaagggcgagcccaucaucaacuucuacgacccccugguguuccccagcgacgaguucgacgccagcaucagccaggugaacgagaagaucaaccagagccuggccuucaucagaaagagcgacgagcugcugcacaacgugaacgccggcaagagcaccaccaacaucaugaucaccaccaucaucaucgugaucaucgugauccugcugagccugaucgccgugggccugcugcuguacugcaaggccagaugaggacuaguaauaaggaaacuguaugaaugucugugggcaggaagugaagagauccuucuguaaagguuuuuggaauuaugucugcugaauaauaaacuuuuuugaaauaauaaaucugguagaaaaaugagaucuaaaaaaaaaaaaaaaaaaaaaaaaaaaaaaaaaaaaaaaaaaaaaaaaaaaaaaaaaaaaaaaaugcaucccccccccccccccccccccccccccccccaaaggcucuuuucagagccaccagaauu

SEQ ID NO: 5035 - RNA, 1885 nt, Artificial Sequence
  mRNA product Design b-4 comprising derived and/or modified sequence from HRSV(A2)__F-del_DSCav1_mut4 (opt5)
gggagagucccgcagucggcguccagcggcucugcuuguucgugugugugucguugcaggccuuauucaagcuuaccauggagcugcucauccugaaggccaacgcuauuaccacaauccuuacggccgugaccuucugcuuugcgagcggccagaauauuacagaagaguucuaccaauccaccuguucugcugucagcaaaggguaucuguccgcccucagaacaggaugguacaccucuguuaucacaauugaacugagcaacaucaaggagaauaaaugcaacggcaccgacgccaaggugaaacuuaucaagcaggaacuggauaaguauaaaaaugcugugacggagcuccagcugcugaugcaguccacccccgccacagggucuggaagcgcuauuuguuccggcgucgccgugugcaagguucuccaccuggagggggaagugaacaaaaucaagagcgcgcuucugucuaccaauaaagccgucgugucccucagcaacggaguuucugugcugacauuuaagguccuugaccugaagaauuacauugauaaacaacuccugccuauccugaacaagcaguccuguagcauuucuaauaucgagaccgugauugaguuccagcagaaaaacaaucggcuccuggaaaucacgcgcgaguuuuccgugaacgcuggcgucacaaccccgguuagcacauauaugcuuaccaauuccgaacugcucucucugaucaacgacaugcccauuaccaacgaucaaaagaaacuuaugagcaauaacgugcagaucgugagacagcaguccuacagcauuaugugcaucauuaaggaggaaguccuggccuaugugguucaacucccucuguacggcgugaucgacacacccuguuggaaacugcauacgucuccucucugcaccacaaauaccaaggagggguccaacaucugucugacacggaccgaucgcggaugguacugcgacaaugcuggcagcgucucuuucuuuccccaggccgaaacguguaaggugcagagcaacagaguuuucugcgauacaaugaacuccagaacccugccuucugaggugaaucucugcaaugucgacauuuuuaacccgaaauaugauuguaagaucaugaccagcaaaacagacguguccagcucugucauuaccucccugggggcgaucgugagcugcuacggaaagacaaaauguacggccucuaauaagaaccggggcauuaucaagaccuucuccaaugggugcgauuauguuagcaacaaaggaguggacacagucuccgugggcaauacccuuuacuguguuaacaagcaagagggcaaaucucuguaugugaagggggaacccaucauuaacuuuuacgacccucucgucuuccccagcgaugaguuugacgcuuccaucucucaggugaaugagaaaauuaaccagagccuggccuucauccgcaaguccgaugaacugcuccacaaugugaacgcuggaaagagcacaaccaauauuaugaucacgaccauuaucaucguuauuaucgucauucugcuuucucugaucgccgugggccuccugcuguauugcaaagccagaugaggacuaguaauaaggaaacuguaugaaugucugugggcaggaagugaagagauccuucuguaaagguuuuuggaauuaugucugcugaauaauaaacuuuuuugaaauaauaaaucugguagaaaaaugagaucuaaaaaaaaaaaaaaaaaaaaaaaaaaaaaaaaaaaaaaaaaaaaaaaaaaaaaaaaaaaaaaaaugcaucccccccccccccccccccccccccccccccaaaggcucuuuucagagccaccagaauu

SEQ ID NO: 5036 - RNA, 1885 nt, Artificial Sequence
  mRNA product Design b-4 comprising derived and/or modified sequence from HRSV(A2)__F-del_DSCav1_mut4 (opt6)
gggagagucccgcagucggcguccagcggcucugcuuguucgugugugugucguugcaggccuuauucaagcuuaccauggaacuuuuaauacuaaaagcuaacgccauaaccacuauacuaacagcagucacauucugcuucgcaucaggccaaaacauaaccgaagaauuuuaccaauccacuuguucagcagucuccaaaggauauuuauccgcacuucguacaggaugguauacaucaguaauaacaauagaacucuccaacauaaaagaaaauaaaugcaacggcaccgacgcaaaaguaaaacucaucaaacaagaauuagacaaauacaagaacgccguaacagaacuacaauuacuaaugcaaucaacacccgccacaggaucaggaucugcaauaugcucuggaguagcaguaugcaaaguauuacaccuagaaggagaaguaaacaaaaucaaaagcgcacuacuauccacaaacaaagcuguaguaucacuaucaaacggaguaucaguauuaacuuucaaaguacuugaucuaaaaaacuacauagacaaacaacuacuacccauauuaaacaaacaaucaugcucaauaagcaauauagaaacaguaauagaauuucaacaaaaaaacaacagacuacuagaaaucacaagggaauuuucaguaaaugccgguguuacaaccccaguaucaacauacaugcuaacuaacucagaacuacuauccuuaauaaacgauaugccaauaacaaacgaucaaaaaaaacuaauguccaacaacguacaaauaguaagacaacaaucauacucaaucaugugcauuauaaaagaagaagucuuagcauacguaguacaauuaccacuauacgguguaauagauacaccauguuggaaauuacacacaagcccacuaugcacaacuaacacaaaagaaggcucaaauauauguuuaacaagaacagaccgagguugguacugcgacaaugcaggaucaguaucauucuuuccacaagcagaaacauguaaaguucaauccaacagaguauucugcgacacaaugaacuccagaacacuaccuucagaaguaaaccucuguaacguagacauauuuaaucccaaguacgacugcaaaauaaugacaucgaaaacagacguaagcuccucagugauaacaucccucggcgccaucguauccuguuacgguaaaacuaaauguaccgccucaaacaaaaaccgcgguauuauaaaaacuuuuucuaauggcugcgauuacguaagcaacaaaggcgucgacacaguuuccguaggaaacacacuauacugcguaaacaaacaagaagguaaaucucuauacguaaaaggagaaccaauaauaaauuucuaugauccuuuaguauucccauccgaugaauuugacgccucuaucucacaagucaacgaaaaaauaaaucaaucauuagcauucauacgaaaaucagacgaacuacuacacaacguaaacgcaggaaaaucaacaaccaacauaaugauaaccacaauaauaauaguuauuauagugauacuauuauccuuaauugcagucggacuauuauuauacuguaaagcacgcuaaggacuaguaauaaggaaacuguaugaaugucugugggcaggaagugaagagauccuucuguaaagguuuuuggaauuaugucugcugaauaauaaacuuuuuugaaauaauaaaucugguagaaaaaugagaucuaaaaaaaaaaaaaaaaaaaaaaaaaaaaaaaaaaaaaaaaaaaaaaaaaaaaaaaaaaaaaaaaugcaucccccccccccccccccccccccccccccccaaaggcucuuuucagagccaccagaauu

SEQ ID NO: 5037 - RNA, 1885 nt, Artificial Sequence
  mRNA product Design b-4 comprising derived and/or modified sequence from HRSV(A2)__F-del_DSCav1_mut4 (opt11)
gggagagucccgcagucggcguccagcggcucugcuuguucgugugugugucguugcaggccuuauucaagcuuaccauggaacuccucauccucaaagccaaugccaucaccacaauccugacagcaguaaccuucugcuucgcauccggacaaaacaucaccgaagaauuuuaccagucaaccugcuccgcugucucaaaaggcuaccucucagcccuucgcaccggcugguacaccucggucauaacaauagaacucuccaauaucaaagaaaacaaaugcaacggcacugacgccaagguaaaacucaucaaacaggaacucgauaaauacaagaacgccguaacagaacuacaacuacucaugcaaucaacaccggccaccggcuccgguuccgccauaugcuccggaguggccgugugcaagguccuccaccuugaaggggaaguuaacaaaaucaaaucagcccuccucuccacuaacaaagccguaguaucccuaagcaacgguguauccguccucaccuucaaaguacuagaccuaaagaauuauaucgacaaacaacuccuccccauacucaacaaacaauccugcuccauaagcaacaucgaaacagucaucgaguuccagcagaaaaacaaccgacuccucgaaauaacccgcgaguucucagucaacgccggagucaccacacccgucagcaccuacaugcugaccaacuccgaacuccucuccuuaaucaaugacaugcccaucaccaaugaccaaaagaaacucaugucaaacaacguccaaauaguacgccaacaauccuacuccaucaugugcaucauaaaagaagaaguacucgccuacgucguccaacucccccucuacggcguaaucgacacccccugcuggaaacuacacacaagcccccucugcaccacaaacacuaaagagggcuccaacaucugucuaacccgcaccgaucgaggcugguacugcgacaacgccggaucugucucauucuucccccaagccgaaaccugcaaaguccaauccaaccgcgucuucugcgacaccaugaacucgagaacccucccuuccgaagucaaccuaugcaacgucgacauuuucaaccccaaauacgacugcaaaaucaugaccucgaaaaccgacguaucauccagcgucaucaccagccuaggcgcaaucgugagcugcuacggcaaaaccaaaugcaccgcgagcaauaaaaaccgcgggaucaucaaaacuuucuccaacggcugcgacuacgucuccaacaagggagucgauaccgucuccguaggcaacacccucuacugcgucaacaaacaagaaggcaaaucacuauacguaaaaggcgagccaaucauaaacuucuacgacccucuaguuuucccauccgacgaguucgacgcuagcaucucccaagucaacgagaaaaucaaccaaucccucgcauucauccgcaaauccgacgaacuccuccacaacguaaacgcaggcaaaucaacuacuaauauaaugaucacaaccaucauaauagucauaaucguaauccuccuaucccucaucgccgucggacuacugcucuacugcaaagcccgcuaaggacuaguaauaaggaaacuguaugaaugucugugggcaggaagugaagagauccuucuguaaagguuuuuggaauuaugucugcugaauaauaaacuuuuuugaaauaauaaaucugguagaaaaaugagaucuaaaaaaaaaaaaaaaaaaaaaaaaaaaaaaaaaaaaaaaaaaaaaaaaaaaaaaaaaaaaaaaaugcaucccccccccccccccccccccccccccccccaaaggcucuuuucagagccaccagaauu

SEQ ID NO: 5038 - RNA, 1947 nt, Artificial Sequence
  mRNA product Design b-5 comprising derived and/or modified sequence from HRSV(A2)__F-del_DSCav1_mut4 (opt1)
gggagacuccugucgggcggaaguaggaggaguagaguuuaaaaacaguacucuuuuuccgguucgggacguaguugaagcaacgacaagccggauaaccgcucuugagacaggaagcuuaccauggagcugcucauccugaaggccaacgccaucaccaccauccugacggcggugaccuucugcuucgccagcggccagaacaucaccgaggaguucuaccaguccacgugcagcgccgucuccaagggguaccucagcgcccugcggaccggcugguacaccuccgugaucaccaucgagcugagcaacaucaaggagaacaagugcaacgggaccgacgccaaggugaagcucaucaagcaggagcuggacaaguacaagaacgcggucacggagcugcagcuccugaugcaguccaccccggcaaccggcuccggcuccgccaucugcagcggcgucgccgugugcaaggugcugcaccucgagggggaggucaacaagaucaagagcgcccugcuguccaccaacaaggccguggugagccucuccaacggcgucagcgugcugaccuucaaggugcuggaccucaagaacuacaucgacaagcagcugcugcccauccugaacaagcagagcugcuccaucagcaacaucgagacggugaucgaguuccagcagaagaacaaccggcuccuggagaucacccgcgaguucagcgugaacgccggggucaccacccccguguccacguacaugcugaccaacagcgagcuccugucccugaucaacgacaugccgaucaccaacgaccagaagaagcucaugagcaacaacgugcagaucguccggcagcaguccuacagcaucaugugcaucaucaaggaggaggugcuggcguacgugguccagcugccccucuacggcgugaucgacacccccugcuggaagcugcacacgagcccccugugcaccaccaacaccaaggagggguccaacaucugccucacgcgcaccgaccggggcugguacugcgacaacgccggcagcgucuccuucuucccgcaggccgagaccugcaaggugcagagcaaccgcguguucugcgacaccaugaacucccggacgcugcccagcgagguaaaccucugcaacgucgacaucuucaaccccaaguacgacugcaagaucaugaccuccaagaccgacgugagcuccagcgugaucaccucccugggggccaucgucagcugcuacggcaagacgaagugcaccgccagcaacaagaaccgggggaucaucaagaccuucuccaacggcugcgacuacgugagcaacaagggcguggacaccguguccgucgggaacacccuguacugcgugaacaagcaggagggcaagagccucuacgugaagggggagcccaucaucaacuucuacgacccgcuggucuuccccuccgacgaguucgacgcgagcaucucccaggugaacgagaagaucaaccagagccuggccuucauccgcaaguccgacgagcugcuccacaacgugaacgccggcaagagcacgaccaacaucaugaucaccaccaucaucaucgucaucaucgugauccugcugucccucaucgccguggggcugcugcucuacugcaaggcccggugaggacuaguacuggcugcaucucccuuuccucuguccuccauccuucucccaggauggugaagggggaccugguacccagugauccccaccccaggauccuaaaucaugacuuaccugcuaauaaaaacucauuggaaaagugagaagaucuaaaaaaaaaaaaaaaaaaaaaaaaaaaaaaaaaaaaaaaaaaaaaaaaaaaaaaaaaaaaaaaaugcaucccccccccccccccccccccccccccccccaaaggcucuuuucagagccaccagaauu

SEQ ID NO: 5039 - RNA, 1947 nt, Artificial Sequence
  mRNA product Design b-5 comprising derived and/or modified sequence from HRSV(A2)__F-del_DSCav1_mut4 (opt1)
gggagacuccugucgggcggaaguaggaggaguagaguuuaaaaacaguacucuuuuuccgguucgggacguaguugaagcaacgacaagccggauaaccgcucuugagacaggaagcuuaccauggagcugcucauccugaaggccaacgccaucaccaccauccugacggcggugaccuucugcuucgccagcggccagaacaucaccgaggaguucuaccaguccacgugcagcgccgucuccaagggguaccucagcgcccugcgcaccggcugguacaccuccgugaucaccaucgagcugagcaacaucaaggagaacaagugcaacgggaccgacgccaaggugaagcucaucaagcaggagcuggacaaguacaagaacgcggucacggagcugcagcuccugaugcaguccacccccgccaccggcagcggguccgccaucugcagcggcguggccgugugcaagguccugcaccucgagggcgaggugaacaagaucaaguccgcgcugcugagcaccaacaaggccguggucucccucagcaacgggguguccgugcugacguucaagguccuggaccucaagaacuacaucgacaagcagcugcugccgauccucaacaagcagagcugcuccaucagcaacaucgagaccgugaucgaguuccagcagaagaacaaccggcugcuggagaucacccgcgaguucuccgugaacgccggcgucaccacgcccgugagcaccuacaugcucaccaacagcgagcugcugucccucaucaacgacaugcccaucaccaacgaccagaagaagcugaugagcaacaacgugcagaucguccggcagcaguccuacagcaucaugugcaucaucaaggaggaggugcuggccuacgugguccagcucccccuguacggggugaucgacacgccgugcuggaagcugcacaccagcccccucugcaccaccaacacgaaggagggcuccaacaucugccugacccgcaccgaccgggggugguacugcgacaacgccggcuccgugagcuucuucccccaggcggagaccugcaagguccaguccaaccgcguguucugcgacacgaugaacagccggacccuccccuccgaggucaaccugugcaacguggacaucuucaacccgaaguacgacugcaagaucaugaccagcaagaccgacguguccagcuccgucaucacgagccugggcgccaucguguccugcuacgggaagaccaagugcaccgccagcaacaagaaccggggcaucaucaagaccuucuccaacgggugcgacuacgugagcaacaagggcgucgacacggugagcgugggcaacacccucuacugcgucaacaagcaggaggggaagucccuguacgugaagggcgagcccaucaucaacuucuacgacccccugguguuccccagcgacgaguucgacgccuccaucagccaggucaacgagaagaucaaccagucccucgccuucauccgcaagagcgacgagcugcugcacaacgugaacgcggggaaguccaccaccaacaucaugaucaccacgaucaucaucgugaucaucgucauccuccugagccugaucgccgugggccuccugcuguacugcaaggcccggugaggacuaguacuggcugcaucucccuuuccucuguccuccauccuucucccaggauggugaagggggaccugguacccagugauccccaccccaggauccuaaaucaugacuuaccugcuaauaaaaacucauuggaaaagugagaagaucuaaaaaaaaaaaaaaaaaaaaaaaaaaaaaaaaaaaaaaaaaaaaaaaaaaaaaaaaaaaaaaaaugcaucccccccccccccccccccccccccccccccaaaggcucuuuucagagccaccagaauu

SEQ ID NO: 5040 - RNA, 1947 nt, Artificial Sequence
  mRNA product Design b-5 comprising derived and/or modified sequence from HRSV(A2)__F-del_DSCav1_mut4 (opt2)
gggagacuccugucgggcggaaguaggaggaguagaguuuaaaaacaguacucuuuuuccgguucgggacguaguugaagcaacgacaagccggauaaccgcucuugagacaggaagcuuaccauggagcuccucauccucaaggccaacgccaucaccaccauccucaccgccgucaccuucugcuucgccuccggccagaacaucaccgaggaguucuaccaguccaccugcuccgccgucuccaagggcuaccucuccgcccuccgcaccggcugguacaccuccgucaucaccaucgagcucuccaacaucaaggagaacaagugcaacggcaccgacgccaaggucaagcucaucaagcaggagcucgacaaguacaagaacgccgucaccgagcuccagcuccucaugcaguccacccccgccaccggcuccggcuccgccaucugcuccggcgucgccgucugcaagguccuccaccucgagggcgaggucaacaagaucaaguccgcccuccucuccaccaacaaggccgucgucucccucuccaacggcgucuccguccucaccuucaagguccucgaccucaagaacuacaucgacaagcagcuccuccccauccucaacaagcaguccugcuccaucuccaacaucgagaccgucaucgaguuccagcagaagaacaaccgccuccucgagaucacccgcgaguucuccgucaacgccggcgucaccacccccgucuccaccuacaugcucaccaacuccgagcuccucucccucaucaacgacaugcccaucaccaacgaccagaagaagcucauguccaacaacguccagaucguccgccagcaguccuacuccaucaugugcaucaucaaggaggagguccucgccuacgucguccagcucccccucuacggcgucaucgacacccccugcuggaagcuccacaccuccccccucugcaccaccaacaccaaggagggcuccaacaucugccucacccgcaccgaccgcggcugguacugcgacaacgccggcuccgucuccuucuucccccaggccgagaccugcaagguccaguccaaccgcgucuucugcgacaccaugaacucccgcacccuccccuccgaggucaaccucugcaacgucgacaucuucaaccccaaguacgacugcaagaucaugaccuccaagaccgacgucuccuccuccgucaucaccucccucggcgccaucgucuccugcuacggcaagaccaagugcaccgccuccaacaagaaccgcggcaucaucaagaccuucuccaacggcugcgacuacgucuccaacaagggcgucgacaccgucuccgucggcaacacccucuacugcgucaacaagcaggagggcaagucccucuacgucaagggcgagcccaucaucaacuucuacgacccccucgucuuccccuccgacgaguucgacgccuccaucucccaggucaacgagaagaucaaccagucccucgccuucauccgcaaguccgacgagcuccuccacaacgucaacgccggcaaguccaccaccaacaucaugaucaccaccaucaucaucgucaucaucgucauccuccucucccucaucgccgucggccuccuccucuacugcaaggcccgcugaggacuaguacuggcugcaucucccuuuccucuguccuccauccuucucccaggauggugaagggggaccugguacccagugauccccaccccaggauccuaaaucaugacuuaccugcuaauaaaaacucauuggaaaagugagaagaucuaaaaaaaaaaaaaaaaaaaaaaaaaaaaaaaaaaaaaaaaaaaaaaaaaaaaaaaaaaaaaaaaugcaucccccccccccccccccccccccccccccccaaaggcucuuuucagagccaccagaauu

SEQ ID NO: 5041 - RNA, 1947 nt, Artificial Sequence
  mRNA product Design b-5 comprising derived and/or modified sequence from HRSV(A2)__F-del_DSCav1_mut4 (opt3)
gggagacuccugucgggcggaaguaggaggaguagaguuuaaaaacaguacucuuuuuccgguucgggacguaguugaagcaacgacaagccggauaaccgcucuugagacaggaagcuuaccauggagcugcucauccuuaaggccaacgcuauuaccacaauacugacugcagugacguucugcuuugccagcggccagaauaucaccgaagaguucuaccaauccacauguucugcggucucaaaaggguauuugagugcuuuaagaacuggaugguacaccagcguuauuacaaucgaacuguccaacauuaaggagaauaaaugcaacgguaccgacgccaaggugaaacuaaucaagcaggaacucgauaaguauaaaaaugcaguaacugagcugcagcuucugaugcagucuacacccgccaccggcucggggucagcuauauguagcggaguggcagucugcaagguguugcaccucgagggcgaaguuaacaaaaucaagagugcccugcuguccacgaauaaagcuguggucucucucagcaacgguguguccguauuaacuuuuaagguucuggaccuuaagaauuacauugauaaacaauugcugccuauccuaaacaagcagucauguaguauuagcaauaucgagaccgugauagaguuccagcagaaaaacaauaggcuccuggaaauuacacgggaguuuucugucaacgccggggugacuaccccaguguccacauauaugcuuaccaauucagaacuguugagccucaucaacgacaugccgauuacgaacgaucaaaagaaacugaugaguaauaacguccagaucguucgccagcagucuuacuccaucaugugcauuauaaaggaggaaguguuagcguauguagugcaacugccccucuacggagucaucgacacuccuuguuggaaacuucauacaagcccacugugcaccacuaauacaaaggagggcucgaacauuuguuugacccgaacggaucguggcugguacugcgacaaugcagggucuguguccuucuuuccccaggccgaaaccuguaagguucagucaaacagaguguucugcgauacaaugaauaguagaacucugccuagcgaggucaaccucugcaauguggacaucuuuaacccaaaauaugauuguaagauaaugaccuccaaaacagacguaucuagcucaguuauuaccagucugggagcuaucguguccugcuacgguaagacuaaauguacagccagcaauaagaacaggggcaucauuaagaccuucucuaaugggugcgauuaugucucaaacaaaggaguggacacugucagugugggcaauacgcuuuacuguguuaacaagcaagaggguaaaagccuguaugugaagggggaacccaucauuaacuuuuacgacccuuugguauucccauccgaugaguuugacgcaucuauaucgcaggucaaugagaaaaucaaccagagccucgcuuucauucggaaguccgaugaacuguuacacaaugugaacgccggaaagucaacaaccaauaucaugaucacuaccauuauaaucguuauuaucgugauucugcuaagucucaucgcggucggccugcuuuuguauugcaaagcccgcugaggacuaguacuggcugcaucucccuuuccucuguccuccauccuucucccaggauggugaagggggaccugguacccagugauccccaccccaggauccuaaaucaugacuuaccugcuaauaaaaacucauuggaaaagugagaagaucuaaaaaaaaaaaaaaaaaaaaaaaaaaaaaaaaaaaaaaaaaaaaaaaaaaaaaaaaaaaaaaaaugcaucccccccccccccccccccccccccccccccaaaggcucuuuucagagccaccagaauu

SEQ ID NO: 5042 - RNA, 1947 nt, Artificial Sequence
  mRNA product Design b-5 comprising derived and/or modified sequence from HRSV(A2)__F-del_DSCav1_mut4 (opt4)
gggagacuccugucgggcggaaguaggaggaguagaguuuaaaaacaguacucuuuuuccgguucgggacguaguugaagcaacgacaagccggauaaccgcucuugagacaggaagcuuaccauggagcugcugauccugaaggccaacgccaucaccaccauccugaccgccgugaccuucugcuucgccagcggccagaacaucaccgaggaguucuaccagagcaccugcagcgccgugagcaagggcuaccugagcgcccugagaaccggcugguacaccagcgugaucaccaucgagcugagcaacaucaaggagaacaagugcaacggcaccgacgccaaggugaagcugaucaagcaggagcuggacaaguacaagaacgccgugaccgagcugcagcugcugaugcagagcacccccgccaccggcagcggcagcgccaucugcagcggcguggccgugugcaaggugcugcaccuggagggcgaggugaacaagaucaagagcgcccugcugagcaccaacaaggccguggugagccugagcaacggcgugagcgugcugaccuucaaggugcuggaccugaagaacuacaucgacaagcagcugcugcccauccugaacaagcagagcugcagcaucagcaacaucgagaccgugaucgaguuccagcagaagaacaacagacugcuggagaucaccagagaguucagcgugaacgccggcgugaccacccccgugagcaccuacaugcugaccaacagcgagcugcugagccugaucaacgacaugcccaucaccaacgaccagaagaagcugaugagcaacaacgugcagaucgugagacagcagagcuacagcaucaugugcaucaucaaggaggaggugcuggccuacguggugcagcugccccuguacggcgugaucgacacccccugcuggaagcugcacaccagcccccugugcaccaccaacaccaaggagggcagcaacaucugccugaccagaaccgacagaggcugguacugcgacaacgccggcagcgugagcuucuucccccaggccgagaccugcaaggugcagagcaacagaguguucugcgacaccaugaacagcagaacccugcccagcgaggugaaccugugcaacguggacaucuucaaccccaaguacgacugcaagaucaugaccagcaagaccgacgugagcagcagcgugaucaccagccugggcgccaucgugagcugcuacggcaagaccaagugcaccgccagcaacaagaacagaggcaucaucaagaccuucagcaacggcugcgacuacgugagcaacaagggcguggacaccgugagcgugggcaacacccuguacugcgugaacaagcaggagggcaagagccuguacgugaagggcgagcccaucaucaacuucuacgacccccugguguuccccagcgacgaguucgacgccagcaucagccaggugaacgagaagaucaaccagagccuggccuucaucagaaagagcgacgagcugcugcacaacgugaacgccggcaagagcaccaccaacaucaugaucaccaccaucaucaucgugaucaucgugauccugcugagccugaucgccgugggccugcugcuguacugcaaggccagaugaggacuaguacuggcugcaucucccuuuccucuguccuccauccuucucccaggauggugaagggggaccugguacccagugauccccaccccaggauccuaaaucaugacuuaccugcuaauaaaaacucauuggaaaagugagaagaucuaaaaaaaaaaaaaaaaaaaaaaaaaaaaaaaaaaaaaaaaaaaaaaaaaaaaaaaaaaaaaaaaugcaucccccccccccccccccccccccccccccccaaaggcucuuuucagagccaccagaauu

SEQ ID NO: 5043 - RNA, 1947 nt, Artificial Sequence
  mRNA product Design b-5 comprising derived and/or modified sequence from HRSV(A2)__F-del_DSCav1_mut4 (opt5)
gggagacuccugucgggcggaaguaggaggaguagaguuuaaaaacaguacucuuuuuccgguucgggacguaguugaagcaacgacaagccggauaaccgcucuugagacaggaagcuuaccauggagcugcucauccugaaggccaacgcuauuaccacaauccuuacggccgugaccuucugcuuugcgagcggccagaauauuacagaagaguucuaccaauccaccuguucugcugucagcaaaggguaucuguccgcccucagaacaggaugguacaccucuguuaucacaauugaacugagcaacaucaaggagaauaaaugcaacggcaccgacgccaaggugaaacuuaucaagcaggaacuggauaaguauaaaaaugcugugacggagcuccagcugcugaugcaguccacccccgccacagggucuggaagcgcuauuuguuccggcgucgccgugugcaagguucuccaccuggagggggaagugaacaaaaucaagagcgcgcuucugucuaccaauaaagccgucgugucccucagcaacggaguuucugugcugacauuuaagguccuugaccugaagaauuacauugauaaacaacuccugccuauccugaacaagcaguccuguagcauuucuaauaucgagaccgugauugaguuccagcagaaaaacaaucggcuccuggaaaucacgcgcgaguuuuccgugaacgcuggcgucacaaccccgguuagcacauauaugcuuaccaauuccgaacugcucucucugaucaacgacaugcccauuaccaacgaucaaaagaaacuuaugagcaauaacgugcagaucgugagacagcaguccuacagcauuaugugcaucauuaaggaggaaguccuggccuaugugguucaacucccucuguacggcgugaucgacacacccuguuggaaacugcauacgucuccucucugcaccacaaauaccaaggagggguccaacaucugucugacacggaccgaucgcggaugguacugcgacaaugcuggcagcgucucuuucuuuccccaggccgaaacguguaaggugcagagcaacagaguuuucugcgauacaaugaacuccagaacccugccuucugaggugaaucucugcaaugucgacauuuuuaacccgaaauaugauuguaagaucaugaccagcaaaacagacguguccagcucugucauuaccucccugggggcgaucgugagcugcuacggaaagacaaaauguacggccucuaauaagaaccggggcauuaucaagaccuucuccaaugggugcgauuauguuagcaacaaaggaguggacacagucuccgugggcaauacccuuuacuguguuaacaagcaagagggcaaaucucuguaugugaagggggaacccaucauuaacuuuuacgacccucucgucuuccccagcgaugaguuugacgcuuccaucucucaggugaaugagaaaauuaaccagagccuggccuucauccgcaaguccgaugaacugcuccacaaugugaacgcuggaaagagcacaaccaauauuaugaucacgaccauuaucaucguuauuaucgucauucugcuuucucugaucgccgugggccuccugcuguauugcaaagccagaugaggacuaguacuggcugcaucucccuuuccucuguccuccauccuucucccaggauggugaagggggaccugguacccagugauccccaccccaggauccuaaaucaugacuuaccugcuaauaaaaacucauuggaaaagugagaagaucuaaaaaaaaaaaaaaaaaaaaaaaaaaaaaaaaaaaaaaaaaaaaaaaaaaaaaaaaaaaaaaaaugcaucccccccccccccccccccccccccccccccaaaggcucuuuucagagccaccagaauu

SEQ ID NO: 5044 - RNA, 1947 nt, Artificial Sequence
  mRNA product Design b-5 comprising derived and/or modified sequence from HRSV(A2)__F-del_DSCav1_mut4 (opt6)
gggagacuccugucgggcggaaguaggaggaguagaguuuaaaaacaguacucuuuuuccgguucgggacguaguugaagcaacgacaagccggauaaccgcucuugagacaggaagcuuaccauggaacuuuuaauacuaaaagcuaacgccauaaccacuauacuaacagcagucacauucugcuucgcaucaggccaaaacauaaccgaagaauuuuaccaauccacuuguucagcagucuccaaaggauauuuauccgcacuucguacaggaugguauacaucaguaauaacaauagaacucuccaacauaaaagaaaauaaaugcaacggcaccgacgcaaaaguaaaacucaucaaacaagaauuagacaaauacaagaacgccguaacagaacuacaauuacuaaugcaaucaacacccgccacaggaucaggaucugcaauaugcucuggaguagcaguaugcaaaguauuacaccuagaaggagaaguaaacaaaaucaaaagcgcacuacuauccacaaacaaagcuguaguaucacuaucaaacggaguaucaguauuaacuuucaaaguacuugaucuaaaaaacuacauagacaaacaacuacuacccauauuaaacaaacaaucaugcucaauaagcaauauagaaacaguaauagaauuucaacaaaaaaacaacagacuacuagaaaucacaagggaauuuucaguaaaugccgguguuacaaccccaguaucaacauacaugcuaacuaacucagaacuacuauccuuaauaaacgauaugccaauaacaaacgaucaaaaaaaacuaauguccaacaacguacaaauaguaagacaacaaucauacucaaucaugugcauuauaaaagaagaagucuuagcauacguaguacaauuaccacuauacgguguaauagauacaccauguuggaaauuacacacaagcccacuaugcacaacuaacacaaaagaaggcucaaauauauguuuaacaagaacagaccgagguugguacugcgacaaugcaggaucaguaucauucuuuccacaagcagaaacauguaaaguucaauccaacagaguauucugcgacacaaugaacuccagaacacuaccuucagaaguaaaccucuguaacguagacauauuuaaucccaaguacgacugcaaaauaaugacaucgaaaacagacguaagcuccucagugauaacaucccucggcgccaucguauccuguuacgguaaaacuaaauguaccgccucaaacaaaaaccgcgguauuauaaaaacuuuuucuaauggcugcgauuacguaagcaacaaaggcgucgacacaguuuccguaggaaacacacuauacugcguaaacaaacaagaagguaaaucucuauacguaaaaggagaaccaauaauaaauuucuaugauccuuuaguauucccauccgaugaauuugacgccucuaucucacaagucaacgaaaaaauaaaucaaucauuagcauucauacgaaaaucagacgaacuacuacacaacguaaacgcaggaaaaucaacaaccaacauaaugauaaccacaauaauaauaguuauuauagugauacuauuauccuuaauugcagucggacuauuauuauacuguaaagcacgcuaaggacuaguacuggcugcaucucccuuuccucuguccuccauccuucucccaggauggugaagggggaccugguacccagugauccccaccccaggauccuaaaucaugacuuaccugcuaauaaaaacucauuggaaaagugagaagaucuaaaaaaaaaaaaaaaaaaaaaaaaaaaaaaaaaaaaaaaaaaaaaaaaaaaaaaaaaaaaaaaaugcaucccccccccccccccccccccccccccccccaaaggcucuuuucagagccaccagaauu

SEQ ID NO: 5045 - RNA, 1947 nt, Artificial Sequence
  mRNA product Design b-5 comprising derived and/or modified sequence from HRSV(A2)__F-del_DSCav1_mut4 (opt11)
gggagacuccugucgggcggaaguaggaggaguagaguuuaaaaacaguacucuuuuuccgguucgggacguaguugaagcaacgacaagccggauaaccgcucuugagacaggaagcuuaccauggaacuccucauccucaaagccaaugccaucaccacaauccugacagcaguaaccuucugcuucgcauccggacaaaacaucaccgaagaauuuuaccagucaaccugcuccgcugucucaaaaggcuaccucucagcccuucgcaccggcugguacaccucggucauaacaauagaacucuccaauaucaaagaaaacaaaugcaacggcacugacgccaagguaaaacucaucaaacaggaacucgauaaauacaagaacgccguaacagaacuacaacuacucaugcaaucaacaccggccaccggcuccgguuccgccauaugcuccggaguggccgugugcaagguccuccaccuugaaggggaaguuaacaaaaucaaaucagcccuccucuccacuaacaaagccguaguaucccuaagcaacgguguauccguccucaccuucaaaguacuagaccuaaagaauuauaucgacaaacaacuccuccccauacucaacaaacaauccugcuccauaagcaacaucgaaacagucaucgaguuccagcagaaaaacaaccgacuccucgaaauaacccgcgaguucucagucaacgccggagucaccacacccgucagcaccuacaugcugaccaacuccgaacuccucuccuuaaucaaugacaugcccaucaccaaugaccaaaagaaacucaugucaaacaacguccaaauaguacgccaacaauccuacuccaucaugugcaucauaaaagaagaaguacucgccuacgucguccaacucccccucuacggcguaaucgacacccccugcuggaaacuacacacaagcccccucugcaccacaaacacuaaagagggcuccaacaucugucuaacccgcaccgaucgaggcugguacugcgacaacgccggaucugucucauucuucccccaagccgaaaccugcaaaguccaauccaaccgcgucuucugcgacaccaugaacucgagaacccucccuuccgaagucaaccuaugcaacgucgacauuuucaaccccaaauacgacugcaaaaucaugaccucgaaaaccgacguaucauccagcgucaucaccagccuaggcgcaaucgugagcugcuacggcaaaaccaaaugcaccgcgagcaauaaaaaccgcgggaucaucaaaacuuucuccaacggcugcgacuacgucuccaacaagggagucgauaccgucuccguaggcaacacccucuacugcgucaacaaacaagaaggcaaaucacuauacguaaaaggcgagccaaucauaaacuucuacgacccucuaguuuucccauccgacgaguucgacgcuagcaucucccaagucaacgagaaaaucaaccaaucccucgcauucauccgcaaauccgacgaacuccuccacaacguaaacgcaggcaaaucaacuacuaauauaaugaucacaaccaucauaauagucauaaucguaauccuccuaucccucaucgccgucggacuacugcucuacugcaaagcccgcuaaggacuaguacuggcugcaucucccuuuccucuguccuccauccuucucccaggauggugaagggggaccugguacccagugauccccaccccaggauccuaaaucaugacuuaccugcuaauaaaaacucauuggaaaagugagaagaucuaaaaaaaaaaaaaaaaaaaaaaaaaaaaaaaaaaaaaaaaaaaaaaaaaaaaaaaaaaaaaaaaugcaucccccccccccccccccccccccccccccccaaaggcucuuuucagagccaccagaauu

SEQ ID NO: 5046 - RNA, 1853 nt, Artificial Sequence
  mRNA product Design c-1 comprising derived and/or modified sequence from HRSV(A2)__F-del_DSCav1_mut4 (opt1)
gggagaguccgcucagccagguugcagaagcggcuuagcguguguccuaaucuucucucugcguguagguaggccugugccgcaaacaagcuuaccauggagcugcucauccugaaggccaacgccaucaccaccauccugacggcggugaccuucugcuucgccagcggccagaacaucaccgaggaguucuaccaguccacgugcagcgccgucuccaagggguaccucagcgcccugcggaccggcugguacaccuccgugaucaccaucgagcugagcaacaucaaggagaacaagugcaacgggaccgacgccaaggugaagcucaucaagcaggagcuggacaaguacaagaacgcggucacggagcugcagcuccugaugcaguccaccccggcaaccggcuccggcuccgccaucugcagcggcgucgccgugugcaaggugcugcaccucgagggggaggucaacaagaucaagagcgcccugcuguccaccaacaaggccguggugagccucuccaacggcgucagcgugcugaccuucaaggugcuggaccucaagaacuacaucgacaagcagcugcugcccauccugaacaagcagagcugcuccaucagcaacaucgagacggugaucgaguuccagcagaagaacaaccggcuccuggagaucacccgcgaguucagcgugaacgccggggucaccacccccguguccacguacaugcugaccaacagcgagcuccugucccugaucaacgacaugccgaucaccaacgaccagaagaagcucaugagcaacaacgugcagaucguccggcagcaguccuacagcaucaugugcaucaucaaggaggaggugcuggcguacgugguccagcugccccucuacggcgugaucgacacccccugcuggaagcugcacacgagcccccugugcaccaccaacaccaaggagggguccaacaucugccucacgcgcaccgaccggggcugguacugcgacaacgccggcagcgucuccuucuucccgcaggccgagaccugcaaggugcagagcaaccgcguguucugcgacaccaugaacucccggacgcugcccagcgagguaaaccucugcaacgucgacaucuucaaccccaaguacgacugcaagaucaugaccuccaagaccgacgugagcuccagcgugaucaccucccugggggccaucgucagcugcuacggcaagacgaagugcaccgccagcaacaagaaccgggggaucaucaagaccuucuccaacggcugcgacuacgugagcaacaagggcguggacaccguguccgucgggaacacccuguacugcgugaacaagcaggagggcaagagccucuacgugaagggggagcccaucaucaacuucuacgacccgcuggucuuccccuccgacgaguucgacgcgagcaucucccaggugaacgagaagaucaaccagagccuggccuucauccgcaaguccgacgagcugcuccacaacgugaacgccggcaagagcacgaccaacaucaugaucaccaccaucaucaucgucaucaucgugauccugcugucccucaucgccguggggcugcugcucuacugcaaggcccggugaggacuaguguccaccugucccuccugggcugcuggauugucucguuuuccugccaaauaaacaggaucagcgcuuuacagaucuaaaaaaaaaaaaaaaaaaaaaaaaaaaaaaaaaaaaaaaaaaaaaaaaaaaaaaaaaaaaaaaaugcaucccccccccccccccccccccccccccccccaaaggcucuuuucagagccaccagaauu

SEQ ID NO: 5047 - RNA, 1853 nt, Artificial Sequence
  mRNA product Design c-1 comprising derived and/or modified sequence from HRSV(A2)__F-del_DSCav1_mut4 (opt1)
gggagaguccgcucagccagguugcagaagcggcuuagcguguguccuaaucuucucucugcguguagguaggccugugccgcaaacaagcuuaccauggagcugcucauccugaaggccaacgccaucaccaccauccugacggcggugaccuucugcuucgccagcggccagaacaucaccgaggaguucuaccaguccacgugcagcgccgucuccaagggguaccucagcgcccugcgcaccggcugguacaccuccgugaucaccaucgagcugagcaacaucaaggagaacaagugcaacgggaccgacgccaaggugaagcucaucaagcaggagcuggacaaguacaagaacgcggucacggagcugcagcuccugaugcaguccacccccgccaccggcagcggguccgccaucugcagcggcguggccgugugcaagguccugcaccucgagggcgaggugaacaagaucaaguccgcgcugcugagcaccaacaaggccguggucucccucagcaacgggguguccgugcugacguucaagguccuggaccucaagaacuacaucgacaagcagcugcugccgauccucaacaagcagagcugcuccaucagcaacaucgagaccgugaucgaguuccagcagaagaacaaccggcugcuggagaucacccgcgaguucuccgugaacgccggcgucaccacgcccgugagcaccuacaugcucaccaacagcgagcugcugucccucaucaacgacaugcccaucaccaacgaccagaagaagcugaugagcaacaacgugcagaucguccggcagcaguccuacagcaucaugugcaucaucaaggaggaggugcuggccuacgugguccagcucccccuguacggggugaucgacacgccgugcuggaagcugcacaccagcccccucugcaccaccaacacgaaggagggcuccaacaucugccugacccgcaccgaccgggggugguacugcgacaacgccggcuccgugagcuucuucccccaggcggagaccugcaagguccaguccaaccgcguguucugcgacacgaugaacagccggacccuccccuccgaggucaaccugugcaacguggacaucuucaacccgaaguacgacugcaagaucaugaccagcaagaccgacguguccagcuccgucaucacgagccugggcgccaucguguccugcuacgggaagaccaagugcaccgccagcaacaagaaccggggcaucaucaagaccuucuccaacgggugcgacuacgugagcaacaagggcgucgacacggugagcgugggcaacacccucuacugcgucaacaagcaggaggggaagucccuguacgugaagggcgagcccaucaucaacuucuacgacccccugguguuccccagcgacgaguucgacgccuccaucagccaggucaacgagaagaucaaccagucccucgccuucauccgcaagagcgacgagcugcugcacaacgugaacgcggggaaguccaccaccaacaucaugaucaccacgaucaucaucgugaucaucgucauccuccugagccugaucgccgugggccuccugcuguacugcaaggcccggugaggacuaguguccaccugucccuccugggcugcuggauugucucguuuuccugccaaauaaacaggaucagcgcuuuacagaucuaaaaaaaaaaaaaaaaaaaaaaaaaaaaaaaaaaaaaaaaaaaaaaaaaaaaaaaaaaaaaaaaugcaucccccccccccccccccccccccccccccccaaaggcucuuuucagagccaccagaauu

SEQ ID NO: 5048 - RNA, 1853 nt, Artificial Sequence
  mRNA product Design c-1 comprising derived and/or modified sequence from HRSV(A2)__F-del_DSCav1_mut4 (opt2)
gggagaguccgcucagccagguugcagaagcggcuuagcguguguccuaaucuucucucugcguguagguaggccugugccgcaaacaagcuuaccauggagcuccucauccucaaggccaacgccaucaccaccauccucaccgccgucaccuucugcuucgccuccggccagaacaucaccgaggaguucuaccaguccaccugcuccgccgucuccaagggcuaccucuccgcccuccgcaccggcugguacaccuccgucaucaccaucgagcucuccaacaucaaggagaacaagugcaacggcaccgacgccaaggucaagcucaucaagcaggagcucgacaaguacaagaacgccgucaccgagcuccagcuccucaugcaguccacccccgccaccggcuccggcuccgccaucugcuccggcgucgccgucugcaagguccuccaccucgagggcgaggucaacaagaucaaguccgcccuccucuccaccaacaaggccgucgucucccucuccaacggcgucuccguccucaccuucaagguccucgaccucaagaacuacaucgacaagcagcuccuccccauccucaacaagcaguccugcuccaucuccaacaucgagaccgucaucgaguuccagcagaagaacaaccgccuccucgagaucacccgcgaguucuccgucaacgccggcgucaccacccccgucuccaccuacaugcucaccaacuccgagcuccucucccucaucaacgacaugcccaucaccaacgaccagaagaagcucauguccaacaacguccagaucguccgccagcaguccuacuccaucaugugcaucaucaaggaggagguccucgccuacgucguccagcucccccucuacggcgucaucgacacccccugcuggaagcuccacaccuccccccucugcaccaccaacaccaaggagggcuccaacaucugccucacccgcaccgaccgcggcugguacugcgacaacgccggcuccgucuccuucuucccccaggccgagaccugcaagguccaguccaaccgcgucuucugcgacaccaugaacucccgcacccuccccuccgaggucaaccucugcaacgucgacaucuucaaccccaaguacgacugcaagaucaugaccuccaagaccgacgucuccuccuccgucaucaccucccucggcgccaucgucuccugcuacggcaagaccaagugcaccgccuccaacaagaaccgcggcaucaucaagaccuucuccaacggcugcgacuacgucuccaacaagggcgucgacaccgucuccgucggcaacacccucuacugcgucaacaagcaggagggcaagucccucuacgucaagggcgagcccaucaucaacuucuacgacccccucgucuuccccuccgacgaguucgacgccuccaucucccaggucaacgagaagaucaaccagucccucgccuucauccgcaaguccgacgagcuccuccacaacgucaacgccggcaaguccaccaccaacaucaugaucaccaccaucaucaucgucaucaucgucauccuccucucccucaucgccgucggccuccuccucuacugcaaggcccgcugaggacuaguguccaccugucccuccugggcugcuggauugucucguuuuccugccaaauaaacaggaucagcgcuuuacagaucuaaaaaaaaaaaaaaaaaaaaaaaaaaaaaaaaaaaaaaaaaaaaaaaaaaaaaaaaaaaaaaaaugcaucccccccccccccccccccccccccccccccaaaggcucuuuucagagccaccagaauu

SEQ ID NO: 5049 - RNA, 1853 nt, Artificial Sequence
  mRNA product Design c-1 comprising derived and/or modified sequence from HRSV(A2)__F-del_DSCav1_mut4 (opt3)
gggagaguccgcucagccagguugcagaagcggcuuagcguguguccuaaucuucucucugcguguagguaggccugugccgcaaacaagcuuaccauggagcugcucauccuuaaggccaacgcuauuaccacaauacugacugcagugacguucugcuuugccagcggccagaauaucaccgaagaguucuaccaauccacauguucugcggucucaaaaggguauuugagugcuuuaagaacuggaugguacaccagcguuauuacaaucgaacuguccaacauuaaggagaauaaaugcaacgguaccgacgccaaggugaaacuaaucaagcaggaacucgauaaguauaaaaaugcaguaacugagcugcagcuucugaugcagucuacacccgccaccggcucggggucagcuauauguagcggaguggcagucugcaagguguugcaccucgagggcgaaguuaacaaaaucaagagugcccugcuguccacgaauaaagcuguggucucucucagcaacgguguguccguauuaacuuuuaagguucuggaccuuaagaauuacauugauaaacaauugcugccuauccuaaacaagcagucauguaguauuagcaauaucgagaccgugauagaguuccagcagaaaaacaauaggcuccuggaaauuacacgggaguuuucugucaacgccggggugacuaccccaguguccacauauaugcuuaccaauucagaacuguugagccucaucaacgacaugccgauuacgaacgaucaaaagaaacugaugaguaauaacguccagaucguucgccagcagucuuacuccaucaugugcauuauaaaggaggaaguguuagcguauguagugcaacugccccucuacggagucaucgacacuccuuguuggaaacuucauacaagcccacugugcaccacuaauacaaaggagggcucgaacauuuguuugacccgaacggaucguggcugguacugcgacaaugcagggucuguguccuucuuuccccaggccgaaaccuguaagguucagucaaacagaguguucugcgauacaaugaauaguagaacucugccuagcgaggucaaccucugcaauguggacaucuuuaacccaaaauaugauuguaagauaaugaccuccaaaacagacguaucuagcucaguuauuaccagucugggagcuaucguguccugcuacgguaagacuaaauguacagccagcaauaagaacaggggcaucauuaagaccuucucuaaugggugcgauuaugucucaaacaaaggaguggacacugucagugugggcaauacgcuuuacuguguuaacaagcaagaggguaaaagccuguaugugaagggggaacccaucauuaacuuuuacgacccuuugguauucccauccgaugaguuugacgcaucuauaucgcaggucaaugagaaaaucaaccagagccucgcuuucauucggaaguccgaugaacuguuacacaaugugaacgccggaaagucaacaaccaauaucaugaucacuaccauuauaaucguuauuaucgugauucugcuaagucucaucgcggucggccugcuuuuguauugcaaagcccgcugaggacuaguguccaccugucccuccugggcugcuggauugucucguuuuccugccaaauaaacaggaucagcgcuuuacagaucuaaaaaaaaaaaaaaaaaaaaaaaaaaaaaaaaaaaaaaaaaaaaaaaaaaaaaaaaaaaaaaaaugcaucccccccccccccccccccccccccccccccaaaggcucuuuucagagccaccagaauu

SEQ ID NO: 5050 - RNA, 1853 nt, Artificial Sequence
  mRNA product Design c-1 comprising derived and/or modified sequence from HRSV(A2)__F-del_DSCav1_mut4 (opt4)
gggagaguccgcucagccagguugcagaagcggcuuagcguguguccuaaucuucucucugcguguagguaggccugugccgcaaacaagcuuaccauggagcugcugauccugaaggccaacgccaucaccaccauccugaccgccgugaccuucugcuucgccagcggccagaacaucaccgaggaguucuaccagagcaccugcagcgccgugagcaagggcuaccugagcgcccugagaaccggcugguacaccagcgugaucaccaucgagcugagcaacaucaaggagaacaagugcaacggcaccgacgccaaggugaagcugaucaagcaggagcuggacaaguacaagaacgccgugaccgagcugcagcugcugaugcagagcacccccgccaccggcagcggcagcgccaucugcagcggcguggccgugugcaaggugcugcaccuggagggcgaggugaacaagaucaagagcgcccugcugagcaccaacaaggccguggugagccugagcaacggcgugagcgugcugaccuucaaggugcuggaccugaagaacuacaucgacaagcagcugcugcccauccugaacaagcagagcugcagcaucagcaacaucgagaccgugaucgaguuccagcagaagaacaacagacugcuggagaucaccagagaguucagcgugaacgccggcgugaccacccccgugagcaccuacaugcugaccaacagcgagcugcugagccugaucaacgacaugcccaucaccaacgaccagaagaagcugaugagcaacaacgugcagaucgugagacagcagagcuacagcaucaugugcaucaucaaggaggaggugcuggccuacguggugcagcugccccuguacggcgugaucgacacccccugcuggaagcugcacaccagcccccugugcaccaccaacaccaaggagggcagcaacaucugccugaccagaaccgacagaggcugguacugcgacaacgccggcagcgugagcuucuucccccaggccgagaccugcaaggugcagagcaacagaguguucugcgacaccaugaacagcagaacccugcccagcgaggugaaccugugcaacguggacaucuucaaccccaaguacgacugcaagaucaugaccagcaagaccgacgugagcagcagcgugaucaccagccugggcgccaucgugagcugcuacggcaagaccaagugcaccgccagcaacaagaacagaggcaucaucaagaccuucagcaacggcugcgacuacgugagcaacaagggcguggacaccgugagcgugggcaacacccuguacugcgugaacaagcaggagggcaagagccuguacgugaagggcgagcccaucaucaacuucuacgacccccugguguuccccagcgacgaguucgacgccagcaucagccaggugaacgagaagaucaaccagagccuggccuucaucagaaagagcgacgagcugcugcacaacgugaacgccggcaagagcaccaccaacaucaugaucaccaccaucaucaucgugaucaucgugauccugcugagccugaucgccgugggccugcugcuguacugcaaggccagaugaggacuaguguccaccugucccuccugggcugcuggauugucucguuuuccugccaaauaaacaggaucagcgcuuuacagaucuaaaaaaaaaaaaaaaaaaaaaaaaaaaaaaaaaaaaaaaaaaaaaaaaaaaaaaaaaaaaaaaaugcaucccccccccccccccccccccccccccccccaaaggcucuuuucagagccaccagaauu

SEQ ID NO: 5051 - RNA, 1853 nt, Artificial Sequence
  mRNA product Design c-1 comprising derived and/or modified sequence from HRSV(A2)__F-del_DSCav1_mut4 (opt5)
gggagaguccgcucagccagguugcagaagcggcuuagcguguguccuaaucuucucucugcguguagguaggccugugccgcaaacaagcuuaccauggagcugcucauccugaaggccaacgcuauuaccacaauccuuacggccgugaccuucugcuuugcgagcggccagaauauuacagaagaguucuaccaauccaccuguucugcugucagcaaaggguaucuguccgcccucagaacaggaugguacaccucuguuaucacaauugaacugagcaacaucaaggagaauaaaugcaacggcaccgacgccaaggugaaacuuaucaagcaggaacuggauaaguauaaaaaugcugugacggagcuccagcugcugaugcaguccacccccgccacagggucuggaagcgcuauuuguuccggcgucgccgugugcaagguucuccaccuggagggggaagugaacaaaaucaagagcgcgcuucugucuaccaauaaagccgucgugucccucagcaacggaguuucugugcugacauuuaagguccuugaccugaagaauuacauugauaaacaacuccugccuauccugaacaagcaguccuguagcauuucuaauaucgagaccgugauugaguuccagcagaaaaacaaucggcuccuggaaaucacgcgcgaguuuuccgugaacgcuggcgucacaaccccgguuagcacauauaugcuuaccaauuccgaacugcucucucugaucaacgacaugcccauuaccaacgaucaaaagaaacuuaugagcaauaacgugcagaucgugagacagcaguccuacagcauuaugugcaucauuaaggaggaaguccuggccuaugugguucaacucccucuguacggcgugaucgacacacccuguuggaaacugcauacgucuccucucugcaccacaaauaccaaggagggguccaacaucugucugacacggaccgaucgcggaugguacugcgacaaugcuggcagcgucucuuucuuuccccaggccgaaacguguaaggugcagagcaacagaguuuucugcgauacaaugaacuccagaacccugccuucugaggugaaucucugcaaugucgacauuuuuaacccgaaauaugauuguaagaucaugaccagcaaaacagacguguccagcucugucauuaccucccugggggcgaucgugagcugcuacggaaagacaaaauguacggccucuaauaagaaccggggcauuaucaagaccuucuccaaugggugcgauuauguuagcaacaaaggaguggacacagucuccgugggcaauacccuuuacuguguuaacaagcaagagggcaaaucucuguaugugaagggggaacccaucauuaacuuuuacgacccucucgucuuccccagcgaugaguuugacgcuuccaucucucaggugaaugagaaaauuaaccagagccuggccuucauccgcaaguccgaugaacugcuccacaaugugaacgcuggaaagagcacaaccaauauuaugaucacgaccauuaucaucguuauuaucgucauucugcuuucucugaucgccgugggccuccugcuguauugcaaagccagaugaggacuaguguccaccugucccuccugggcugcuggauugucucguuuuccugccaaauaaacaggaucagcgcuuuacagaucuaaaaaaaaaaaaaaaaaaaaaaaaaaaaaaaaaaaaaaaaaaaaaaaaaaaaaaaaaaaaaaaaugcaucccccccccccccccccccccccccccccccaaaggcucuuuucagagccaccagaauu

SEQ ID NO: 5052 - RNA, 1853 nt, Artificial Sequence
  mRNA product Design c-1 comprising derived and/or modified sequence from HRSV(A2)__F-del_DSCav1_mut4 (opt6)
gggagaguccgcucagccagguugcagaagcggcuuagcguguguccuaaucuucucucugcguguagguaggccugugccgcaaacaagcuuaccauggaacuuuuaauacuaaaagcuaacgccauaaccacuauacuaacagcagucacauucugcuucgcaucaggccaaaacauaaccgaagaauuuuaccaauccacuuguucagcagucuccaaaggauauuuauccgcacuucguacaggaugguauacaucaguaauaacaauagaacucuccaacauaaaagaaaauaaaugcaacggcaccgacgcaaaaguaaaacucaucaaacaagaauuagacaaauacaagaacgccguaacagaacuacaauuacuaaugcaaucaacacccgccacaggaucaggaucugcaauaugcucuggaguagcaguaugcaaaguauuacaccuagaaggagaaguaaacaaaaucaaaagcgcacuacuauccacaaacaaagcuguaguaucacuaucaaacggaguaucaguauuaacuuucaaaguacuugaucuaaaaaacuacauagacaaacaacuacuacccauauuaaacaaacaaucaugcucaauaagcaauauagaaacaguaauagaauuucaacaaaaaaacaacagacuacuagaaaucacaagggaauuuucaguaaaugccgguguuacaaccccaguaucaacauacaugcuaacuaacucagaacuacuauccuuaauaaacgauaugccaauaacaaacgaucaaaaaaaacuaauguccaacaacguacaaauaguaagacaacaaucauacucaaucaugugcauuauaaaagaagaagucuuagcauacguaguacaauuaccacuauacgguguaauagauacaccauguuggaaauuacacacaagcccacuaugcacaacuaacacaaaagaaggcucaaauauauguuuaacaagaacagaccgagguugguacugcgacaaugcaggaucaguaucauucuuuccacaagcagaaacauguaaaguucaauccaacagaguauucugcgacacaaugaacuccagaacacuaccuucagaaguaaaccucuguaacguagacauauuuaaucccaaguacgacugcaaaauaaugacaucgaaaacagacguaagcuccucagugauaacaucccucggcgccaucguauccuguuacgguaaaacuaaauguaccgccucaaacaaaaaccgcgguauuauaaaaacuuuuucuaauggcugcgauuacguaagcaacaaaggcgucgacacaguuuccguaggaaacacacuauacugcguaaacaaacaagaagguaaaucucuauacguaaaaggagaaccaauaauaaauuucuaugauccuuuaguauucccauccgaugaauuugacgccucuaucucacaagucaacgaaaaaauaaaucaaucauuagcauucauacgaaaaucagacgaacuacuacacaacguaaacgcaggaaaaucaacaaccaacauaaugauaaccacaauaauaauaguuauuauagugauacuauuauccuuaauugcagucggacuauuauuauacuguaaagcacgcuaaggacuaguguccaccugucccuccugggcugcuggauugucucguuuuccugccaaauaaacaggaucagcgcuuuacagaucuaaaaaaaaaaaaaaaaaaaaaaaaaaaaaaaaaaaaaaaaaaaaaaaaaaaaaaaaaaaaaaaaugcaucccccccccccccccccccccccccccccccaaaggcucuuuucagagccaccagaauu

SEQ ID NO: 5053 - RNA, 1853 nt, Artificial Sequence
  mRNA product Design c-1 comprising derived and/or modified sequence from HRSV(A2)__F-del_DSCav1_mut4 (opt11)
gggagaguccgcucagccagguugcagaagcggcuuagcguguguccuaaucuucucucugcguguagguaggccugugccgcaaacaagcuuaccauggaacuccucauccucaaagccaaugccaucaccacaauccugacagcaguaaccuucugcuucgcauccggacaaaacaucaccgaagaauuuuaccagucaaccugcuccgcugucucaaaaggcuaccucucagcccuucgcaccggcugguacaccucggucauaacaauagaacucuccaauaucaaagaaaacaaaugcaacggcacugacgccaagguaaaacucaucaaacaggaacucgauaaauacaagaacgccguaacagaacuacaacuacucaugcaaucaacaccggccaccggcuccgguuccgccauaugcuccggaguggccgugugcaagguccuccaccuugaaggggaaguuaacaaaaucaaaucagcccuccucuccacuaacaaagccguaguaucccuaagcaacgguguauccguccucaccuucaaaguacuagaccuaaagaauuauaucgacaaacaacuccuccccauacucaacaaacaauccugcuccauaagcaacaucgaaacagucaucgaguuccagcagaaaaacaaccgacuccucgaaauaacccgcgaguucucagucaacgccggagucaccacacccgucagcaccuacaugcugaccaacuccgaacuccucuccuuaaucaaugacaugcccaucaccaaugaccaaaagaaacucaugucaaacaacguccaaauaguacgccaacaauccuacuccaucaugugcaucauaaaagaagaaguacucgccuacgucguccaacucccccucuacggcguaaucgacacccccugcuggaaacuacacacaagcccccucugcaccacaaacacuaaagagggcuccaacaucugucuaacccgcaccgaucgaggcugguacugcgacaacgccggaucugucucauucuucccccaagccgaaaccugcaaaguccaauccaaccgcgucuucugcgacaccaugaacucgagaacccucccuuccgaagucaaccuaugcaacgucgacauuuucaaccccaaauacgacugcaaaaucaugaccucgaaaaccgacguaucauccagcgucaucaccagccuaggcgcaaucgugagcugcuacggcaaaaccaaaugcaccgcgagcaauaaaaaccgcgggaucaucaaaacuuucuccaacggcugcgacuacgucuccaacaagggagucgauaccgucuccguaggcaacacccucuacugcgucaacaaacaagaaggcaaaucacuauacguaaaaggcgagccaaucauaaacuucuacgacccucuaguuuucccauccgacgaguucgacgcuagcaucucccaagucaacgagaaaaucaaccaaucccucgcauucauccgcaaauccgacgaacuccuccacaacguaaacgcaggcaaaucaacuacuaauauaaugaucacaaccaucauaauagucauaaucguaauccuccuaucccucaucgccgucggacuacugcucuacugcaaagcccgcuaaggacuaguguccaccugucccuccugggcugcuggauugucucguuuuccugccaaauaaacaggaucagcgcuuuacagaucuaaaaaaaaaaaaaaaaaaaaaaaaaaaaaaaaaaaaaaaaaaaaaaaaaaaaaaaaaaaaaaaaugcaucccccccccccccccccccccccccccccccaaaggcucuuuucagagccaccagaauu

SEQ ID NO: 5054 - RNA, 1943 nt, Artificial Sequence
  mRNA product Design c-2 comprising derived and/or modified sequence from HRSV(A2)__F-del_DSCav1_mut4 (opt1)
gggagacuccugucgggcggaaguaggaggaguagaguuuaaaaacaguacucuuuuuccgguucgggacguaguugaagcaacgacaagccggauaaccgcucuugagacaggaagcuuaccauggagcugcucauccugaaggccaacgccaucaccaccauccugacggcggugaccuucugcuucgccagcggccagaacaucaccgaggaguucuaccaguccacgugcagcgccgucuccaagggguaccucagcgcccugcggaccggcugguacaccuccgugaucaccaucgagcugagcaacaucaaggagaacaagugcaacgggaccgacgccaaggugaagcucaucaagcaggagcuggacaaguacaagaacgcggucacggagcugcagcuccugaugcaguccaccccggcaaccggcuccggcuccgccaucugcagcggcgucgccgugugcaaggugcugcaccucgagggggaggucaacaagaucaagagcgcccugcuguccaccaacaaggccguggugagccucuccaacggcgucagcgugcugaccuucaaggugcuggaccucaagaacuacaucgacaagcagcugcugcccauccugaacaagcagagcugcuccaucagcaacaucgagacggugaucgaguuccagcagaagaacaaccggcuccuggagaucacccgcgaguucagcgugaacgccggggucaccacccccguguccacguacaugcugaccaacagcgagcuccugucccugaucaacgacaugccgaucaccaacgaccagaagaagcucaugagcaacaacgugcagaucguccggcagcaguccuacagcaucaugugcaucaucaaggaggaggugcuggcguacgugguccagcugccccucuacggcgugaucgacacccccugcuggaagcugcacacgagcccccugugcaccaccaacaccaaggagggguccaacaucugccucacgcgcaccgaccggggcugguacugcgacaacgccggcagcgucuccuucuucccgcaggccgagaccugcaaggugcagagcaaccgcguguucugcgacaccaugaacucccggacgcugcccagcgagguaaaccucugcaacgucgacaucuucaaccccaaguacgacugcaagaucaugaccuccaagaccgacgugagcuccagcgugaucaccucccugggggccaucgucagcugcuacggcaagacgaagugcaccgccagcaacaagaaccgggggaucaucaagaccuucuccaacggcugcgacuacgugagcaacaagggcguggacaccguguccgucgggaacacccuguacugcgugaacaagcaggagggcaagagccucuacgugaagggggagcccaucaucaacuucuacgacccgcuggucuuccccuccgacgaguucgacgcgagcaucucccaggugaacgagaagaucaaccagagccuggccuucauccgcaaguccgacgagcugcuccacaacgugaacgccggcaagagcacgaccaacaucaugaucaccaccaucaucaucgucaucaucgugauccugcugucccucaucgccguggggcugcugcucuacugcaaggcccggugaggacuaguggaagcauuuuccuggcugauuaaaagaaauuacucagcuauggucaucuguuccuguuagaaggcuaugcagcauauuauauacuaugcgcauguuaugaaaugcauaauaaaaaauuuuaaaaaaucuaaaagaucuaaaaaaaaaaaaaaaaaaaaaaaaaaaaaaaaaaaaaaaaaaaaaaaaaaaaaaaaaaaaaaaaugcaucccccccccccccccccccccccccccccccaaaggcucuuuucagagccaccagaauu

SEQ ID NO: 5055 - RNA, 1943 nt, Artificial Sequence
  mRNA product Design c-2 comprising derived and/or modified sequence from HRSV(A2)__F-del_DSCav1_mut4 (opt1)
gggagacuccugucgggcggaaguaggaggaguagaguuuaaaaacaguacucuuuuuccgguucgggacguaguugaagcaacgacaagccggauaaccgcucuugagacaggaagcuuaccauggagcugcucauccugaaggccaacgccaucaccaccauccugacggcggugaccuucugcuucgccagcggccagaacaucaccgaggaguucuaccaguccacgugcagcgccgucuccaagggguaccucagcgcccugcgcaccggcugguacaccuccgugaucaccaucgagcugagcaacaucaaggagaacaagugcaacgggaccgacgccaaggugaagcucaucaagcaggagcuggacaaguacaagaacgcggucacggagcugcagcuccugaugcaguccacccccgccaccggcagcggguccgccaucugcagcggcguggccgugugcaagguccugcaccucgagggcgaggugaacaagaucaaguccgcgcugcugagcaccaacaaggccguggucucccucagcaacgggguguccgugcugacguucaagguccuggaccucaagaacuacaucgacaagcagcugcugccgauccucaacaagcagagcugcuccaucagcaacaucgagaccgugaucgaguuccagcagaagaacaaccggcugcuggagaucacccgcgaguucuccgugaacgccggcgucaccacgcccgugagcaccuacaugcucaccaacagcgagcugcugucccucaucaacgacaugcccaucaccaacgaccagaagaagcugaugagcaacaacgugcagaucguccggcagcaguccuacagcaucaugugcaucaucaaggaggaggugcuggccuacgugguccagcucccccuguacggggugaucgacacgccgugcuggaagcugcacaccagcccccucugcaccaccaacacgaaggagggcuccaacaucugccugacccgcaccgaccgggggugguacugcgacaacgccggcuccgugagcuucuucccccaggcggagaccugcaagguccaguccaaccgcguguucugcgacacgaugaacagccggacccuccccuccgaggucaaccugugcaacguggacaucuucaacccgaaguacgacugcaagaucaugaccagcaagaccgacguguccagcuccgucaucacgagccugggcgccaucguguccugcuacgggaagaccaagugcaccgccagcaacaagaaccggggcaucaucaagaccuucuccaacgggugcgacuacgugagcaacaagggcgucgacacggugagcgugggcaacacccucuacugcgucaacaagcaggaggggaagucccuguacgugaagggcgagcccaucaucaacuucuacgacccccugguguuccccagcgacgaguucgacgccuccaucagccaggucaacgagaagaucaaccagucccucgccuucauccgcaagagcgacgagcugcugcacaacgugaacgcggggaaguccaccaccaacaucaugaucaccacgaucaucaucgugaucaucgucauccuccugagccugaucgccgugggccuccugcuguacugcaaggcccggugaggacuaguggaagcauuuuccuggcugauuaaaagaaauuacucagcuauggucaucuguuccuguuagaaggcuaugcagcauauuauauacuaugcgcauguuaugaaaugcauaauaaaaaauuuuaaaaaaucuaaaagaucuaaaaaaaaaaaaaaaaaaaaaaaaaaaaaaaaaaaaaaaaaaaaaaaaaaaaaaaaaaaaaaaaugcaucccccccccccccccccccccccccccccccaaaggcucuuuucagagccaccagaauu

SEQ ID NO: 5056 - RNA, 1943 nt, Artificial Sequence
  mRNA product Design c-2 comprising derived and/or modified sequence from HRSV(A2)__F-del_DSCav1_mut4 (opt2)
gggagacuccugucgggcggaaguaggaggaguagaguuuaaaaacaguacucuuuuuccgguucgggacguaguugaagcaacgacaagccggauaaccgcucuugagacaggaagcuuaccauggagcuccucauccucaaggccaacgccaucaccaccauccucaccgccgucaccuucugcuucgccuccggccagaacaucaccgaggaguucuaccaguccaccugcuccgccgucuccaagggcuaccucuccgcccuccgcaccggcugguacaccuccgucaucaccaucgagcucuccaacaucaaggagaacaagugcaacggcaccgacgccaaggucaagcucaucaagcaggagcucgacaaguacaagaacgccgucaccgagcuccagcuccucaugcaguccacccccgccaccggcuccggcuccgccaucugcuccggcgucgccgucugcaagguccuccaccucgagggcgaggucaacaagaucaaguccgcccuccucuccaccaacaaggccgucgucucccucuccaacggcgucuccguccucaccuucaagguccucgaccucaagaacuacaucgacaagcagcuccuccccauccucaacaagcaguccugcuccaucuccaacaucgagaccgucaucgaguuccagcagaagaacaaccgccuccucgagaucacccgcgaguucuccgucaacgccggcgucaccacccccgucuccaccuacaugcucaccaacuccgagcuccucucccucaucaacgacaugcccaucaccaacgaccagaagaagcucauguccaacaacguccagaucguccgccagcaguccuacuccaucaugugcaucaucaaggaggagguccucgccuacgucguccagcucccccucuacggcgucaucgacacccccugcuggaagcuccacaccuccccccucugcaccaccaacaccaaggagggcuccaacaucugccucacccgcaccgaccgcggcugguacugcgacaacgccggcuccgucuccuucuucccccaggccgagaccugcaagguccaguccaaccgcgucuucugcgacaccaugaacucccgcacccuccccuccgaggucaaccucugcaacgucgacaucuucaaccccaaguacgacugcaagaucaugaccuccaagaccgacgucuccuccuccgucaucaccucccucggcgccaucgucuccugcuacggcaagaccaagugcaccgccuccaacaagaaccgcggcaucaucaagaccuucuccaacggcugcgacuacgucuccaacaagggcgucgacaccgucuccgucggcaacacccucuacugcgucaacaagcaggagggcaagucccucuacgucaagggcgagcccaucaucaacuucuacgacccccucgucuuccccuccgacgaguucgacgccuccaucucccaggucaacgagaagaucaaccagucccucgccuucauccgcaaguccgacgagcuccuccacaacgucaacgccggcaaguccaccaccaacaucaugaucaccaccaucaucaucgucaucaucgucauccuccucucccucaucgccgucggccuccuccucuacugcaaggcccgcugaggacuaguggaagcauuuuccuggcugauuaaaagaaauuacucagcuauggucaucuguuccuguuagaaggcuaugcagcauauuauauacuaugcgcauguuaugaaaugcauaauaaaaaauuuuaaaaaaucuaaaagaucuaaaaaaaaaaaaaaaaaaaaaaaaaaaaaaaaaaaaaaaaaaaaaaaaaaaaaaaaaaaaaaaaugcaucccccccccccccccccccccccccccccccaaaggcucuuuucagagccaccagaauu

SEQ ID NO: 5057 - RNA, 1943 nt, Artificial Sequence
  mRNA product Design c-2 comprising derived and/or modified sequence from HRSV(A2)__F-del_DSCav1_mut4 (opt3)
gggagacuccugucgggcggaaguaggaggaguagaguuuaaaaacaguacucuuuuuccgguucgggacguaguugaagcaacgacaagccggauaaccgcucuugagacaggaagcuuaccauggagcugcucauccuuaaggccaacgcuauuaccacaauacugacugcagugacguucugcuuugccagcggccagaauaucaccgaagaguucuaccaauccacauguucugcggucucaaaaggguauuugagugcuuuaagaacuggaugguacaccagcguuauuacaaucgaacuguccaacauuaaggagaauaaaugcaacgguaccgacgccaaggugaaacuaaucaagcaggaacucgauaaguauaaaaaugcaguaacugagcugcagcuucugaugcagucuacacccgccaccggcucggggucagcuauauguagcggaguggcagucugcaagguguugcaccucgagggcgaaguuaacaaaaucaagagugcccugcuguccacgaauaaagcuguggucucucucagcaacgguguguccguauuaacuuuuaagguucuggaccuuaagaauuacauugauaaacaauugcugccuauccuaaacaagcagucauguaguauuagcaauaucgagaccgugauagaguuccagcagaaaaacaauaggcuccuggaaauuacacgggaguuuucugucaacgccggggugacuaccccaguguccacauauaugcuuaccaauucagaacuguugagccucaucaacgacaugccgauuacgaacgaucaaaagaaacugaugaguaauaacguccagaucguucgccagcagucuuacuccaucaugugcauuauaaaggaggaaguguuagcguauguagugcaacugccccucuacggagucaucgacacuccuuguuggaaacuucauacaagcccacugugcaccacuaauacaaaggagggcucgaacauuuguuugacccgaacggaucguggcugguacugcgacaaugcagggucuguguccuucuuuccccaggccgaaaccuguaagguucagucaaacagaguguucugcgauacaaugaauaguagaacucugccuagcgaggucaaccucugcaauguggacaucuuuaacccaaaauaugauuguaagauaaugaccuccaaaacagacguaucuagcucaguuauuaccagucugggagcuaucguguccugcuacgguaagacuaaauguacagccagcaauaagaacaggggcaucauuaagaccuucucuaaugggugcgauuaugucucaaacaaaggaguggacacugucagugugggcaauacgcuuuacuguguuaacaagcaagaggguaaaagccuguaugugaagggggaacccaucauuaacuuuuacgacccuuugguauucccauccgaugaguuugacgcaucuauaucgcaggucaaugagaaaaucaaccagagccucgcuuucauucggaaguccgaugaacuguuacacaaugugaacgccggaaagucaacaaccaauaucaugaucacuaccauuauaaucguuauuaucgugauucugcuaagucucaucgcggucggccugcuuuuguauugcaaagcccgcugaggacuaguggaagcauuuuccuggcugauuaaaagaaauuacucagcuauggucaucuguuccuguuagaaggcuaugcagcauauuauauacuaugcgcauguuaugaaaugcauaauaaaaaauuuuaaaaaaucuaaaagaucuaaaaaaaaaaaaaaaaaaaaaaaaaaaaaaaaaaaaaaaaaaaaaaaaaaaaaaaaaaaaaaaaugcaucccccccccccccccccccccccccccccccaaaggcucuuuucagagccaccagaauu

SEQ ID NO: 5058 - RNA, 1943 nt, Artificial Sequence
  mRNA product Design c-2 comprising derived and/or modified sequence from HRSV(A2)__F-del_DSCav1_mut4 (opt4)
gggagacuccugucgggcggaaguaggaggaguagaguuuaaaaacaguacucuuuuuccgguucgggacguaguugaagcaacgacaagccggauaaccgcucuugagacaggaagcuuaccauggagcugcugauccugaaggccaacgccaucaccaccauccugaccgccgugaccuucugcuucgccagcggccagaacaucaccgaggaguucuaccagagcaccugcagcgccgugagcaagggcuaccugagcgcccugagaaccggcugguacaccagcgugaucaccaucgagcugagcaacaucaaggagaacaagugcaacggcaccgacgccaaggugaagcugaucaagcaggagcuggacaaguacaagaacgccgugaccgagcugcagcugcugaugcagagcacccccgccaccggcagcggcagcgccaucugcagcggcguggccgugugcaaggugcugcaccuggagggcgaggugaacaagaucaagagcgcccugcugagcaccaacaaggccguggugagccugagcaacggcgugagcgugcugaccuucaaggugcuggaccugaagaacuacaucgacaagcagcugcugcccauccugaacaagcagagcugcagcaucagcaacaucgagaccgugaucgaguuccagcagaagaacaacagacugcuggagaucaccagagaguucagcgugaacgccggcgugaccacccccgugagcaccuacaugcugaccaacagcgagcugcugagccugaucaacgacaugcccaucaccaacgaccagaagaagcugaugagcaacaacgugcagaucgugagacagcagagcuacagcaucaugugcaucaucaaggaggaggugcuggccuacguggugcagcugccccuguacggcgugaucgacacccccugcuggaagcugcacaccagcccccugugcaccaccaacaccaaggagggcagcaacaucugccugaccagaaccgacagaggcugguacugcgacaacgccggcagcgugagcuucuucccccaggccgagaccugcaaggugcagagcaacagaguguucugcgacaccaugaacagcagaacccugcccagcgaggugaaccugugcaacguggacaucuucaaccccaaguacgacugcaagaucaugaccagcaagaccgacgugagcagcagcgugaucaccagccugggcgccaucgugagcugcuacggcaagaccaagugcaccgccagcaacaagaacagaggcaucaucaagaccuucagcaacggcugcgacuacgugagcaacaagggcguggacaccgugagcgugggcaacacccuguacugcgugaacaagcaggagggcaagagccuguacgugaagggcgagcccaucaucaacuucuacgacccccugguguuccccagcgacgaguucgacgccagcaucagccaggugaacgagaagaucaaccagagccuggccuucaucagaaagagcgacgagcugcugcacaacgugaacgccggcaagagcaccaccaacaucaugaucaccaccaucaucaucgugaucaucgugauccugcugagccugaucgccgugggccugcugcuguacugcaaggccagaugaggacuaguggaagcauuuuccuggcugauuaaaagaaauuacucagcuauggucaucuguuccuguuagaaggcuaugcagcauauuauauacuaugcgcauguuaugaaaugcauaauaaaaaauuuuaaaaaaucuaaaagaucuaaaaaaaaaaaaaaaaaaaaaaaaaaaaaaaaaaaaaaaaaaaaaaaaaaaaaaaaaaaaaaaaugcaucccccccccccccccccccccccccccccccaaaggcucuuuucagagccaccagaauu

SEQ ID NO: 5059 - RNA, 1943 nt, Artificial Sequence
  mRNA product Design c-2 comprising derived and/or modified sequence from HRSV(A2)__F-del_DSCav1_mut4 (opt5)
gggagacuccugucgggcggaaguaggaggaguagaguuuaaaaacaguacucuuuuuccgguucgggacguaguugaagcaacgacaagccggauaaccgcucuugagacaggaagcuuaccauggagcugcucauccugaaggccaacgcuauuaccacaauccuuacggccgugaccuucugcuuugcgagcggccagaauauuacagaagaguucuaccaauccaccuguucugcugucagcaaaggguaucuguccgcccucagaacaggaugguacaccucuguuaucacaauugaacugagcaacaucaaggagaauaaaugcaacggcaccgacgccaaggugaaacuuaucaagcaggaacuggauaaguauaaaaaugcugugacggagcuccagcugcugaugcaguccacccccgccacagggucuggaagcgcuauuuguuccggcgucgccgugugcaagguucuccaccuggagggggaagugaacaaaaucaagagcgcgcuucugucuaccaauaaagccgucgugucccucagcaacggaguuucugugcugacauuuaagguccuugaccugaagaauuacauugauaaacaacuccugccuauccugaacaagcaguccuguagcauuucuaauaucgagaccgugauugaguuccagcagaaaaacaaucggcuccuggaaaucacgcgcgaguuuuccgugaacgcuggcgucacaaccccgguuagcacauauaugcuuaccaauuccgaacugcucucucugaucaacgacaugcccauuaccaacgaucaaaagaaacuuaugagcaauaacgugcagaucgugagacagcaguccuacagcauuaugugcaucauuaaggaggaaguccuggccuaugugguucaacucccucuguacggcgugaucgacacacccuguuggaaacugcauacgucuccucucugcaccacaaauaccaaggagggguccaacaucugucugacacggaccgaucgcggaugguacugcgacaaugcuggcagcgucucuuucuuuccccaggccgaaacguguaaggugcagagcaacagaguuuucugcgauacaaugaacuccagaacccugccuucugaggugaaucucugcaaugucgacauuuuuaacccgaaauaugauuguaagaucaugaccagcaaaacagacguguccagcucugucauuaccucccugggggcgaucgugagcugcuacggaaagacaaaauguacggccucuaauaagaaccggggcauuaucaagaccuucuccaaugggugcgauuauguuagcaacaaaggaguggacacagucuccgugggcaauacccuuuacuguguuaacaagcaagagggcaaaucucuguaugugaagggggaacccaucauuaacuuuuacgacccucucgucuuccccagcgaugaguuugacgcuuccaucucucaggugaaugagaaaauuaaccagagccuggccuucauccgcaaguccgaugaacugcuccacaaugugaacgcuggaaagagcacaaccaauauuaugaucacgaccauuaucaucguuauuaucgucauucugcuuucucugaucgccgugggccuccugcuguauugcaaagccagaugaggacuaguggaagcauuuuccuggcugauuaaaagaaauuacucagcuauggucaucuguuccuguuagaaggcuaugcagcauauuauauacuaugcgcauguuaugaaaugcauaauaaaaaauuuuaaaaaaucuaaaagaucuaaaaaaaaaaaaaaaaaaaaaaaaaaaaaaaaaaaaaaaaaaaaaaaaaaaaaaaaaaaaaaaaugcaucccccccccccccccccccccccccccccccaaaggcucuuuucagagccaccagaauu

SEQ ID NO: 5060 - RNA, 1943 nt, Artificial Sequence
  mRNA product Design c-2 comprising derived and/or modified sequence from HRSV(A2)__F-del_DSCav1_mut4 (opt6)
gggagacuccugucgggcggaaguaggaggaguagaguuuaaaaacaguacucuuuuuccgguucgggacguaguugaagcaacgacaagccggauaaccgcucuugagacaggaagcuuaccauggaacuuuuaauacuaaaagcuaacgccauaaccacuauacuaacagcagucacauucugcuucgcaucaggccaaaacauaaccgaagaauuuuaccaauccacuuguucagcagucuccaaaggauauuuauccgcacuucguacaggaugguauacaucaguaauaacaauagaacucuccaacauaaaagaaaauaaaugcaacggcaccgacgcaaaaguaaaacucaucaaacaagaauuagacaaauacaagaacgccguaacagaacuacaauuacuaaugcaaucaacacccgccacaggaucaggaucugcaauaugcucuggaguagcaguaugcaaaguauuacaccuagaaggagaaguaaacaaaaucaaaagcgcacuacuauccacaaacaaagcuguaguaucacuaucaaacggaguaucaguauuaacuuucaaaguacuugaucuaaaaaacuacauagacaaacaacuacuacccauauuaaacaaacaaucaugcucaauaagcaauauagaaacaguaauagaauuucaacaaaaaaacaacagacuacuagaaaucacaagggaauuuucaguaaaugccgguguuacaaccccaguaucaacauacaugcuaacuaacucagaacuacuauccuuaauaaacgauaugccaauaacaaacgaucaaaaaaaacuaauguccaacaacguacaaauaguaagacaacaaucauacucaaucaugugcauuauaaaagaagaagucuuagcauacguaguacaauuaccacuauacgguguaauagauacaccauguuggaaauuacacacaagcccacuaugcacaacuaacacaaaagaaggcucaaauauauguuuaacaagaacagaccgagguugguacugcgacaaugcaggaucaguaucauucuuuccacaagcagaaacauguaaaguucaauccaacagaguauucugcgacacaaugaacuccagaacacuaccuucagaaguaaaccucuguaacguagacauauuuaaucccaaguacgacugcaaaauaaugacaucgaaaacagacguaagcuccucagugauaacaucccucggcgccaucguauccuguuacgguaaaacuaaauguaccgccucaaacaaaaaccgcgguauuauaaaaacuuuuucuaauggcugcgauuacguaagcaacaaaggcgucgacacaguuuccguaggaaacacacuauacugcguaaacaaacaagaagguaaaucucuauacguaaaaggagaaccaauaauaaauuucuaugauccuuuaguauucccauccgaugaauuugacgccucuaucucacaagucaacgaaaaaauaaaucaaucauuagcauucauacgaaaaucagacgaacuacuacacaacguaaacgcaggaaaaucaacaaccaacauaaugauaaccacaauaauaauaguuauuauagugauacuauuauccuuaauugcagucggacuauuauuauacuguaaagcacgcuaaggacuaguggaagcauuuuccuggcugauuaaaagaaauuacucagcuauggucaucuguuccuguuagaaggcuaugcagcauauuauauacuaugcgcauguuaugaaaugcauaauaaaaaauuuuaaaaaaucuaaaagaucuaaaaaaaaaaaaaaaaaaaaaaaaaaaaaaaaaaaaaaaaaaaaaaaaaaaaaaaaaaaaaaaaugcaucccccccccccccccccccccccccccccccaaaggcucuuuucagagccaccagaauu

SEQ ID NO: 5061 - RNA, 1943 nt, Artificial Sequence
  mRNA product Design c-2 comprising derived and/or modified sequence from HRSV(A2)__F-del_DSCav1_mut4 (opt11)
gggagacuccugucgggcggaaguaggaggaguagaguuuaaaaacaguacucuuuuuccgguucgggacguaguugaagcaacgacaagccggauaaccgcucuugagacaggaagcuuaccauggaacuccucauccucaaagccaaugccaucaccacaauccugacagcaguaaccuucugcuucgcauccggacaaaacaucaccgaagaauuuuaccagucaaccugcuccgcugucucaaaaggcuaccucucagcccuucgcaccggcugguacaccucggucauaacaauagaacucuccaauaucaaagaaaacaaaugcaacggcacugacgccaagguaaaacucaucaaacaggaacucgauaaauacaagaacgccguaacagaacuacaacuacucaugcaaucaacaccggccaccggcuccgguuccgccauaugcuccggaguggccgugugcaagguccuccaccuugaaggggaaguuaacaaaaucaaaucagcccuccucuccacuaacaaagccguaguaucccuaagcaacgguguauccguccucaccuucaaaguacuagaccuaaagaauuauaucgacaaacaacuccuccccauacucaacaaacaauccugcuccauaagcaacaucgaaacagucaucgaguuccagcagaaaaacaaccgacuccucgaaauaacccgcgaguucucagucaacgccggagucaccacacccgucagcaccuacaugcugaccaacuccgaacuccucuccuuaaucaaugacaugcccaucaccaaugaccaaaagaaacucaugucaaacaacguccaaauaguacgccaacaauccuacuccaucaugugcaucauaaaagaagaaguacucgccuacgucguccaacucccccucuacggcguaaucgacacccccugcuggaaacuacacacaagcccccucugcaccacaaacacuaaagagggcuccaacaucugucuaacccgcaccgaucgaggcugguacugcgacaacgccggaucugucucauucuucccccaagccgaaaccugcaaaguccaauccaaccgcgucuucugcgacaccaugaacucgagaacccucccuuccgaagucaaccuaugcaacgucgacauuuucaaccccaaauacgacugcaaaaucaugaccucgaaaaccgacguaucauccagcgucaucaccagccuaggcgcaaucgugagcugcuacggcaaaaccaaaugcaccgcgagcaauaaaaaccgcgggaucaucaaaacuuucuccaacggcugcgacuacgucuccaacaagggagucgauaccgucuccguaggcaacacccucuacugcgucaacaaacaagaaggcaaaucacuauacguaaaaggcgagccaaucauaaacuucuacgacccucuaguuuucccauccgacgaguucgacgcuagcaucucccaagucaacgagaaaaucaaccaaucccucgcauucauccgcaaauccgacgaacuccuccacaacguaaacgcaggcaaaucaacuacuaauauaaugaucacaaccaucauaauagucauaaucguaauccuccuaucccucaucgccgucggacuacugcucuacugcaaagcccgcuaaggacuaguggaagcauuuuccuggcugauuaaaagaaauuacucagcuauggucaucuguuccuguuagaaggcuaugcagcauauuauauacuaugcgcauguuaugaaaugcauaauaaaaaauuuuaaaaaaucuaaaagaucuaaaaaaaaaaaaaaaaaaaaaaaaaaaaaaaaaaaaaaaaaaaaaaaaaaaaaaaaaaaaaaaaugcaucccccccccccccccccccccccccccccccaaaggcucuuuucagagccaccagaauu

SEQ ID NO: 5062 - RNA, 1920 nt, Artificial Sequence
  mRNA product Design c-3 comprising derived and/or modified sequence from HRSV(A2)__F-del_DSCav1_mut4 (opt1)
gggagaguccgcucagccagguugcagaagcggcuuagcguguguccuaaucuucucucugcguguagguaggccugugccgcaaacaagcuuaccauggagcugcucauccugaaggccaacgccaucaccaccauccugacggcggugaccuucugcuucgccagcggccagaacaucaccgaggaguucuaccaguccacgugcagcgccgucuccaagggguaccucagcgcccugcggaccggcugguacaccuccgugaucaccaucgagcugagcaacaucaaggagaacaagugcaacgggaccgacgccaaggugaagcucaucaagcaggagcuggacaaguacaagaacgcggucacggagcugcagcuccugaugcaguccaccccggcaaccggcuccggcuccgccaucugcagcggcgucgccgugugcaaggugcugcaccucgagggggaggucaacaagaucaagagcgcccugcuguccaccaacaaggccguggugagccucuccaacggcgucagcgugcugaccuucaaggugcuggaccucaagaacuacaucgacaagcagcugcugcccauccugaacaagcagagcugcuccaucagcaacaucgagacggugaucgaguuccagcagaagaacaaccggcuccuggagaucacccgcgaguucagcgugaacgccggggucaccacccccguguccacguacaugcugaccaacagcgagcuccugucccugaucaacgacaugccgaucaccaacgaccagaagaagcucaugagcaacaacgugcagaucguccggcagcaguccuacagcaucaugugcaucaucaaggaggaggugcuggcguacgugguccagcugccccucuacggcgugaucgacacccccugcuggaagcugcacacgagcccccugugcaccaccaacaccaaggagggguccaacaucugccucacgcgcaccgaccggggcugguacugcgacaacgccggcagcgucuccuucuucccgcaggccgagaccugcaaggugcagagcaaccgcguguucugcgacaccaugaacucccggacgcugcccagcgagguaaaccucugcaacgucgacaucuucaaccccaaguacgacugcaagaucaugaccuccaagaccgacgugagcuccagcgugaucaccucccugggggccaucgucagcugcuacggcaagacgaagugcaccgccagcaacaagaaccgggggaucaucaagaccuucuccaacggcugcgacuacgugagcaacaagggcguggacaccguguccgucgggaacacccuguacugcgugaacaagcaggagggcaagagccucuacgugaagggggagcccaucaucaacuucuacgacccgcuggucuuccccuccgacgaguucgacgcgagcaucucccaggugaacgagaagaucaaccagagccuggccuucauccgcaaguccgacgagcugcuccacaacgugaacgccggcaagagcacgaccaacaucaugaucaccaccaucaucaucgucaucaucgugauccugcugucccucaucgccguggggcugcugcucuacugcaaggcccggugaggacuaguacuggcugcaucucccuuuccucuguccuccauccuucucccaggauggugaagggggaccugguacccagugauccccaccccaggauccuaaaucaugacuuaccugcuaauaaaaacucauuggaaaagugagaagaucuaaaaaaaaaaaaaaaaaaaaaaaaaaaaaaaaaaaaaaaaaaaaaaaaaaaaaaaaaaaaaaaaugcaucccccccccccccccccccccccccccccccaaaggcucuuuucagagccaccagaauu

SEQ ID NO: 5063 - RNA, 1920 nt, Artificial Sequence
  mRNA product Design c-3 comprising derived and/or modified sequence from HRSV(A2)__F-del_DSCav1_mut4 (opt1)
gggagaguccgcucagccagguugcagaagcggcuuagcguguguccuaaucuucucucugcguguagguaggccugugccgcaaacaagcuuaccauggagcugcucauccugaaggccaacgccaucaccaccauccugacggcggugaccuucugcuucgccagcggccagaacaucaccgaggaguucuaccaguccacgugcagcgccgucuccaagggguaccucagcgcccugcgcaccggcugguacaccuccgugaucaccaucgagcugagcaacaucaaggagaacaagugcaacgggaccgacgccaaggugaagcucaucaagcaggagcuggacaaguacaagaacgcggucacggagcugcagcuccugaugcaguccacccccgccaccggcagcggguccgccaucugcagcggcguggccgugugcaagguccugcaccucgagggcgaggugaacaagaucaaguccgcgcugcugagcaccaacaaggccguggucucccucagcaacgggguguccgugcugacguucaagguccuggaccucaagaacuacaucgacaagcagcugcugccgauccucaacaagcagagcugcuccaucagcaacaucgagaccgugaucgaguuccagcagaagaacaaccggcugcuggagaucacccgcgaguucuccgugaacgccggcgucaccacgcccgugagcaccuacaugcucaccaacagcgagcugcugucccucaucaacgacaugcccaucaccaacgaccagaagaagcugaugagcaacaacgugcagaucguccggcagcaguccuacagcaucaugugcaucaucaaggaggaggugcuggccuacgugguccagcucccccuguacggggugaucgacacgccgugcuggaagcugcacaccagcccccucugcaccaccaacacgaaggagggcuccaacaucugccugacccgcaccgaccgggggugguacugcgacaacgccggcuccgugagcuucuucccccaggcggagaccugcaagguccaguccaaccgcguguucugcgacacgaugaacagccggacccuccccuccgaggucaaccugugcaacguggacaucuucaacccgaaguacgacugcaagaucaugaccagcaagaccgacguguccagcuccgucaucacgagccugggcgccaucguguccugcuacgggaagaccaagugcaccgccagcaacaagaaccggggcaucaucaagaccuucuccaacgggugcgacuacgugagcaacaagggcgucgacacggugagcgugggcaacacccucuacugcgucaacaagcaggaggggaagucccuguacgugaagggcgagcccaucaucaacuucuacgacccccugguguuccccagcgacgaguucgacgccuccaucagccaggucaacgagaagaucaaccagucccucgccuucauccgcaagagcgacgagcugcugcacaacgugaacgcggggaaguccaccaccaacaucaugaucaccacgaucaucaucgugaucaucgucauccuccugagccugaucgccgugggccuccugcuguacugcaaggcccggugaggacuaguacuggcugcaucucccuuuccucuguccuccauccuucucccaggauggugaagggggaccugguacccagugauccccaccccaggauccuaaaucaugacuuaccugcuaauaaaaacucauuggaaaagugagaagaucuaaaaaaaaaaaaaaaaaaaaaaaaaaaaaaaaaaaaaaaaaaaaaaaaaaaaaaaaaaaaaaaaugcaucccccccccccccccccccccccccccccccaaaggcucuuuucagagccaccagaauu

SEQ ID NO: 5064 - RNA, 1920 nt, Artificial Sequence
  mRNA product Design c-3 comprising derived and/or modified sequence from HRSV(A2)__F-del_DSCav1_mut4 (opt2)
gggagaguccgcucagccagguugcagaagcggcuuagcguguguccuaaucuucucucugcguguagguaggccugugccgcaaacaagcuuaccauggagcuccucauccucaaggccaacgccaucaccaccauccucaccgccgucaccuucugcuucgccuccggccagaacaucaccgaggaguucuaccaguccaccugcuccgccgucuccaagggcuaccucuccgcccuccgcaccggcugguacaccuccgucaucaccaucgagcucuccaacaucaaggagaacaagugcaacggcaccgacgccaaggucaagcucaucaagcaggagcucgacaaguacaagaacgccgucaccgagcuccagcuccucaugcaguccacccccgccaccggcuccggcuccgccaucugcuccggcgucgccgucugcaagguccuccaccucgagggcgaggucaacaagaucaaguccgcccuccucuccaccaacaaggccgucgucucccucuccaacggcgucuccguccucaccuucaagguccucgaccucaagaacuacaucgacaagcagcuccuccccauccucaacaagcaguccugcuccaucuccaacaucgagaccgucaucgaguuccagcagaagaacaaccgccuccucgagaucacccgcgaguucuccgucaacgccggcgucaccacccccgucuccaccuacaugcucaccaacuccgagcuccucucccucaucaacgacaugcccaucaccaacgaccagaagaagcucauguccaacaacguccagaucguccgccagcaguccuacuccaucaugugcaucaucaaggaggagguccucgccuacgucguccagcucccccucuacggcgucaucgacacccccugcuggaagcuccacaccuccccccucugcaccaccaacaccaaggagggcuccaacaucugccucacccgcaccgaccgcggcugguacugcgacaacgccggcuccgucuccuucuucccccaggccgagaccugcaagguccaguccaaccgcgucuucugcgacaccaugaacucccgcacccuccccuccgaggucaaccucugcaacgucgacaucuucaaccccaaguacgacugcaagaucaugaccuccaagaccgacgucuccuccuccgucaucaccucccucggcgccaucgucuccugcuacggcaagaccaagugcaccgccuccaacaagaaccgcggcaucaucaagaccuucuccaacggcugcgacuacgucuccaacaagggcgucgacaccgucuccgucggcaacacccucuacugcgucaacaagcaggagggcaagucccucuacgucaagggcgagcccaucaucaacuucuacgacccccucgucuuccccuccgacgaguucgacgccuccaucucccaggucaacgagaagaucaaccagucccucgccuucauccgcaaguccgacgagcuccuccacaacgucaacgccggcaaguccaccaccaacaucaugaucaccaccaucaucaucgucaucaucgucauccuccucucccucaucgccgucggccuccuccucuacugcaaggcccgcugaggacuaguacuggcugcaucucccuuuccucuguccuccauccuucucccaggauggugaagggggaccugguacccagugauccccaccccaggauccuaaaucaugacuuaccugcuaauaaaaacucauuggaaaagugagaagaucuaaaaaaaaaaaaaaaaaaaaaaaaaaaaaaaaaaaaaaaaaaaaaaaaaaaaaaaaaaaaaaaaugcaucccccccccccccccccccccccccccccccaaaggcucuuuucagagccaccagaauu

SEQ ID NO: 5065 - RNA, 1920 nt, Artificial Sequence
  mRNA product Design c-3 comprising derived and/or modified sequence from HRSV(A2)__F-del_DSCav1_mut4 (opt3)
gggagaguccgcucagccagguugcagaagcggcuuagcguguguccuaaucuucucucugcguguagguaggccugugccgcaaacaagcuuaccauggagcugcucauccuuaaggccaacgcuauuaccacaauacugacugcagugacguucugcuuugccagcggccagaauaucaccgaagaguucuaccaauccacauguucugcggucucaaaaggguauuugagugcuuuaagaacuggaugguacaccagcguuauuacaaucgaacuguccaacauuaaggagaauaaaugcaacgguaccgacgccaaggugaaacuaaucaagcaggaacucgauaaguauaaaaaugcaguaacugagcugcagcuucugaugcagucuacacccgccaccggcucggggucagcuauauguagcggaguggcagucugcaagguguugcaccucgagggcgaaguuaacaaaaucaagagugcccugcuguccacgaauaaagcuguggucucucucagcaacgguguguccguauuaacuuuuaagguucuggaccuuaagaauuacauugauaaacaauugcugccuauccuaaacaagcagucauguaguauuagcaauaucgagaccgugauagaguuccagcagaaaaacaauaggcuccuggaaauuacacgggaguuuucugucaacgccggggugacuaccccaguguccacauauaugcuuaccaauucagaacuguugagccucaucaacgacaugccgauuacgaacgaucaaaagaaacugaugaguaauaacguccagaucguucgccagcagucuuacuccaucaugugcauuauaaaggaggaaguguuagcguauguagugcaacugccccucuacggagucaucgacacuccuuguuggaaacuucauacaagcccacugugcaccacuaauacaaaggagggcucgaacauuuguuugacccgaacggaucguggcugguacugcgacaaugcagggucuguguccuucuuuccccaggccgaaaccuguaagguucagucaaacagaguguucugcgauacaaugaauaguagaacucugccuagcgaggucaaccucugcaauguggacaucuuuaacccaaaauaugauuguaagauaaugaccuccaaaacagacguaucuagcucaguuauuaccagucugggagcuaucguguccugcuacgguaagacuaaauguacagccagcaauaagaacaggggcaucauuaagaccuucucuaaugggugcgauuaugucucaaacaaaggaguggacacugucagugugggcaauacgcuuuacuguguuaacaagcaagaggguaaaagccuguaugugaagggggaacccaucauuaacuuuuacgacccuuugguauucccauccgaugaguuugacgcaucuauaucgcaggucaaugagaaaaucaaccagagccucgcuuucauucggaaguccgaugaacuguuacacaaugugaacgccggaaagucaacaaccaauaucaugaucacuaccauuauaaucguuauuaucgugauucugcuaagucucaucgcggucggccugcuuuuguauugcaaagcccgcugaggacuaguacuggcugcaucucccuuuccucuguccuccauccuucucccaggauggugaagggggaccugguacccagugauccccaccccaggauccuaaaucaugacuuaccugcuaauaaaaacucauuggaaaagugagaagaucuaaaaaaaaaaaaaaaaaaaaaaaaaaaaaaaaaaaaaaaaaaaaaaaaaaaaaaaaaaaaaaaaugcaucccccccccccccccccccccccccccccccaaaggcucuuuucagagccaccagaauu

SEQ ID NO: 5066 - RNA, 1920 nt, Artificial Sequence
  mRNA product Design c-3 comprising derived and/or modified sequence from HRSV(A2)__F-del_DSCav1_mut4 (opt4)
gggagaguccgcucagccagguugcagaagcggcuuagcguguguccuaaucuucucucugcguguagguaggccugugccgcaaacaagcuuaccauggagcugcugauccugaaggccaacgccaucaccaccauccugaccgccgugaccuucugcuucgccagcggccagaacaucaccgaggaguucuaccagagcaccugcagcgccgugagcaagggcuaccugagcgcccugagaaccggcugguacaccagcgugaucaccaucgagcugagcaacaucaaggagaacaagugcaacggcaccgacgccaaggugaagcugaucaagcaggagcuggacaaguacaagaacgccgugaccgagcugcagcugcugaugcagagcacccccgccaccggcagcggcagcgccaucugcagcggcguggccgugugcaaggugcugcaccuggagggcgaggugaacaagaucaagagcgcccugcugagcaccaacaaggccguggugagccugagcaacggcgugagcgugcugaccuucaaggugcuggaccugaagaacuacaucgacaagcagcugcugcccauccugaacaagcagagcugcagcaucagcaacaucgagaccgugaucgaguuccagcagaagaacaacagacugcuggagaucaccagagaguucagcgugaacgccggcgugaccacccccgugagcaccuacaugcugaccaacagcgagcugcugagccugaucaacgacaugcccaucaccaacgaccagaagaagcugaugagcaacaacgugcagaucgugagacagcagagcuacagcaucaugugcaucaucaaggaggaggugcuggccuacguggugcagcugccccuguacggcgugaucgacacccccugcuggaagcugcacaccagcccccugugcaccaccaacaccaaggagggcagcaacaucugccugaccagaaccgacagaggcugguacugcgacaacgccggcagcgugagcuucuucccccaggccgagaccugcaaggugcagagcaacagaguguucugcgacaccaugaacagcagaacccugcccagcgaggugaaccugugcaacguggacaucuucaaccccaaguacgacugcaagaucaugaccagcaagaccgacgugagcagcagcgugaucaccagccugggcgccaucgugagcugcuacggcaagaccaagugcaccgccagcaacaagaacagaggcaucaucaagaccuucagcaacggcugcgacuacgugagcaacaagggcguggacaccgugagcgugggcaacacccuguacugcgugaacaagcaggagggcaagagccuguacgugaagggcgagcccaucaucaacuucuacgacccccugguguuccccagcgacgaguucgacgccagcaucagccaggugaacgagaagaucaaccagagccuggccuucaucagaaagagcgacgagcugcugcacaacgugaacgccggcaagagcaccaccaacaucaugaucaccaccaucaucaucgugaucaucgugauccugcugagccugaucgccgugggccugcugcuguacugcaaggccagaugaggacuaguacuggcugcaucucccuuuccucuguccuccauccuucucccaggauggugaagggggaccugguacccagugauccccaccccaggauccuaaaucaugacuuaccugcuaauaaaaacucauuggaaaagugagaagaucuaaaaaaaaaaaaaaaaaaaaaaaaaaaaaaaaaaaaaaaaaaaaaaaaaaaaaaaaaaaaaaaaugcaucccccccccccccccccccccccccccccccaaaggcucuuuucagagccaccagaauu

SEQ ID NO: 5067 - RNA, 1920 nt, Artificial Sequence
  mRNA product Design c-3 comprising derived and/or modified sequence from HRSV(A2)__F-del_DSCav1_mut4 (opt5)
gggagaguccgcucagccagguugcagaagcggcuuagcguguguccuaaucuucucucugcguguagguaggccugugccgcaaacaagcuuaccauggagcugcucauccugaaggccaacgcuauuaccacaauccuuacggccgugaccuucugcuuugcgagcggccagaauauuacagaagaguucuaccaauccaccuguucugcugucagcaaaggguaucuguccgcccucagaacaggaugguacaccucuguuaucacaauugaacugagcaacaucaaggagaauaaaugcaacggcaccgacgccaaggugaaacuuaucaagcaggaacuggauaaguauaaaaaugcugugacggagcuccagcugcugaugcaguccacccccgccacagggucuggaagcgcuauuuguuccggcgucgccgugugcaagguucuccaccuggagggggaagugaacaaaaucaagagcgcgcuucugucuaccaauaaagccgucgugucccucagcaacggaguuucugugcugacauuuaagguccuugaccugaagaauuacauugauaaacaacuccugccuauccugaacaagcaguccuguagcauuucuaauaucgagaccgugauugaguuccagcagaaaaacaaucggcuccuggaaaucacgcgcgaguuuuccgugaacgcuggcgucacaaccccgguuagcacauauaugcuuaccaauuccgaacugcucucucugaucaacgacaugcccauuaccaacgaucaaaagaaacuuaugagcaauaacgugcagaucgugagacagcaguccuacagcauuaugugcaucauuaaggaggaaguccuggccuaugugguucaacucccucuguacggcgugaucgacacacccuguuggaaacugcauacgucuccucucugcaccacaaauaccaaggagggguccaacaucugucugacacggaccgaucgcggaugguacugcgacaaugcuggcagcgucucuuucuuuccccaggccgaaacguguaaggugcagagcaacagaguuuucugcgauacaaugaacuccagaacccugccuucugaggugaaucucugcaaugucgacauuuuuaacccgaaauaugauuguaagaucaugaccagcaaaacagacguguccagcucugucauuaccucccugggggcgaucgugagcugcuacggaaagacaaaauguacggccucuaauaagaaccggggcauuaucaagaccuucuccaaugggugcgauuauguuagcaacaaaggaguggacacagucuccgugggcaauacccuuuacuguguuaacaagcaagagggcaaaucucuguaugugaagggggaacccaucauuaacuuuuacgacccucucgucuuccccagcgaugaguuugacgcuuccaucucucaggugaaugagaaaauuaaccagagccuggccuucauccgcaaguccgaugaacugcuccacaaugugaacgcuggaaagagcacaaccaauauuaugaucacgaccauuaucaucguuauuaucgucauucugcuuucucugaucgccgugggccuccugcuguauugcaaagccagaugaggacuaguacuggcugcaucucccuuuccucuguccuccauccuucucccaggauggugaagggggaccugguacccagugauccccaccccaggauccuaaaucaugacuuaccugcuaauaaaaacucauuggaaaagugagaagaucuaaaaaaaaaaaaaaaaaaaaaaaaaaaaaaaaaaaaaaaaaaaaaaaaaaaaaaaaaaaaaaaaugcaucccccccccccccccccccccccccccccccaaaggcucuuuucagagccaccagaauu

SEQ ID NO: 5068 - RNA, 1920 nt, Artificial Sequence
  mRNA product Design c-3 comprising derived and/or modified sequence from HRSV(A2)__F-del_DSCav1_mut4 (opt6)
gggagaguccgcucagccagguugcagaagcggcuuagcguguguccuaaucuucucucugcguguagguaggccugugccgcaaacaagcuuaccauggaacuuuuaauacuaaaagcuaacgccauaaccacuauacuaacagcagucacauucugcuucgcaucaggccaaaacauaaccgaagaauuuuaccaauccacuuguucagcagucuccaaaggauauuuauccgcacuucguacaggaugguauacaucaguaauaacaauagaacucuccaacauaaaagaaaauaaaugcaacggcaccgacgcaaaaguaaaacucaucaaacaagaauuagacaaauacaagaacgccguaacagaacuacaauuacuaaugcaaucaacacccgccacaggaucaggaucugcaauaugcucuggaguagcaguaugcaaaguauuacaccuagaaggagaaguaaacaaaaucaaaagcgcacuacuauccacaaacaaagcuguaguaucacuaucaaacggaguaucaguauuaacuuucaaaguacuugaucuaaaaaacuacauagacaaacaacuacuacccauauuaaacaaacaaucaugcucaauaagcaauauagaaacaguaauagaauuucaacaaaaaaacaacagacuacuagaaaucacaagggaauuuucaguaaaugccgguguuacaaccccaguaucaacauacaugcuaacuaacucagaacuacuauccuuaauaaacgauaugccaauaacaaacgaucaaaaaaaacuaauguccaacaacguacaaauaguaagacaacaaucauacucaaucaugugcauuauaaaagaagaagucuuagcauacguaguacaauuaccacuauacgguguaauagauacaccauguuggaaauuacacacaagcccacuaugcacaacuaacacaaaagaaggcucaaauauauguuuaacaagaacagaccgagguugguacugcgacaaugcaggaucaguaucauucuuuccacaagcagaaacauguaaaguucaauccaacagaguauucugcgacacaaugaacuccagaacacuaccuucagaaguaaaccucuguaacguagacauauuuaaucccaaguacgacugcaaaauaaugacaucgaaaacagacguaagcuccucagugauaacaucccucggcgccaucguauccuguuacgguaaaacuaaauguaccgccucaaacaaaaaccgcgguauuauaaaaacuuuuucuaauggcugcgauuacguaagcaacaaaggcgucgacacaguuuccguaggaaacacacuauacugcguaaacaaacaagaagguaaaucucuauacguaaaaggagaaccaauaauaaauuucuaugauccuuuaguauucccauccgaugaauuugacgccucuaucucacaagucaacgaaaaaauaaaucaaucauuagcauucauacgaaaaucagacgaacuacuacacaacguaaacgcaggaaaaucaacaaccaacauaaugauaaccacaauaauaauaguuauuauagugauacuauuauccuuaauugcagucggacuauuauuauacuguaaagcacgcuaaggacuaguacuggcugcaucucccuuuccucuguccuccauccuucucccaggauggugaagggggaccugguacccagugauccccaccccaggauccuaaaucaugacuuaccugcuaauaaaaacucauuggaaaagugagaagaucuaaaaaaaaaaaaaaaaaaaaaaaaaaaaaaaaaaaaaaaaaaaaaaaaaaaaaaaaaaaaaaaaugcaucccccccccccccccccccccccccccccccaaaggcucuuuucagagccaccagaauu

SEQ ID NO: 5069 - RNA, 1920 nt, Artificial Sequence
  mRNA product Design c-3 comprising derived and/or modified sequence from HRSV(A2)__F-del_DSCav1_mut4 (opt11)
gggagaguccgcucagccagguugcagaagcggcuuagcguguguccuaaucuucucucugcguguagguaggccugugccgcaaacaagcuuaccauggaacuccucauccucaaagccaaugccaucaccacaauccugacagcaguaaccuucugcuucgcauccggacaaaacaucaccgaagaauuuuaccagucaaccugcuccgcugucucaaaaggcuaccucucagcccuucgcaccggcugguacaccucggucauaacaauagaacucuccaauaucaaagaaaacaaaugcaacggcacugacgccaagguaaaacucaucaaacaggaacucgauaaauacaagaacgccguaacagaacuacaacuacucaugcaaucaacaccggccaccggcuccgguuccgccauaugcuccggaguggccgugugcaagguccuccaccuugaaggggaaguuaacaaaaucaaaucagcccuccucuccacuaacaaagccguaguaucccuaagcaacgguguauccguccucaccuucaaaguacuagaccuaaagaauuauaucgacaaacaacuccuccccauacucaacaaacaauccugcuccauaagcaacaucgaaacagucaucgaguuccagcagaaaaacaaccgacuccucgaaauaacccgcgaguucucagucaacgccggagucaccacacccgucagcaccuacaugcugaccaacuccgaacuccucuccuuaaucaaugacaugcccaucaccaaugaccaaaagaaacucaugucaaacaacguccaaauaguacgccaacaauccuacuccaucaugugcaucauaaaagaagaaguacucgccuacgucguccaacucccccucuacggcguaaucgacacccccugcuggaaacuacacacaagcccccucugcaccacaaacacuaaagagggcuccaacaucugucuaacccgcaccgaucgaggcugguacugcgacaacgccggaucugucucauucuucccccaagccgaaaccugcaaaguccaauccaaccgcgucuucugcgacaccaugaacucgagaacccucccuuccgaagucaaccuaugcaacgucgacauuuucaaccccaaauacgacugcaaaaucaugaccucgaaaaccgacguaucauccagcgucaucaccagccuaggcgcaaucgugagcugcuacggcaaaaccaaaugcaccgcgagcaauaaaaaccgcgggaucaucaaaacuuucuccaacggcugcgacuacgucuccaacaagggagucgauaccgucuccguaggcaacacccucuacugcgucaacaaacaagaaggcaaaucacuauacguaaaaggcgagccaaucauaaacuucuacgacccucuaguuuucccauccgacgaguucgacgcuagcaucucccaagucaacgagaaaaucaaccaaucccucgcauucauccgcaaauccgacgaacuccuccacaacguaaacgcaggcaaaucaacuacuaauauaaugaucacaaccaucauaauagucauaaucguaauccuccuaucccucaucgccgucggacuacugcucuacugcaaagcccgcuaaggacuaguacuggcugcaucucccuuuccucuguccuccauccuucucccaggauggugaagggggaccugguacccagugauccccaccccaggauccuaaaucaugacuuaccugcuaauaaaaacucauuggaaaagugagaagaucuaaaaaaaaaaaaaaaaaaaaaaaaaaaaaaaaaaaaaaaaaaaaaaaaaaaaaaaaaaaaaaaaugcaucccccccccccccccccccccccccccccccaaaggcucuuuucagagccaccagaauu

SEQ ID NO: 5070 - RNA, 1916 nt, Artificial Sequence
  mRNA product Design c-4 comprising derived and/or modified sequence from HRSV(A2)__F-del_DSCav1_mut4 (opt1)
gggagaguccgcucagccagguugcagaagcggcuuagcguguguccuaaucuucucucugcguguagguaggccugugccgcaaacaagcuuaccauggagcugcucauccugaaggccaacgccaucaccaccauccugacggcggugaccuucugcuucgccagcggccagaacaucaccgaggaguucuaccaguccacgugcagcgccgucuccaagggguaccucagcgcccugcggaccggcugguacaccuccgugaucaccaucgagcugagcaacaucaaggagaacaagugcaacgggaccgacgccaaggugaagcucaucaagcaggagcuggacaaguacaagaacgcggucacggagcugcagcuccugaugcaguccaccccggcaaccggcuccggcuccgccaucugcagcggcgucgccgugugcaaggugcugcaccucgagggggaggucaacaagaucaagagcgcccugcuguccaccaacaaggccguggugagccucuccaacggcgucagcgugcugaccuucaaggugcuggaccucaagaacuacaucgacaagcagcugcugcccauccugaacaagcagagcugcuccaucagcaacaucgagacggugaucgaguuccagcagaagaacaaccggcuccuggagaucacccgcgaguucagcgugaacgccggggucaccacccccguguccacguacaugcugaccaacagcgagcuccugucccugaucaacgacaugccgaucaccaacgaccagaagaagcucaugagcaacaacgugcagaucguccggcagcaguccuacagcaucaugugcaucaucaaggaggaggugcuggcguacgugguccagcugccccucuacggcgugaucgacacccccugcuggaagcugcacacgagcccccugugcaccaccaacaccaaggagggguccaacaucugccucacgcgcaccgaccggggcugguacugcgacaacgccggcagcgucuccuucuucccgcaggccgagaccugcaaggugcagagcaaccgcguguucugcgacaccaugaacucccggacgcugcccagcgagguaaaccucugcaacgucgacaucuucaaccccaaguacgacugcaagaucaugaccuccaagaccgacgugagcuccagcgugaucaccucccugggggccaucgucagcugcuacggcaagacgaagugcaccgccagcaacaagaaccgggggaucaucaagaccuucuccaacggcugcgacuacgugagcaacaagggcguggacaccguguccgucgggaacacccuguacugcgugaacaagcaggagggcaagagccucuacgugaagggggagcccaucaucaacuucuacgacccgcuggucuuccccuccgacgaguucgacgcgagcaucucccaggugaacgagaagaucaaccagagccuggccuucauccgcaaguccgacgagcugcuccacaacgugaacgccggcaagagcacgaccaacaucaugaucaccaccaucaucaucgucaucaucgugauccugcugucccucaucgccguggggcugcugcucuacugcaaggcccggugaggacuaguggaagcauuuuccuggcugauuaaaagaaauuacucagcuauggucaucuguuccuguuagaaggcuaugcagcauauuauauacuaugcgcauguuaugaaaugcauaauaaaaaauuuuaaaaaaucuaaaagaucuaaaaaaaaaaaaaaaaaaaaaaaaaaaaaaaaaaaaaaaaaaaaaaaaaaaaaaaaaaaaaaaaugcaucccccccccccccccccccccccccccccccaaaggcucuuuucagagccaccagaauu

SEQ ID NO: 5071 - RNA, 1916 nt, Artificial Sequence
  mRNA product Design c-4 comprising derived and/or modified sequence from HRSV(A2)__F-del_DSCav1_mut4 (opt1)
gggagaguccgcucagccagguugcagaagcggcuuagcguguguccuaaucuucucucugcguguagguaggccugugccgcaaacaagcuuaccauggagcugcucauccugaaggccaacgccaucaccaccauccugacggcggugaccuucugcuucgccagcggccagaacaucaccgaggaguucuaccaguccacgugcagcgccgucuccaagggguaccucagcgcccugcgcaccggcugguacaccuccgugaucaccaucgagcugagcaacaucaaggagaacaagugcaacgggaccgacgccaaggugaagcucaucaagcaggagcuggacaaguacaagaacgcggucacggagcugcagcuccugaugcaguccacccccgccaccggcagcggguccgccaucugcagcggcguggccgugugcaagguccugcaccucgagggcgaggugaacaagaucaaguccgcgcugcugagcaccaacaaggccguggucucccucagcaacgggguguccgugcugacguucaagguccuggaccucaagaacuacaucgacaagcagcugcugccgauccucaacaagcagagcugcuccaucagcaacaucgagaccgugaucgaguuccagcagaagaacaaccggcugcuggagaucacccgcgaguucuccgugaacgccggcgucaccacgcccgugagcaccuacaugcucaccaacagcgagcugcugucccucaucaacgacaugcccaucaccaacgaccagaagaagcugaugagcaacaacgugcagaucguccggcagcaguccuacagcaucaugugcaucaucaaggaggaggugcuggccuacgugguccagcucccccuguacggggugaucgacacgccgugcuggaagcugcacaccagcccccucugcaccaccaacacgaaggagggcuccaacaucugccugacccgcaccgaccgggggugguacugcgacaacgccggcuccgugagcuucuucccccaggcggagaccugcaagguccaguccaaccgcguguucugcgacacgaugaacagccggacccuccccuccgaggucaaccugugcaacguggacaucuucaacccgaaguacgacugcaagaucaugaccagcaagaccgacguguccagcuccgucaucacgagccugggcgccaucguguccugcuacgggaagaccaagugcaccgccagcaacaagaaccggggcaucaucaagaccuucuccaacgggugcgacuacgugagcaacaagggcgucgacacggugagcgugggcaacacccucuacugcgucaacaagcaggaggggaagucccuguacgugaagggcgagcccaucaucaacuucuacgacccccugguguuccccagcgacgaguucgacgccuccaucagccaggucaacgagaagaucaaccagucccucgccuucauccgcaagagcgacgagcugcugcacaacgugaacgcggggaaguccaccaccaacaucaugaucaccacgaucaucaucgugaucaucgucauccuccugagccugaucgccgugggccuccugcuguacugcaaggcccggugaggacuaguggaagcauuuuccuggcugauuaaaagaaauuacucagcuauggucaucuguuccuguuagaaggcuaugcagcauauuauauacuaugcgcauguuaugaaaugcauaauaaaaaauuuuaaaaaaucuaaaagaucuaaaaaaaaaaaaaaaaaaaaaaaaaaaaaaaaaaaaaaaaaaaaaaaaaaaaaaaaaaaaaaaaugcaucccccccccccccccccccccccccccccccaaaggcucuuuucagagccaccagaauu

SEQ ID NO: 5072 - RNA, 1916 nt, Artificial Sequence
  mRNA product Design c-4 comprising derived and/or modified sequence from HRSV(A2)__F-del_DSCav1_mut4 (opt2)
gggagaguccgcucagccagguugcagaagcggcuuagcguguguccuaaucuucucucugcguguagguaggccugugccgcaaacaagcuuaccauggagcuccucauccucaaggccaacgccaucaccaccauccucaccgccgucaccuucugcuucgccuccggccagaacaucaccgaggaguucuaccaguccaccugcuccgccgucuccaagggcuaccucuccgcccuccgcaccggcugguacaccuccgucaucaccaucgagcucuccaacaucaaggagaacaagugcaacggcaccgacgccaaggucaagcucaucaagcaggagcucgacaaguacaagaacgccgucaccgagcuccagcuccucaugcaguccacccccgccaccggcuccggcuccgccaucugcuccggcgucgccgucugcaagguccuccaccucgagggcgaggucaacaagaucaaguccgcccuccucuccaccaacaaggccgucgucucccucuccaacggcgucuccguccucaccuucaagguccucgaccucaagaacuacaucgacaagcagcuccuccccauccucaacaagcaguccugcuccaucuccaacaucgagaccgucaucgaguuccagcagaagaacaaccgccuccucgagaucacccgcgaguucuccgucaacgccggcgucaccacccccgucuccaccuacaugcucaccaacuccgagcuccucucccucaucaacgacaugcccaucaccaacgaccagaagaagcucauguccaacaacguccagaucguccgccagcaguccuacuccaucaugugcaucaucaaggaggagguccucgccuacgucguccagcucccccucuacggcgucaucgacacccccugcuggaagcuccacaccuccccccucugcaccaccaacaccaaggagggcuccaacaucugccucacccgcaccgaccgcggcugguacugcgacaacgccggcuccgucuccuucuucccccaggccgagaccugcaagguccaguccaaccgcgucuucugcgacaccaugaacucccgcacccuccccuccgaggucaaccucugcaacgucgacaucuucaaccccaaguacgacugcaagaucaugaccuccaagaccgacgucuccuccuccgucaucaccucccucggcgccaucgucuccugcuacggcaagaccaagugcaccgccuccaacaagaaccgcggcaucaucaagaccuucuccaacggcugcgacuacgucuccaacaagggcgucgacaccgucuccgucggcaacacccucuacugcgucaacaagcaggagggcaagucccucuacgucaagggcgagcccaucaucaacuucuacgacccccucgucuuccccuccgacgaguucgacgccuccaucucccaggucaacgagaagaucaaccagucccucgccuucauccgcaaguccgacgagcuccuccacaacgucaacgccggcaaguccaccaccaacaucaugaucaccaccaucaucaucgucaucaucgucauccuccucucccucaucgccgucggccuccuccucuacugcaaggcccgcugaggacuaguggaagcauuuuccuggcugauuaaaagaaauuacucagcuauggucaucuguuccuguuagaaggcuaugcagcauauuauauacuaugcgcauguuaugaaaugcauaauaaaaaauuuuaaaaaaucuaaaagaucuaaaaaaaaaaaaaaaaaaaaaaaaaaaaaaaaaaaaaaaaaaaaaaaaaaaaaaaaaaaaaaaaugcaucccccccccccccccccccccccccccccccaaaggcucuuuucagagccaccagaauu

SEQ ID NO: 5073 - RNA, 1916 nt, Artificial Sequence
  mRNA product Design c-4 comprising derived and/or modified sequence from HRSV(A2)__F-del_DSCav1_mut4 (opt3)
gggagaguccgcucagccagguugcagaagcggcuuagcguguguccuaaucuucucucugcguguagguaggccugugccgcaaacaagcuuaccauggagcugcucauccuuaaggccaacgcuauuaccacaauacugacugcagugacguucugcuuugccagcggccagaauaucaccgaagaguucuaccaauccacauguucugcggucucaaaaggguauuugagugcuuuaagaacuggaugguacaccagcguuauuacaaucgaacuguccaacauuaaggagaauaaaugcaacgguaccgacgccaaggugaaacuaaucaagcaggaacucgauaaguauaaaaaugcaguaacugagcugcagcuucugaugcagucuacacccgccaccggcucggggucagcuauauguagcggaguggcagucugcaagguguugcaccucgagggcgaaguuaacaaaaucaagagugcccugcuguccacgaauaaagcuguggucucucucagcaacgguguguccguauuaacuuuuaagguucuggaccuuaagaauuacauugauaaacaauugcugccuauccuaaacaagcagucauguaguauuagcaauaucgagaccgugauagaguuccagcagaaaaacaauaggcuccuggaaauuacacgggaguuuucugucaacgccggggugacuaccccaguguccacauauaugcuuaccaauucagaacuguugagccucaucaacgacaugccgauuacgaacgaucaaaagaaacugaugaguaauaacguccagaucguucgccagcagucuuacuccaucaugugcauuauaaaggaggaaguguuagcguauguagugcaacugccccucuacggagucaucgacacuccuuguuggaaacuucauacaagcccacugugcaccacuaauacaaaggagggcucgaacauuuguuugacccgaacggaucguggcugguacugcgacaaugcagggucuguguccuucuuuccccaggccgaaaccuguaagguucagucaaacagaguguucugcgauacaaugaauaguagaacucugccuagcgaggucaaccucugcaauguggacaucuuuaacccaaaauaugauuguaagauaaugaccuccaaaacagacguaucuagcucaguuauuaccagucugggagcuaucguguccugcuacgguaagacuaaauguacagccagcaauaagaacaggggcaucauuaagaccuucucuaaugggugcgauuaugucucaaacaaaggaguggacacugucagugugggcaauacgcuuuacuguguuaacaagcaagaggguaaaagccuguaugugaagggggaacccaucauuaacuuuuacgacccuuugguauucccauccgaugaguuugacgcaucuauaucgcaggucaaugagaaaaucaaccagagccucgcuuucauucggaaguccgaugaacuguuacacaaugugaacgccggaaagucaacaaccaauaucaugaucacuaccauuauaaucguuauuaucgugauucugcuaagucucaucgcggucggccugcuuuuguauugcaaagcccgcugaggacuaguggaagcauuuuccuggcugauuaaaagaaauuacucagcuauggucaucuguuccuguuagaaggcuaugcagcauauuauauacuaugcgcauguuaugaaaugcauaauaaaaaauuuuaaaaaaucuaaaagaucuaaaaaaaaaaaaaaaaaaaaaaaaaaaaaaaaaaaaaaaaaaaaaaaaaaaaaaaaaaaaaaaaugcaucccccccccccccccccccccccccccccccaaaggcucuuuucagagccaccagaauu

SEQ ID NO: 5074 - RNA, 1916 nt, Artificial Sequence
  mRNA product Design c-4 comprising derived and/or modified sequence from HRSV(A2)__F-del_DSCav1_mut4 (opt4)
gggagaguccgcucagccagguugcagaagcggcuuagcguguguccuaaucuucucucugcguguagguaggccugugccgcaaacaagcuuaccauggagcugcugauccugaaggccaacgccaucaccaccauccugaccgccgugaccuucugcuucgccagcggccagaacaucaccgaggaguucuaccagagcaccugcagcgccgugagcaagggcuaccugagcgcccugagaaccggcugguacaccagcgugaucaccaucgagcugagcaacaucaaggagaacaagugcaacggcaccgacgccaaggugaagcugaucaagcaggagcuggacaaguacaagaacgccgugaccgagcugcagcugcugaugcagagcacccccgccaccggcagcggcagcgccaucugcagcggcguggccgugugcaaggugcugcaccuggagggcgaggugaacaagaucaagagcgcccugcugagcaccaacaaggccguggugagccugagcaacggcgugagcgugcugaccuucaaggugcuggaccugaagaacuacaucgacaagcagcugcugcccauccugaacaagcagagcugcagcaucagcaacaucgagaccgugaucgaguuccagcagaagaacaacagacugcuggagaucaccagagaguucagcgugaacgccggcgugaccacccccgugagcaccuacaugcugaccaacagcgagcugcugagccugaucaacgacaugcccaucaccaacgaccagaagaagcugaugagcaacaacgugcagaucgugagacagcagagcuacagcaucaugugcaucaucaaggaggaggugcuggccuacguggugcagcugccccuguacggcgugaucgacacccccugcuggaagcugcacaccagcccccugugcaccaccaacaccaaggagggcagcaacaucugccugaccagaaccgacagaggcugguacugcgacaacgccggcagcgugagcuucuucccccaggccgagaccugcaaggugcagagcaacagaguguucugcgacaccaugaacagcagaacccugcccagcgaggugaaccugugcaacguggacaucuucaaccccaaguacgacugcaagaucaugaccagcaagaccgacgugagcagcagcgugaucaccagccugggcgccaucgugagcugcuacggcaagaccaagugcaccgccagcaacaagaacagaggcaucaucaagaccuucagcaacggcugcgacuacgugagcaacaagggcguggacaccgugagcgugggcaacacccuguacugcgugaacaagcaggagggcaagagccuguacgugaagggcgagcccaucaucaacuucuacgacccccugguguuccccagcgacgaguucgacgccagcaucagccaggugaacgagaagaucaaccagagccuggccuucaucagaaagagcgacgagcugcugcacaacgugaacgccggcaagagcaccaccaacaucaugaucaccaccaucaucaucgugaucaucgugauccugcugagccugaucgccgugggccugcugcuguacugcaaggccagaugaggacuaguggaagcauuuuccuggcugauuaaaagaaauuacucagcuauggucaucuguuccuguuagaaggcuaugcagcauauuauauacuaugcgcauguuaugaaaugcauaauaaaaaauuuuaaaaaaucuaaaagaucuaaaaaaaaaaaaaaaaaaaaaaaaaaaaaaaaaaaaaaaaaaaaaaaaaaaaaaaaaaaaaaaaugcaucccccccccccccccccccccccccccccccaaaggcucuuuucagagccaccagaauu

SEQ ID NO: 5075 - RNA, 1916 nt, Artificial Sequence
  mRNA product Design c-4 comprising derived and/or modified sequence from HRSV(A2)__F-del_DSCav1_mut4 (opt5)
gggagaguccgcucagccagguugcagaagcggcuuagcguguguccuaaucuucucucugcguguagguaggccugugccgcaaacaagcuuaccauggagcugcucauccugaaggccaacgcuauuaccacaauccuuacggccgugaccuucugcuuugcgagcggccagaauauuacagaagaguucuaccaauccaccuguucugcugucagcaaaggguaucuguccgcccucagaacaggaugguacaccucuguuaucacaauugaacugagcaacaucaaggagaauaaaugcaacggcaccgacgccaaggugaaacuuaucaagcaggaacuggauaaguauaaaaaugcugugacggagcuccagcugcugaugcaguccacccccgccacagggucuggaagcgcuauuuguuccggcgucgccgugugcaagguucuccaccuggagggggaagugaacaaaaucaagagcgcgcuucugucuaccaauaaagccgucgugucccucagcaacggaguuucugugcugacauuuaagguccuugaccugaagaauuacauugauaaacaacuccugccuauccugaacaagcaguccuguagcauuucuaauaucgagaccgugauugaguuccagcagaaaaacaaucggcuccuggaaaucacgcgcgaguuuuccgugaacgcuggcgucacaaccccgguuagcacauauaugcuuaccaauuccgaacugcucucucugaucaacgacaugcccauuaccaacgaucaaaagaaacuuaugagcaauaacgugcagaucgugagacagcaguccuacagcauuaugugcaucauuaaggaggaaguccuggccuaugugguucaacucccucuguacggcgugaucgacacacccuguuggaaacugcauacgucuccucucugcaccacaaauaccaaggagggguccaacaucugucugacacggaccgaucgcggaugguacugcgacaaugcuggcagcgucucuuucuuuccccaggccgaaacguguaaggugcagagcaacagaguuuucugcgauacaaugaacuccagaacccugccuucugaggugaaucucugcaaugucgacauuuuuaacccgaaauaugauuguaagaucaugaccagcaaaacagacguguccagcucugucauuaccucccugggggcgaucgugagcugcuacggaaagacaaaauguacggccucuaauaagaaccggggcauuaucaagaccuucuccaaugggugcgauuauguuagcaacaaaggaguggacacagucuccgugggcaauacccuuuacuguguuaacaagcaagagggcaaaucucuguaugugaagggggaacccaucauuaacuuuuacgacccucucgucuuccccagcgaugaguuugacgcuuccaucucucaggugaaugagaaaauuaaccagagccuggccuucauccgcaaguccgaugaacugcuccacaaugugaacgcuggaaagagcacaaccaauauuaugaucacgaccauuaucaucguuauuaucgucauucugcuuucucugaucgccgugggccuccugcuguauugcaaagccagaugaggacuaguggaagcauuuuccuggcugauuaaaagaaauuacucagcuauggucaucuguuccuguuagaaggcuaugcagcauauuauauacuaugcgcauguuaugaaaugcauaauaaaaaauuuuaaaaaaucuaaaagaucuaaaaaaaaaaaaaaaaaaaaaaaaaaaaaaaaaaaaaaaaaaaaaaaaaaaaaaaaaaaaaaaaugcaucccccccccccccccccccccccccccccccaaaggcucuuuucagagccaccagaauu

SEQ ID NO: 5076 - RNA, 1916 nt, Artificial Sequence
  mRNA product Design c-4 comprising derived and/or modified sequence from HRSV(A2)__F-del_DSCav1_mut4 (opt6)
gggagaguccgcucagccagguugcagaagcggcuuagcguguguccuaaucuucucucugcguguagguaggccugugccgcaaacaagcuuaccauggaacuuuuaauacuaaaagcuaacgccauaaccacuauacuaacagcagucacauucugcuucgcaucaggccaaaacauaaccgaagaauuuuaccaauccacuuguucagcagucuccaaaggauauuuauccgcacuucguacaggaugguauacaucaguaauaacaauagaacucuccaacauaaaagaaaauaaaugcaacggcaccgacgcaaaaguaaaacucaucaaacaagaauuagacaaauacaagaacgccguaacagaacuacaauuacuaaugcaaucaacacccgccacaggaucaggaucugcaauaugcucuggaguagcaguaugcaaaguauuacaccuagaaggagaaguaaacaaaaucaaaagcgcacuacuauccacaaacaaagcuguaguaucacuaucaaacggaguaucaguauuaacuuucaaaguacuugaucuaaaaaacuacauagacaaacaacuacuacccauauuaaacaaacaaucaugcucaauaagcaauauagaaacaguaauagaauuucaacaaaaaaacaacagacuacuagaaaucacaagggaauuuucaguaaaugccgguguuacaaccccaguaucaacauacaugcuaacuaacucagaacuacuauccuuaauaaacgauaugccaauaacaaacgaucaaaaaaaacuaauguccaacaacguacaaauaguaagacaacaaucauacucaaucaugugcauuauaaaagaagaagucuuagcauacguaguacaauuaccacuauacgguguaauagauacaccauguuggaaauuacacacaagcccacuaugcacaacuaacacaaaagaaggcucaaauauauguuuaacaagaacagaccgagguugguacugcgacaaugcaggaucaguaucauucuuuccacaagcagaaacauguaaaguucaauccaacagaguauucugcgacacaaugaacuccagaacacuaccuucagaaguaaaccucuguaacguagacauauuuaaucccaaguacgacugcaaaauaaugacaucgaaaacagacguaagcuccucagugauaacaucccucggcgccaucguauccuguuacgguaaaacuaaauguaccgccucaaacaaaaaccgcgguauuauaaaaacuuuuucuaauggcugcgauuacguaagcaacaaaggcgucgacacaguuuccguaggaaacacacuauacugcguaaacaaacaagaagguaaaucucuauacguaaaaggagaaccaauaauaaauuucuaugauccuuuaguauucccauccgaugaauuugacgccucuaucucacaagucaacgaaaaaauaaaucaaucauuagcauucauacgaaaaucagacgaacuacuacacaacguaaacgcaggaaaaucaacaaccaacauaaugauaaccacaauaauaauaguuauuauagugauacuauuauccuuaauugcagucggacuauuauuauacuguaaagcacgcuaaggacuaguggaagcauuuuccuggcugauuaaaagaaauuacucagcuauggucaucuguuccuguuagaaggcuaugcagcauauuauauacuaugcgcauguuaugaaaugcauaauaaaaaauuuuaaaaaaucuaaaagaucuaaaaaaaaaaaaaaaaaaaaaaaaaaaaaaaaaaaaaaaaaaaaaaaaaaaaaaaaaaaaaaaaugcaucccccccccccccccccccccccccccccccaaaggcucuuuucagagccaccagaauu

SEQ ID NO: 5077 - RNA, 1916 nt, Artificial Sequence
  mRNA product Design c-4 comprising derived and/or modified sequence from HRSV(A2)__F-del_DSCav1_mut4 (opt11)
gggagaguccgcucagccagguugcagaagcggcuuagcguguguccuaaucuucucucugcguguagguaggccugugccgcaaacaagcuuaccauggaacuccucauccucaaagccaaugccaucaccacaauccugacagcaguaaccuucugcuucgcauccggacaaaacaucaccgaagaauuuuaccagucaaccugcuccgcugucucaaaaggcuaccucucagcccuucgcaccggcugguacaccucggucauaacaauagaacucuccaauaucaaagaaaacaaaugcaacggcacugacgccaagguaaaacucaucaaacaggaacucgauaaauacaagaacgccguaacagaacuacaacuacucaugcaaucaacaccggccaccggcuccgguuccgccauaugcuccggaguggccgugugcaagguccuccaccuugaaggggaaguuaacaaaaucaaaucagcccuccucuccacuaacaaagccguaguaucccuaagcaacgguguauccguccucaccuucaaaguacuagaccuaaagaauuauaucgacaaacaacuccuccccauacucaacaaacaauccugcuccauaagcaacaucgaaacagucaucgaguuccagcagaaaaacaaccgacuccucgaaauaacccgcgaguucucagucaacgccggagucaccacacccgucagcaccuacaugcugaccaacuccgaacuccucuccuuaaucaaugacaugcccaucaccaaugaccaaaagaaacucaugucaaacaacguccaaauaguacgccaacaauccuacuccaucaugugcaucauaaaagaagaaguacucgccuacgucguccaacucccccucuacggcguaaucgacacccccugcuggaaacuacacacaagcccccucugcaccacaaacacuaaagagggcuccaacaucugucuaacccgcaccgaucgaggcugguacugcgacaacgccggaucugucucauucuucccccaagccgaaaccugcaaaguccaauccaaccgcgucuucugcgacaccaugaacucgagaacccucccuuccgaagucaaccuaugcaacgucgacauuuucaaccccaaauacgacugcaaaaucaugaccucgaaaaccgacguaucauccagcgucaucaccagccuaggcgcaaucgugagcugcuacggcaaaaccaaaugcaccgcgagcaauaaaaaccgcgggaucaucaaaacuuucuccaacggcugcgacuacgucuccaacaagggagucgauaccgucuccguaggcaacacccucuacugcgucaacaaacaagaaggcaaaucacuauacguaaaaggcgagccaaucauaaacuucuacgacccucuaguuuucccauccgacgaguucgacgcuagcaucucccaagucaacgagaaaaucaaccaaucccucgcauucauccgcaaauccgacgaacuccuccacaacguaaacgcaggcaaaucaacuacuaauauaaugaucacaaccaucauaauagucauaaucguaauccuccuaucccucaucgccgucggacuacugcucuacugcaaagcccgcuaaggacuaguggaagcauuuuccuggcugauuaaaagaaauuacucagcuauggucaucuguuccuguuagaaggcuaugcagcauauuauauacuaugcgcauguuaugaaaugcauaauaaaaaauuuuaaaaaaucuaaaagaucuaaaaaaaaaaaaaaaaaaaaaaaaaaaaaaaaaaaaaaaaaaaaaaaaaaaaaaaaaaaaaaaaugcaucccccccccccccccccccccccccccccccaaaggcucuuuucagagccaccagaauu

SEQ ID NO: 5078 - RNA, 1834 nt, Artificial Sequence
  mRNA product Design c-5 comprising derived and/or modified sequence from HRSV(A2)__F-del_DSCav1_mut4 (opt1)
gggagagcggcucggccauuuugucccagucaguccggaggcugcggcugcagaaguaccgccugcggaguaacugcaaagaagcuuaccauggagcugcucauccugaaggccaacgccaucaccaccauccugacggcggugaccuucugcuucgccagcggccagaacaucaccgaggaguucuaccaguccacgugcagcgccgucuccaagggguaccucagcgcccugcggaccggcugguacaccuccgugaucaccaucgagcugagcaacaucaaggagaacaagugcaacgggaccgacgccaaggugaagcucaucaagcaggagcuggacaaguacaagaacgcggucacggagcugcagcuccugaugcaguccaccccggcaaccggcuccggcuccgccaucugcagcggcgucgccgugugcaaggugcugcaccucgagggggaggucaacaagaucaagagcgcccugcuguccaccaacaaggccguggugagccucuccaacggcgucagcgugcugaccuucaaggugcuggaccucaagaacuacaucgacaagcagcugcugcccauccugaacaagcagagcugcuccaucagcaacaucgagacggugaucgaguuccagcagaagaacaaccggcuccuggagaucacccgcgaguucagcgugaacgccggggucaccacccccguguccacguacaugcugaccaacagcgagcuccugucccugaucaacgacaugccgaucaccaacgaccagaagaagcucaugagcaacaacgugcagaucguccggcagcaguccuacagcaucaugugcaucaucaaggaggaggugcuggcguacgugguccagcugccccucuacggcgugaucgacacccccugcuggaagcugcacacgagcccccugugcaccaccaacaccaaggagggguccaacaucugccucacgcgcaccgaccggggcugguacugcgacaacgccggcagcgucuccuucuucccgcaggccgagaccugcaaggugcagagcaaccgcguguucugcgacaccaugaacucccggacgcugcccagcgagguaaaccucugcaacgucgacaucuucaaccccaaguacgacugcaagaucaugaccuccaagaccgacgugagcuccagcgugaucaccucccugggggccaucgucagcugcuacggcaagacgaagugcaccgccagcaacaagaaccgggggaucaucaagaccuucuccaacggcugcgacuacgugagcaacaagggcguggacaccguguccgucgggaacacccuguacugcgugaacaagcaggagggcaagagccucuacgugaagggggagcccaucaucaacuucuacgacccgcuggucuuccccuccgacgaguucgacgcgagcaucucccaggugaacgagaagaucaaccagagccuggccuucauccgcaaguccgacgagcugcuccacaacgugaacgccggcaagagcacgaccaacaucaugaucaccaccaucaucaucgucaucaucgugauccugcugucccucaucgccguggggcugcugcucuacugcaaggcccggugaggacuagucccuguucccagagcccacuuuuuuuucuuuuuuugaaauaaaauagccugucuuucagaucuaaaaaaaaaaaaaaaaaaaaaaaaaaaaaaaaaaaaaaaaaaaaaaaaaaaaaaaaaaaaaaaaugcaucccccccccccccccccccccccccccccccaaaggcucuuuucagagccaccagaauu

SEQ ID NO: 5079 - RNA, 1834 nt, Artificial Sequence
  mRNA product Design c-5 comprising derived and/or modified sequence from HRSV(A2)__F-del_DSCav1_mut4 (opt1)
gggagagcggcucggccauuuugucccagucaguccggaggcugcggcugcagaaguaccgccugcggaguaacugcaaagaagcuuaccauggagcugcucauccugaaggccaacgccaucaccaccauccugacggcggugaccuucugcuucgccagcggccagaacaucaccgaggaguucuaccaguccacgugcagcgccgucuccaagggguaccucagcgcccugcgcaccggcugguacaccuccgugaucaccaucgagcugagcaacaucaaggagaacaagugcaacgggaccgacgccaaggugaagcucaucaagcaggagcuggacaaguacaagaacgcggucacggagcugcagcuccugaugcaguccacccccgccaccggcagcggguccgccaucugcagcggcguggccgugugcaagguccugcaccucgagggcgaggugaacaagaucaaguccgcgcugcugagcaccaacaaggccguggucucccucagcaacgggguguccgugcugacguucaagguccuggaccucaagaacuacaucgacaagcagcugcugccgauccucaacaagcagagcugcuccaucagcaacaucgagaccgugaucgaguuccagcagaagaacaaccggcugcuggagaucacccgcgaguucuccgugaacgccggcgucaccacgcccgugagcaccuacaugcucaccaacagcgagcugcugucccucaucaacgacaugcccaucaccaacgaccagaagaagcugaugagcaacaacgugcagaucguccggcagcaguccuacagcaucaugugcaucaucaaggaggaggugcuggccuacgugguccagcucccccuguacggggugaucgacacgccgugcuggaagcugcacaccagcccccucugcaccaccaacacgaaggagggcuccaacaucugccugacccgcaccgaccgggggugguacugcgacaacgccggcuccgugagcuucuucccccaggcggagaccugcaagguccaguccaaccgcguguucugcgacacgaugaacagccggacccuccccuccgaggucaaccugugcaacguggacaucuucaacccgaaguacgacugcaagaucaugaccagcaagaccgacguguccagcuccgucaucacgagccugggcgccaucguguccugcuacgggaagaccaagugcaccgccagcaacaagaaccggggcaucaucaagaccuucuccaacgggugcgacuacgugagcaacaagggcgucgacacggugagcgugggcaacacccucuacugcgucaacaagcaggaggggaagucccuguacgugaagggcgagcccaucaucaacuucuacgacccccugguguuccccagcgacgaguucgacgccuccaucagccaggucaacgagaagaucaaccagucccucgccuucauccgcaagagcgacgagcugcugcacaacgugaacgcggggaaguccaccaccaacaucaugaucaccacgaucaucaucgugaucaucgucauccuccugagccugaucgccgugggccuccugcuguacugcaaggcccggugaggacuagucccuguucccagagcccacuuuuuuuucuuuuuuugaaauaaaauagccugucuuucagaucuaaaaaaaaaaaaaaaaaaaaaaaaaaaaaaaaaaaaaaaaaaaaaaaaaaaaaaaaaaaaaaaaugcaucccccccccccccccccccccccccccccccaaaggcucuuuucagagccaccagaauu

SEQ ID NO: 5080 - RNA, 1834 nt, Artificial Sequence
  mRNA product Design c-5 comprising derived and/or modified sequence from HRSV(A2)__F-del_DSCav1_mut4 (opt2)
gggagagcggcucggccauuuugucccagucaguccggaggcugcggcugcagaaguaccgccugcggaguaacugcaaagaagcuuaccauggagcuccucauccucaaggccaacgccaucaccaccauccucaccgccgucaccuucugcuucgccuccggccagaacaucaccgaggaguucuaccaguccaccugcuccgccgucuccaagggcuaccucuccgcccuccgcaccggcugguacaccuccgucaucaccaucgagcucuccaacaucaaggagaacaagugcaacggcaccgacgccaaggucaagcucaucaagcaggagcucgacaaguacaagaacgccgucaccgagcuccagcuccucaugcaguccacccccgccaccggcuccggcuccgccaucugcuccggcgucgccgucugcaagguccuccaccucgagggcgaggucaacaagaucaaguccgcccuccucuccaccaacaaggccgucgucucccucuccaacggcgucuccguccucaccuucaagguccucgaccucaagaacuacaucgacaagcagcuccuccccauccucaacaagcaguccugcuccaucuccaacaucgagaccgucaucgaguuccagcagaagaacaaccgccuccucgagaucacccgcgaguucuccgucaacgccggcgucaccacccccgucuccaccuacaugcucaccaacuccgagcuccucucccucaucaacgacaugcccaucaccaacgaccagaagaagcucauguccaacaacguccagaucguccgccagcaguccuacuccaucaugugcaucaucaaggaggagguccucgccuacgucguccagcucccccucuacggcgucaucgacacccccugcuggaagcuccacaccuccccccucugcaccaccaacaccaaggagggcuccaacaucugccucacccgcaccgaccgcggcugguacugcgacaacgccggcuccgucuccuucuucccccaggccgagaccugcaagguccaguccaaccgcgucuucugcgacaccaugaacucccgcacccuccccuccgaggucaaccucugcaacgucgacaucuucaaccccaaguacgacugcaagaucaugaccuccaagaccgacgucuccuccuccgucaucaccucccucggcgccaucgucuccugcuacggcaagaccaagugcaccgccuccaacaagaaccgcggcaucaucaagaccuucuccaacggcugcgacuacgucuccaacaagggcgucgacaccgucuccgucggcaacacccucuacugcgucaacaagcaggagggcaagucccucuacgucaagggcgagcccaucaucaacuucuacgacccccucgucuuccccuccgacgaguucgacgccuccaucucccaggucaacgagaagaucaaccagucccucgccuucauccgcaaguccgacgagcuccuccacaacgucaacgccggcaaguccaccaccaacaucaugaucaccaccaucaucaucgucaucaucgucauccuccucucccucaucgccgucggccuccuccucuacugcaaggcccgcugaggacuagucccuguucccagagcccacuuuuuuuucuuuuuuugaaauaaaauagccugucuuucagaucuaaaaaaaaaaaaaaaaaaaaaaaaaaaaaaaaaaaaaaaaaaaaaaaaaaaaaaaaaaaaaaaaugcaucccccccccccccccccccccccccccccccaaaggcucuuuucagagccaccagaauu

SEQ ID NO: 5081 - RNA, 1834 nt, Artificial Sequence
  mRNA product Design c-5 comprising derived and/or modified sequence from HRSV(A2)__F-del_DSCav1_mut4 (opt3)
gggagagcggcucggccauuuugucccagucaguccggaggcugcggcugcagaaguaccgccugcggaguaacugcaaagaagcuuaccauggagcugcucauccuuaaggccaacgcuauuaccacaauacugacugcagugacguucugcuuugccagcggccagaauaucaccgaagaguucuaccaauccacauguucugcggucucaaaaggguauuugagugcuuuaagaacuggaugguacaccagcguuauuacaaucgaacuguccaacauuaaggagaauaaaugcaacgguaccgacgccaaggugaaacuaaucaagcaggaacucgauaaguauaaaaaugcaguaacugagcugcagcuucugaugcagucuacacccgccaccggcucggggucagcuauauguagcggaguggcagucugcaagguguugcaccucgagggcgaaguuaacaaaaucaagagugcccugcuguccacgaauaaagcuguggucucucucagcaacgguguguccguauuaacuuuuaagguucuggaccuuaagaauuacauugauaaacaauugcugccuauccuaaacaagcagucauguaguauuagcaauaucgagaccgugauagaguuccagcagaaaaacaauaggcuccuggaaauuacacgggaguuuucugucaacgccggggugacuaccccaguguccacauauaugcuuaccaauucagaacuguugagccucaucaacgacaugccgauuacgaacgaucaaaagaaacugaugaguaauaacguccagaucguucgccagcagucuuacuccaucaugugcauuauaaaggaggaaguguuagcguauguagugcaacugccccucuacggagucaucgacacuccuuguuggaaacuucauacaagcccacugugcaccacuaauacaaaggagggcucgaacauuuguuugacccgaacggaucguggcugguacugcgacaaugcagggucuguguccuucuuuccccaggccgaaaccuguaagguucagucaaacagaguguucugcgauacaaugaauaguagaacucugccuagcgaggucaaccucugcaauguggacaucuuuaacccaaaauaugauuguaagauaaugaccuccaaaacagacguaucuagcucaguuauuaccagucugggagcuaucguguccugcuacgguaagacuaaauguacagccagcaauaagaacaggggcaucauuaagaccuucucuaaugggugcgauuaugucucaaacaaaggaguggacacugucagugugggcaauacgcuuuacuguguuaacaagcaagaggguaaaagccuguaugugaagggggaacccaucauuaacuuuuacgacccuuugguauucccauccgaugaguuugacgcaucuauaucgcaggucaaugagaaaaucaaccagagccucgcuuucauucggaaguccgaugaacuguuacacaaugugaacgccggaaagucaacaaccaauaucaugaucacuaccauuauaaucguuauuaucgugauucugcuaagucucaucgcggucggccugcuuuuguauugcaaagcccgcugaggacuagucccuguucccagagcccacuuuuuuuucuuuuuuugaaauaaaauagccugucuuucagaucuaaaaaaaaaaaaaaaaaaaaaaaaaaaaaaaaaaaaaaaaaaaaaaaaaaaaaaaaaaaaaaaaugcaucccccccccccccccccccccccccccccccaaaggcucuuuucagagccaccagaauu

SEQ ID NO: 5082 - RNA, 1834 nt, Artificial Sequence
  mRNA product Design c-5 comprising derived and/or modified sequence from HRSV(A2)__F-del_DSCav1_mut4 (opt4)
gggagagcggcucggccauuuugucccagucaguccggaggcugcggcugcagaaguaccgccugcggaguaacugcaaagaagcuuaccauggagcugcugauccugaaggccaacgccaucaccaccauccugaccgccgugaccuucugcuucgccagcggccagaacaucaccgaggaguucuaccagagcaccugcagcgccgugagcaagggcuaccugagcgcccugagaaccggcugguacaccagcgugaucaccaucgagcugagcaacaucaaggagaacaagugcaacggcaccgacgccaaggugaagcugaucaagcaggagcuggacaaguacaagaacgccgugaccgagcugcagcugcugaugcagagcacccccgccaccggcagcggcagcgccaucugcagcggcguggccgugugcaaggugcugcaccuggagggcgaggugaacaagaucaagagcgcccugcugagcaccaacaaggccguggugagccugagcaacggcgugagcgugcugaccuucaaggugcuggaccugaagaacuacaucgacaagcagcugcugcccauccugaacaagcagagcugcagcaucagcaacaucgagaccgugaucgaguuccagcagaagaacaacagacugcuggagaucaccagagaguucagcgugaacgccggcgugaccacccccgugagcaccuacaugcugaccaacagcgagcugcugagccugaucaacgacaugcccaucaccaacgaccagaagaagcugaugagcaacaacgugcagaucgugagacagcagagcuacagcaucaugugcaucaucaaggaggaggugcuggccuacguggugcagcugccccuguacggcgugaucgacacccccugcuggaagcugcacaccagcccccugugcaccaccaacaccaaggagggcagcaacaucugccugaccagaaccgacagaggcugguacugcgacaacgccggcagcgugagcuucuucccccaggccgagaccugcaaggugcagagcaacagaguguucugcgacaccaugaacagcagaacccugcccagcgaggugaaccugugcaacguggacaucuucaaccccaaguacgacugcaagaucaugaccagcaagaccgacgugagcagcagcgugaucaccagccugggcgccaucgugagcugcuacggcaagaccaagugcaccgccagcaacaagaacagaggcaucaucaagaccuucagcaacggcugcgacuacgugagcaacaagggcguggacaccgugagcgugggcaacacccuguacugcgugaacaagcaggagggcaagagccuguacgugaagggcgagcccaucaucaacuucuacgacccccugguguuccccagcgacgaguucgacgccagcaucagccaggugaacgagaagaucaaccagagccuggccuucaucagaaagagcgacgagcugcugcacaacgugaacgccggcaagagcaccaccaacaucaugaucaccaccaucaucaucgugaucaucgugauccugcugagccugaucgccgugggccugcugcuguacugcaaggccagaugaggacuagucccuguucccagagcccacuuuuuuuucuuuuuuugaaauaaaauagccugucuuucagaucuaaaaaaaaaaaaaaaaaaaaaaaaaaaaaaaaaaaaaaaaaaaaaaaaaaaaaaaaaaaaaaaaugcaucccccccccccccccccccccccccccccccaaaggcucuuuucagagccaccagaauu

SEQ ID NO: 5083 - RNA, 1834 nt, Artificial Sequence
  mRNA product Design c-5 comprising derived and/or modified sequence from HRSV(A2)__F-del_DSCav1_mut4 (opt5)
gggagagcggcucggccauuuugucccagucaguccggaggcugcggcugcagaaguaccgccugcggaguaacugcaaagaagcuuaccauggagcugcucauccugaaggccaacgcuauuaccacaauccuuacggccgugaccuucugcuuugcgagcggccagaauauuacagaagaguucuaccaauccaccuguucugcugucagcaaaggguaucuguccgcccucagaacaggaugguacaccucuguuaucacaauugaacugagcaacaucaaggagaauaaaugcaacggcaccgacgccaaggugaaacuuaucaagcaggaacuggauaaguauaaaaaugcugugacggagcuccagcugcugaugcaguccacccccgccacagggucuggaagcgcuauuuguuccggcgucgccgugugcaagguucuccaccuggagggggaagugaacaaaaucaagagcgcgcuucugucuaccaauaaagccgucgugucccucagcaacggaguuucugugcugacauuuaagguccuugaccugaagaauuacauugauaaacaacuccugccuauccugaacaagcaguccuguagcauuucuaauaucgagaccgugauugaguuccagcagaaaaacaaucggcuccuggaaaucacgcgcgaguuuuccgugaacgcuggcgucacaaccccgguuagcacauauaugcuuaccaauuccgaacugcucucucugaucaacgacaugcccauuaccaacgaucaaaagaaacuuaugagcaauaacgugcagaucgugagacagcaguccuacagcauuaugugcaucauuaaggaggaaguccuggccuaugugguucaacucccucuguacggcgugaucgacacacccuguuggaaacugcauacgucuccucucugcaccacaaauaccaaggagggguccaacaucugucugacacggaccgaucgcggaugguacugcgacaaugcuggcagcgucucuuucuuuccccaggccgaaacguguaaggugcagagcaacagaguuuucugcgauacaaugaacuccagaacccugccuucugaggugaaucucugcaaugucgacauuuuuaacccgaaauaugauuguaagaucaugaccagcaaaacagacguguccagcucugucauuaccucccugggggcgaucgugagcugcuacggaaagacaaaauguacggccucuaauaagaaccggggcauuaucaagaccuucuccaaugggugcgauuauguuagcaacaaaggaguggacacagucuccgugggcaauacccuuuacuguguuaacaagcaagagggcaaaucucuguaugugaagggggaacccaucauuaacuuuuacgacccucucgucuuccccagcgaugaguuugacgcuuccaucucucaggugaaugagaaaauuaaccagagccuggccuucauccgcaaguccgaugaacugcuccacaaugugaacgcuggaaagagcacaaccaauauuaugaucacgaccauuaucaucguuauuaucgucauucugcuuucucugaucgccgugggccuccugcuguauugcaaagccagaugaggacuagucccuguucccagagcccacuuuuuuuucuuuuuuugaaauaaaauagccugucuuucagaucuaaaaaaaaaaaaaaaaaaaaaaaaaaaaaaaaaaaaaaaaaaaaaaaaaaaaaaaaaaaaaaaaugcaucccccccccccccccccccccccccccccccaaaggcucuuuucagagccaccagaauu

SEQ ID NO: 5084 - RNA, 1834 nt, Artificial Sequence
  mRNA product Design c-5 comprising derived and/or modified sequence from HRSV(A2)__F-del_DSCav1_mut4 (opt6)
gggagagcggcucggccauuuugucccagucaguccggaggcugcggcugcagaaguaccgccugcggaguaacugcaaagaagcuuaccauggaacuuuuaauacuaaaagcuaacgccauaaccacuauacuaacagcagucacauucugcuucgcaucaggccaaaacauaaccgaagaauuuuaccaauccacuuguucagcagucuccaaaggauauuuauccgcacuucguacaggaugguauacaucaguaauaacaauagaacucuccaacauaaaagaaaauaaaugcaacggcaccgacgcaaaaguaaaacucaucaaacaagaauuagacaaauacaagaacgccguaacagaacuacaauuacuaaugcaaucaacacccgccacaggaucaggaucugcaauaugcucuggaguagcaguaugcaaaguauuacaccuagaaggagaaguaaacaaaaucaaaagcgcacuacuauccacaaacaaagcuguaguaucacuaucaaacggaguaucaguauuaacuuucaaaguacuugaucuaaaaaacuacauagacaaacaacuacuacccauauuaaacaaacaaucaugcucaauaagcaauauagaaacaguaauagaauuucaacaaaaaaacaacagacuacuagaaaucacaagggaauuuucaguaaaugccgguguuacaaccccaguaucaacauacaugcuaacuaacucagaacuacuauccuuaauaaacgauaugccaauaacaaacgaucaaaaaaaacuaauguccaacaacguacaaauaguaagacaacaaucauacucaaucaugugcauuauaaaagaagaagucuuagcauacguaguacaauuaccacuauacgguguaauagauacaccauguuggaaauuacacacaagcccacuaugcacaacuaacacaaaagaaggcucaaauauauguuuaacaagaacagaccgagguugguacugcgacaaugcaggaucaguaucauucuuuccacaagcagaaacauguaaaguucaauccaacagaguauucugcgacacaaugaacuccagaacacuaccuucagaaguaaaccucuguaacguagacauauuuaaucccaaguacgacugcaaaauaaugacaucgaaaacagacguaagcuccucagugauaacaucccucggcgccaucguauccuguuacgguaaaacuaaauguaccgccucaaacaaaaaccgcgguauuauaaaaacuuuuucuaauggcugcgauuacguaagcaacaaaggcgucgacacaguuuccguaggaaacacacuauacugcguaaacaaacaagaagguaaaucucuauacguaaaaggagaaccaauaauaaauuucuaugauccuuuaguauucccauccgaugaauuugacgccucuaucucacaagucaacgaaaaaauaaaucaaucauuagcauucauacgaaaaucagacgaacuacuacacaacguaaacgcaggaaaaucaacaaccaacauaaugauaaccacaauaauaauaguuauuauagugauacuauuauccuuaauugcagucggacuauuauuauacuguaaagcacgcuaaggacuagucccuguucccagagcccacuuuuuuuucuuuuuuugaaauaaaauagccugucuuucagaucuaaaaaaaaaaaaaaaaaaaaaaaaaaaaaaaaaaaaaaaaaaaaaaaaaaaaaaaaaaaaaaaaugcaucccccccccccccccccccccccccccccccaaaggcucuuuucagagccaccagaauu

SEQ ID NO: 5085 - RNA, 1834 nt, Artificial Sequence
  mRNA product Design c-5 comprising derived and/or modified sequence from HRSV(A2)__F-del_DSCav1_mut4 (opt11)
gggagagcggcucggccauuuugucccagucaguccggaggcugcggcugcagaaguaccgccugcggaguaacugcaaagaagcuuaccauggaacuccucauccucaaagccaaugccaucaccacaauccugacagcaguaaccuucugcuucgcauccggacaaaacaucaccgaagaauuuuaccagucaaccugcuccgcugucucaaaaggcuaccucucagcccuucgcaccggcugguacaccucggucauaacaauagaacucuccaauaucaaagaaaacaaaugcaacggcacugacgccaagguaaaacucaucaaacaggaacucgauaaauacaagaacgccguaacagaacuacaacuacucaugcaaucaacaccggccaccggcuccgguuccgccauaugcuccggaguggccgugugcaagguccuccaccuugaaggggaaguuaacaaaaucaaaucagcccuccucuccacuaacaaagccguaguaucccuaagcaacgguguauccguccucaccuucaaaguacuagaccuaaagaauuauaucgacaaacaacuccuccccauacucaacaaacaauccugcuccauaagcaacaucgaaacagucaucgaguuccagcagaaaaacaaccgacuccucgaaauaacccgcgaguucucagucaacgccggagucaccacacccgucagcaccuacaugcugaccaacuccgaacuccucuccuuaaucaaugacaugcccaucaccaaugaccaaaagaaacucaugucaaacaacguccaaauaguacgccaacaauccuacuccaucaugugcaucauaaaagaagaaguacucgccuacgucguccaacucccccucuacggcguaaucgacacccccugcuggaaacuacacacaagcccccucugcaccacaaacacuaaagagggcuccaacaucugucuaacccgcaccgaucgaggcugguacugcgacaacgccggaucugucucauucuucccccaagccgaaaccugcaaaguccaauccaaccgcgucuucugcgacaccaugaacucgagaacccucccuuccgaagucaaccuaugcaacgucgacauuuucaaccccaaauacgacugcaaaaucaugaccucgaaaaccgacguaucauccagcgucaucaccagccuaggcgcaaucgugagcugcuacggcaaaaccaaaugcaccgcgagcaauaaaaaccgcgggaucaucaaaacuuucuccaacggcugcgacuacgucuccaacaagggagucgauaccgucuccguaggcaacacccucuacugcgucaacaaacaagaaggcaaaucacuauacguaaaaggcgagccaaucauaaacuucuacgacccucuaguuuucccauccgacgaguucgacgcuagcaucucccaagucaacgagaaaaucaaccaaucccucgcauucauccgcaaauccgacgaacuccuccacaacguaaacgcaggcaaaucaacuacuaauauaaugaucacaaccaucauaauagucauaaucguaauccuccuaucccucaucgccgucggacuacugcucuacugcaaagcccgcuaaggacuagucccuguucccagagcccacuuuuuuuucuuuuuuugaaauaaaauagccugucuuucagaucuaaaaaaaaaaaaaaaaaaaaaaaaaaaaaaaaaaaaaaaaaaaaaaaaaaaaaaaaaaaaaaaaugcaucccccccccccccccccccccccccccccccaaaggcucuuuucagagccaccagaauu

SEQ ID NO: 5086 - RNA, 1843 nt, Artificial Sequence
  mRNA product Design d-1 comprising derived and/or modified sequence from HRSV(A2)__F-del_DSCav1_mut4 (opt1)
gggagacccgugacccggaaguuguacggcuacgcgacuuucccucccacaaacccucgcgcccuuccuuuccuacuugggcccggcagaaagcuuaccauggagcugcucauccugaaggccaacgccaucaccaccauccugacggcggugaccuucugcuucgccagcggccagaacaucaccgaggaguucuaccaguccacgugcagcgccgucuccaagggguaccucagcgcccugcggaccggcugguacaccuccgugaucaccaucgagcugagcaacaucaaggagaacaagugcaacgggaccgacgccaaggugaagcucaucaagcaggagcuggacaaguacaagaacgcggucacggagcugcagcuccugaugcaguccaccccggcaaccggcuccggcuccgccaucugcagcggcgucgccgugugcaaggugcugcaccucgagggggaggucaacaagaucaagagcgcccugcuguccaccaacaaggccguggugagccucuccaacggcgucagcgugcugaccuucaaggugcuggaccucaagaacuacaucgacaagcagcugcugcccauccugaacaagcagagcugcuccaucagcaacaucgagacggugaucgaguuccagcagaagaacaaccggcuccuggagaucacccgcgaguucagcgugaacgccggggucaccacccccguguccacguacaugcugaccaacagcgagcuccugucccugaucaacgacaugccgaucaccaacgaccagaagaagcucaugagcaacaacgugcagaucguccggcagcaguccuacagcaucaugugcaucaucaaggaggaggugcuggcguacgugguccagcugccccucuacggcgugaucgacacccccugcuggaagcugcacacgagcccccugugcaccaccaacaccaaggagggguccaacaucugccucacgcgcaccgaccggggcugguacugcgacaacgccggcagcgucuccuucuucccgcaggccgagaccugcaaggugcagagcaaccgcguguucugcgacaccaugaacucccggacgcugcccagcgagguaaaccucugcaacgucgacaucuucaaccccaaguacgacugcaagaucaugaccuccaagaccgacgugagcuccagcgugaucaccucccugggggccaucgucagcugcuacggcaagacgaagugcaccgccagcaacaagaaccgggggaucaucaagaccuucuccaacggcugcgacuacgugagcaacaagggcguggacaccguguccgucgggaacacccuguacugcgugaacaagcaggagggcaagagccucuacgugaagggggagcccaucaucaacuucuacgacccgcuggucuuccccuccgacgaguucgacgcgagcaucucccaggugaacgagaagaucaaccagagccuggccuucauccgcaaguccgacgagcugcuccacaacgugaacgccggcaagagcacgaccaacaucaugaucaccaccaucaucaucgucaucaucgugauccugcugucccucaucgccguggggcugcugcucuacugcaaggcccggugaggacuagucccuguucccagagcccacuuuuuuuucuuuuuuugaaauaaaauagccugucuuucagaucuaaaaaaaaaaaaaaaaaaaaaaaaaaaaaaaaaaaaaaaaaaaaaaaaaaaaaaaaaaaaaaaaugcaucccccccccccccccccccccccccccccccaaaggcucuuuucagagccaccagaauu

SEQ ID NO: 5087 - RNA, 1843 nt, Artificial Sequence
  mRNA product Design d-1 comprising derived and/or modified sequence from HRSV(A2)__F-del_DSCav1_mut4 (opt1)
gggagacccgugacccggaaguuguacggcuacgcgacuuucccucccacaaacccucgcgcccuuccuuuccuacuugggcccggcagaaagcuuaccauggagcugcucauccugaaggccaacgccaucaccaccauccugacggcggugaccuucugcuucgccagcggccagaacaucaccgaggaguucuaccaguccacgugcagcgccgucuccaagggguaccucagcgcccugcgcaccggcugguacaccuccgugaucaccaucgagcugagcaacaucaaggagaacaagugcaacgggaccgacgccaaggugaagcucaucaagcaggagcuggacaaguacaagaacgcggucacggagcugcagcuccugaugcaguccacccccgccaccggcagcggguccgccaucugcagcggcguggccgugugcaagguccugcaccucgagggcgaggugaacaagaucaaguccgcgcugcugagcaccaacaaggccguggucucccucagcaacgggguguccgugcugacguucaagguccuggaccucaagaacuacaucgacaagcagcugcugccgauccucaacaagcagagcugcuccaucagcaacaucgagaccgugaucgaguuccagcagaagaacaaccggcugcuggagaucacccgcgaguucuccgugaacgccggcgucaccacgcccgugagcaccuacaugcucaccaacagcgagcugcugucccucaucaacgacaugcccaucaccaacgaccagaagaagcugaugagcaacaacgugcagaucguccggcagcaguccuacagcaucaugugcaucaucaaggaggaggugcuggccuacgugguccagcucccccuguacggggugaucgacacgccgugcuggaagcugcacaccagcccccucugcaccaccaacacgaaggagggcuccaacaucugccugacccgcaccgaccgggggugguacugcgacaacgccggcuccgugagcuucuucccccaggcggagaccugcaagguccaguccaaccgcguguucugcgacacgaugaacagccggacccuccccuccgaggucaaccugugcaacguggacaucuucaacccgaaguacgacugcaagaucaugaccagcaagaccgacguguccagcuccgucaucacgagccugggcgccaucguguccugcuacgggaagaccaagugcaccgccagcaacaagaaccggggcaucaucaagaccuucuccaacgggugcgacuacgugagcaacaagggcgucgacacggugagcgugggcaacacccucuacugcgucaacaagcaggaggggaagucccuguacgugaagggcgagcccaucaucaacuucuacgacccccugguguuccccagcgacgaguucgacgccuccaucagccaggucaacgagaagaucaaccagucccucgccuucauccgcaagagcgacgagcugcugcacaacgugaacgcggggaaguccaccaccaacaucaugaucaccacgaucaucaucgugaucaucgucauccuccugagccugaucgccgugggccuccugcuguacugcaaggcccggugaggacuagucccuguucccagagcccacuuuuuuuucuuuuuuugaaauaaaauagccugucuuucagaucuaaaaaaaaaaaaaaaaaaaaaaaaaaaaaaaaaaaaaaaaaaaaaaaaaaaaaaaaaaaaaaaaugcaucccccccccccccccccccccccccccccccaaaggcucuuuucagagccaccagaauu

SEQ ID NO: 5088 - RNA, 1843 nt, Artificial Sequence
  mRNA product Design d-1 comprising derived and/or modified sequence from HRSV(A2)__F-del_DSCav1_mut4 (opt2)
gggagacccgugacccggaaguuguacggcuacgcgacuuucccucccacaaacccucgcgcccuuccuuuccuacuugggcccggcagaaagcuuaccauggagcuccucauccucaaggccaacgccaucaccaccauccucaccgccgucaccuucugcuucgccuccggccagaacaucaccgaggaguucuaccaguccaccugcuccgccgucuccaagggcuaccucuccgcccuccgcaccggcugguacaccuccgucaucaccaucgagcucuccaacaucaaggagaacaagugcaacggcaccgacgccaaggucaagcucaucaagcaggagcucgacaaguacaagaacgccgucaccgagcuccagcuccucaugcaguccacccccgccaccggcuccggcuccgccaucugcuccggcgucgccgucugcaagguccuccaccucgagggcgaggucaacaagaucaaguccgcccuccucuccaccaacaaggccgucgucucccucuccaacggcgucuccguccucaccuucaagguccucgaccucaagaacuacaucgacaagcagcuccuccccauccucaacaagcaguccugcuccaucuccaacaucgagaccgucaucgaguuccagcagaagaacaaccgccuccucgagaucacccgcgaguucuccgucaacgccggcgucaccacccccgucuccaccuacaugcucaccaacuccgagcuccucucccucaucaacgacaugcccaucaccaacgaccagaagaagcucauguccaacaacguccagaucguccgccagcaguccuacuccaucaugugcaucaucaaggaggagguccucgccuacgucguccagcucccccucuacggcgucaucgacacccccugcuggaagcuccacaccuccccccucugcaccaccaacaccaaggagggcuccaacaucugccucacccgcaccgaccgcggcugguacugcgacaacgccggcuccgucuccuucuucccccaggccgagaccugcaagguccaguccaaccgcgucuucugcgacaccaugaacucccgcacccuccccuccgaggucaaccucugcaacgucgacaucuucaaccccaaguacgacugcaagaucaugaccuccaagaccgacgucuccuccuccgucaucaccucccucggcgccaucgucuccugcuacggcaagaccaagugcaccgccuccaacaagaaccgcggcaucaucaagaccuucuccaacggcugcgacuacgucuccaacaagggcgucgacaccgucuccgucggcaacacccucuacugcgucaacaagcaggagggcaagucccucuacgucaagggcgagcccaucaucaacuucuacgacccccucgucuuccccuccgacgaguucgacgccuccaucucccaggucaacgagaagaucaaccagucccucgccuucauccgcaaguccgacgagcuccuccacaacgucaacgccggcaaguccaccaccaacaucaugaucaccaccaucaucaucgucaucaucgucauccuccucucccucaucgccgucggccuccuccucuacugcaaggcccgcugaggacuagucccuguucccagagcccacuuuuuuuucuuuuuuugaaauaaaauagccugucuuucagaucuaaaaaaaaaaaaaaaaaaaaaaaaaaaaaaaaaaaaaaaaaaaaaaaaaaaaaaaaaaaaaaaaugcaucccccccccccccccccccccccccccccccaaaggcucuuuucagagccaccagaauu

SEQ ID NO: 5089 - RNA, 1843 nt, Artificial Sequence
  mRNA product Design d-1 comprising derived and/or modified sequence from HRSV(A2)__F-del_DSCav1_mut4 (opt3)
gggagacccgugacccggaaguuguacggcuacgcgacuuucccucccacaaacccucgcgcccuuccuuuccuacuugggcccggcagaaagcuuaccauggagcugcucauccuuaaggccaacgcuauuaccacaauacugacugcagugacguucugcuuugccagcggccagaauaucaccgaagaguucuaccaauccacauguucugcggucucaaaaggguauuugagugcuuuaagaacuggaugguacaccagcguuauuacaaucgaacuguccaacauuaaggagaauaaaugcaacgguaccgacgccaaggugaaacuaaucaagcaggaacucgauaaguauaaaaaugcaguaacugagcugcagcuucugaugcagucuacacccgccaccggcucggggucagcuauauguagcggaguggcagucugcaagguguugcaccucgagggcgaaguuaacaaaaucaagagugcccugcuguccacgaauaaagcuguggucucucucagcaacgguguguccguauuaacuuuuaagguucuggaccuuaagaauuacauugauaaacaauugcugccuauccuaaacaagcagucauguaguauuagcaauaucgagaccgugauagaguuccagcagaaaaacaauaggcuccuggaaauuacacgggaguuuucugucaacgccggggugacuaccccaguguccacauauaugcuuaccaauucagaacuguugagccucaucaacgacaugccgauuacgaacgaucaaaagaaacugaugaguaauaacguccagaucguucgccagcagucuuacuccaucaugugcauuauaaaggaggaaguguuagcguauguagugcaacugccccucuacggagucaucgacacuccuuguuggaaacuucauacaagcccacugugcaccacuaauacaaaggagggcucgaacauuuguuugacccgaacggaucguggcugguacugcgacaaugcagggucuguguccuucuuuccccaggccgaaaccuguaagguucagucaaacagaguguucugcgauacaaugaauaguagaacucugccuagcgaggucaaccucugcaauguggacaucuuuaacccaaaauaugauuguaagauaaugaccuccaaaacagacguaucuagcucaguuauuaccagucugggagcuaucguguccugcuacgguaagacuaaauguacagccagcaauaagaacaggggcaucauuaagaccuucucuaaugggugcgauuaugucucaaacaaaggaguggacacugucagugugggcaauacgcuuuacuguguuaacaagcaagaggguaaaagccuguaugugaagggggaacccaucauuaacuuuuacgacccuuugguauucccauccgaugaguuugacgcaucuauaucgcaggucaaugagaaaaucaaccagagccucgcuuucauucggaaguccgaugaacuguuacacaaugugaacgccggaaagucaacaaccaauaucaugaucacuaccauuauaaucguuauuaucgugauucugcuaagucucaucgcggucggccugcuuuuguauugcaaagcccgcugaggacuagucccuguucccagagcccacuuuuuuuucuuuuuuugaaauaaaauagccugucuuucagaucuaaaaaaaaaaaaaaaaaaaaaaaaaaaaaaaaaaaaaaaaaaaaaaaaaaaaaaaaaaaaaaaaugcaucccccccccccccccccccccccccccccccaaaggcucuuuucagagccaccagaauu

SEQ ID NO: 5090 - RNA, 1843 nt, Artificial Sequence
  mRNA product Design d-1 comprising derived and/or modified sequence from HRSV(A2)__F-del_DSCav1_mut4 (opt4)
gggagacccgugacccggaaguuguacggcuacgcgacuuucccucccacaaacccucgcgcccuuccuuuccuacuugggcccggcagaaagcuuaccauggagcugcugauccugaaggccaacgccaucaccaccauccugaccgccgugaccuucugcuucgccagcggccagaacaucaccgaggaguucuaccagagcaccugcagcgccgugagcaagggcuaccugagcgcccugagaaccggcugguacaccagcgugaucaccaucgagcugagcaacaucaaggagaacaagugcaacggcaccgacgccaaggugaagcugaucaagcaggagcuggacaaguacaagaacgccgugaccgagcugcagcugcugaugcagagcacccccgccaccggcagcggcagcgccaucugcagcggcguggccgugugcaaggugcugcaccuggagggcgaggugaacaagaucaagagcgcccugcugagcaccaacaaggccguggugagccugagcaacggcgugagcgugcugaccuucaaggugcuggaccugaagaacuacaucgacaagcagcugcugcccauccugaacaagcagagcugcagcaucagcaacaucgagaccgugaucgaguuccagcagaagaacaacagacugcuggagaucaccagagaguucagcgugaacgccggcgugaccacccccgugagcaccuacaugcugaccaacagcgagcugcugagccugaucaacgacaugcccaucaccaacgaccagaagaagcugaugagcaacaacgugcagaucgugagacagcagagcuacagcaucaugugcaucaucaaggaggaggugcuggccuacguggugcagcugccccuguacggcgugaucgacacccccugcuggaagcugcacaccagcccccugugcaccaccaacaccaaggagggcagcaacaucugccugaccagaaccgacagaggcugguacugcgacaacgccggcagcgugagcuucuucccccaggccgagaccugcaaggugcagagcaacagaguguucugcgacaccaugaacagcagaacccugcccagcgaggugaaccugugcaacguggacaucuucaaccccaaguacgacugcaagaucaugaccagcaagaccgacgugagcagcagcgugaucaccagccugggcgccaucgugagcugcuacggcaagaccaagugcaccgccagcaacaagaacagaggcaucaucaagaccuucagcaacggcugcgacuacgugagcaacaagggcguggacaccgugagcgugggcaacacccuguacugcgugaacaagcaggagggcaagagccuguacgugaagggcgagcccaucaucaacuucuacgacccccugguguuccccagcgacgaguucgacgccagcaucagccaggugaacgagaagaucaaccagagccuggccuucaucagaaagagcgacgagcugcugcacaacgugaacgccggcaagagcaccaccaacaucaugaucaccaccaucaucaucgugaucaucgugauccugcugagccugaucgccgugggccugcugcuguacugcaaggccagaugaggacuagucccuguucccagagcccacuuuuuuuucuuuuuuugaaauaaaauagccugucuuucagaucuaaaaaaaaaaaaaaaaaaaaaaaaaaaaaaaaaaaaaaaaaaaaaaaaaaaaaaaaaaaaaaaaugcaucccccccccccccccccccccccccccccccaaaggcucuuuucagagccaccagaauu

SEQ ID NO: 5091 - RNA, 1843 nt, Artificial Sequence
  mRNA product Design d-1 comprising derived and/or modified sequence from HRSV(A2)__F-del_DSCav1_mut4 (opt5)
gggagacccgugacccggaaguuguacggcuacgcgacuuucccucccacaaacccucgcgcccuuccuuuccuacuugggcccggcagaaagcuuaccauggagcugcucauccugaaggccaacgcuauuaccacaauccuuacggccgugaccuucugcuuugcgagcggccagaauauuacagaagaguucuaccaauccaccuguucugcugucagcaaaggguaucuguccgcccucagaacaggaugguacaccucuguuaucacaauugaacugagcaacaucaaggagaauaaaugcaacggcaccgacgccaaggugaaacuuaucaagcaggaacuggauaaguauaaaaaugcugugacggagcuccagcugcugaugcaguccacccccgccacagggucuggaagcgcuauuuguuccggcgucgccgugugcaagguucuccaccuggagggggaagugaacaaaaucaagagcgcgcuucugucuaccaauaaagccgucgugucccucagcaacggaguuucugugcugacauuuaagguccuugaccugaagaauuacauugauaaacaacuccugccuauccugaacaagcaguccuguagcauuucuaauaucgagaccgugauugaguuccagcagaaaaacaaucggcuccuggaaaucacgcgcgaguuuuccgugaacgcuggcgucacaaccccgguuagcacauauaugcuuaccaauuccgaacugcucucucugaucaacgacaugcccauuaccaacgaucaaaagaaacuuaugagcaauaacgugcagaucgugagacagcaguccuacagcauuaugugcaucauuaaggaggaaguccuggccuaugugguucaacucccucuguacggcgugaucgacacacccuguuggaaacugcauacgucuccucucugcaccacaaauaccaaggagggguccaacaucugucugacacggaccgaucgcggaugguacugcgacaaugcuggcagcgucucuuucuuuccccaggccgaaacguguaaggugcagagcaacagaguuuucugcgauacaaugaacuccagaacccugccuucugaggugaaucucugcaaugucgacauuuuuaacccgaaauaugauuguaagaucaugaccagcaaaacagacguguccagcucugucauuaccucccugggggcgaucgugagcugcuacggaaagacaaaauguacggccucuaauaagaaccggggcauuaucaagaccuucuccaaugggugcgauuauguuagcaacaaaggaguggacacagucuccgugggcaauacccuuuacuguguuaacaagcaagagggcaaaucucuguaugugaagggggaacccaucauuaacuuuuacgacccucucgucuuccccagcgaugaguuugacgcuuccaucucucaggugaaugagaaaauuaaccagagccuggccuucauccgcaaguccgaugaacugcuccacaaugugaacgcuggaaagagcacaaccaauauuaugaucacgaccauuaucaucguuauuaucgucauucugcuuucucugaucgccgugggccuccugcuguauugcaaagccagaugaggacuagucccuguucccagagcccacuuuuuuuucuuuuuuugaaauaaaauagccugucuuucagaucuaaaaaaaaaaaaaaaaaaaaaaaaaaaaaaaaaaaaaaaaaaaaaaaaaaaaaaaaaaaaaaaaugcaucccccccccccccccccccccccccccccccaaaggcucuuuucagagccaccagaauu

SEQ ID NO: 5092 - RNA, 1843 nt, Artificial Sequence
  mRNA product Design d-1 comprising derived and/or modified sequence from HRSV(A2)__F-del_DSCav1_mut4 (opt6)
gggagacccgugacccggaaguuguacggcuacgcgacuuucccucccacaaacccucgcgcccuuccuuuccuacuugggcccggcagaaagcuuaccauggaacuuuuaauacuaaaagcuaacgccauaaccacuauacuaacagcagucacauucugcuucgcaucaggccaaaacauaaccgaagaauuuuaccaauccacuuguucagcagucuccaaaggauauuuauccgcacuucguacaggaugguauacaucaguaauaacaauagaacucuccaacauaaaagaaaauaaaugcaacggcaccgacgcaaaaguaaaacucaucaaacaagaauuagacaaauacaagaacgccguaacagaacuacaauuacuaaugcaaucaacacccgccacaggaucaggaucugcaauaugcucuggaguagcaguaugcaaaguauuacaccuagaaggagaaguaaacaaaaucaaaagcgcacuacuauccacaaacaaagcuguaguaucacuaucaaacggaguaucaguauuaacuuucaaaguacuugaucuaaaaaacuacauagacaaacaacuacuacccauauuaaacaaacaaucaugcucaauaagcaauauagaaacaguaauagaauuucaacaaaaaaacaacagacuacuagaaaucacaagggaauuuucaguaaaugccgguguuacaaccccaguaucaacauacaugcuaacuaacucagaacuacuauccuuaauaaacgauaugccaauaacaaacgaucaaaaaaaacuaauguccaacaacguacaaauaguaagacaacaaucauacucaaucaugugcauuauaaaagaagaagucuuagcauacguaguacaauuaccacuauacgguguaauagauacaccauguuggaaauuacacacaagcccacuaugcacaacuaacacaaaagaaggcucaaauauauguuuaacaagaacagaccgagguugguacugcgacaaugcaggaucaguaucauucuuuccacaagcagaaacauguaaaguucaauccaacagaguauucugcgacacaaugaacuccagaacacuaccuucagaaguaaaccucuguaacguagacauauuuaaucccaaguacgacugcaaaauaaugacaucgaaaacagacguaagcuccucagugauaacaucccucggcgccaucguauccuguuacgguaaaacuaaauguaccgccucaaacaaaaaccgcgguauuauaaaaacuuuuucuaauggcugcgauuacguaagcaacaaaggcgucgacacaguuuccguaggaaacacacuauacugcguaaacaaacaagaagguaaaucucuauacguaaaaggagaaccaauaauaaauuucuaugauccuuuaguauucccauccgaugaauuugacgccucuaucucacaagucaacgaaaaaauaaaucaaucauuagcauucauacgaaaaucagacgaacuacuacacaacguaaacgcaggaaaaucaacaaccaacauaaugauaaccacaauaauaauaguuauuauagugauacuauuauccuuaauugcagucggacuauuauuauacuguaaagcacgcuaaggacuagucccuguucccagagcccacuuuuuuuucuuuuuuugaaauaaaauagccugucuuucagaucuaaaaaaaaaaaaaaaaaaaaaaaaaaaaaaaaaaaaaaaaaaaaaaaaaaaaaaaaaaaaaaaaugcaucccccccccccccccccccccccccccccccaaaggcucuuuucagagccaccagaauu

SEQ ID NO: 5093 - RNA, 1843 nt, Artificial Sequence
  mRNA product Design d-1 comprising derived and/or modified sequence from HRSV(A2)__F-del_DSCav1_mut4 (opt11)
gggagacccgugacccggaaguuguacggcuacgcgacuuucccucccacaaacccucgcgcccuuccuuuccuacuugggcccggcagaaagcuuaccauggaacuccucauccucaaagccaaugccaucaccacaauccugacagcaguaaccuucugcuucgcauccggacaaaacaucaccgaagaauuuuaccagucaaccugcuccgcugucucaaaaggcuaccucucagcccuucgcaccggcugguacaccucggucauaacaauagaacucuccaauaucaaagaaaacaaaugcaacggcacugacgccaagguaaaacucaucaaacaggaacucgauaaauacaagaacgccguaacagaacuacaacuacucaugcaaucaacaccggccaccggcuccgguuccgccauaugcuccggaguggccgugugcaagguccuccaccuugaaggggaaguuaacaaaaucaaaucagcccuccucuccacuaacaaagccguaguaucccuaagcaacgguguauccguccucaccuucaaaguacuagaccuaaagaauuauaucgacaaacaacuccuccccauacucaacaaacaauccugcuccauaagcaacaucgaaacagucaucgaguuccagcagaaaaacaaccgacuccucgaaauaacccgcgaguucucagucaacgccggagucaccacacccgucagcaccuacaugcugaccaacuccgaacuccucuccuuaaucaaugacaugcccaucaccaaugaccaaaagaaacucaugucaaacaacguccaaauaguacgccaacaauccuacuccaucaugugcaucauaaaagaagaaguacucgccuacgucguccaacucccccucuacggcguaaucgacacccccugcuggaaacuacacacaagcccccucugcaccacaaacacuaaagagggcuccaacaucugucuaacccgcaccgaucgaggcugguacugcgacaacgccggaucugucucauucuucccccaagccgaaaccugcaaaguccaauccaaccgcgucuucugcgacaccaugaacucgagaacccucccuuccgaagucaaccuaugcaacgucgacauuuucaaccccaaauacgacugcaaaaucaugaccucgaaaaccgacguaucauccagcgucaucaccagccuaggcgcaaucgugagcugcuacggcaaaaccaaaugcaccgcgagcaauaaaaaccgcgggaucaucaaaacuuucuccaacggcugcgacuacgucuccaacaagggagucgauaccgucuccguaggcaacacccucuacugcgucaacaaacaagaaggcaaaucacuauacguaaaaggcgagccaaucauaaacuucuacgacccucuaguuuucccauccgacgaguucgacgcuagcaucucccaagucaacgagaaaaucaaccaaucccucgcauucauccgcaaauccgacgaacuccuccacaacguaaacgcaggcaaaucaacuacuaauauaaugaucacaaccaucauaauagucauaaucguaauccuccuaucccucaucgccgucggacuacugcucuacugcaaagcccgcuaaggacuagucccuguucccagagcccacuuuuuuuucuuuuuuugaaauaaaauagccugucuuucagaucuaaaaaaaaaaaaaaaaaaaaaaaaaaaaaaaaaaaaaaaaaaaaaaaaaaaaaaaaaaaaaaaaugcaucccccccccccccccccccccccccccccccaaaggcucuuuucagagccaccagaauu

SEQ ID NO: 5094 - RNA, 1898 nt, Artificial Sequence
  mRNA product Design d-2 comprising derived and/or modified sequence from HRSV(A2)__F-del_DSCav1_mut4 (opt1)
gggagagcggcucggccauuuugucccagucaguccggaggcugcggcugcagaaguaccgccugcggaguaacugcaaagaagcuuaccauggagcugcucauccugaaggccaacgccaucaccaccauccugacggcggugaccuucugcuucgccagcggccagaacaucaccgaggaguucuaccaguccacgugcagcgccgucuccaagggguaccucagcgcccugcggaccggcugguacaccuccgugaucaccaucgagcugagcaacaucaaggagaacaagugcaacgggaccgacgccaaggugaagcucaucaagcaggagcuggacaaguacaagaacgcggucacggagcugcagcuccugaugcaguccaccccggcaaccggcuccggcuccgccaucugcagcggcgucgccgugugcaaggugcugcaccucgagggggaggucaacaagaucaagagcgcccugcuguccaccaacaaggccguggugagccucuccaacggcgucagcgugcugaccuucaaggugcuggaccucaagaacuacaucgacaagcagcugcugcccauccugaacaagcagagcugcuccaucagcaacaucgagacggugaucgaguuccagcagaagaacaaccggcuccuggagaucacccgcgaguucagcgugaacgccggggucaccacccccguguccacguacaugcugaccaacagcgagcuccugucccugaucaacgacaugccgaucaccaacgaccagaagaagcucaugagcaacaacgugcagaucguccggcagcaguccuacagcaucaugugcaucaucaaggaggaggugcuggcguacgugguccagcugccccucuacggcgugaucgacacccccugcuggaagcugcacacgagcccccugugcaccaccaacaccaaggagggguccaacaucugccucacgcgcaccgaccggggcugguacugcgacaacgccggcagcgucuccuucuucccgcaggccgagaccugcaaggugcagagcaaccgcguguucugcgacaccaugaacucccggacgcugcccagcgagguaaaccucugcaacgucgacaucuucaaccccaaguacgacugcaagaucaugaccuccaagaccgacgugagcuccagcgugaucaccucccugggggccaucgucagcugcuacggcaagacgaagugcaccgccagcaacaagaaccgggggaucaucaagaccuucuccaacggcugcgacuacgugagcaacaagggcguggacaccguguccgucgggaacacccuguacugcgugaacaagcaggagggcaagagccucuacgugaagggggagcccaucaucaacuucuacgacccgcuggucuuccccuccgacgaguucgacgcgagcaucucccaggugaacgagaagaucaaccagagccuggccuucauccgcaaguccgacgagcugcuccacaacgugaacgccggcaagagcacgaccaacaucaugaucaccaccaucaucaucgucaucaucgugauccugcugucccucaucgccguggggcugcugcucuacugcaaggcccggugaggacuaguaauaaggaaacuguaugaaugucugugggcaggaagugaagagauccuucuguaaagguuuuuggaauuaugucugcugaauaauaaacuuuuuugaaauaauaaaucugguagaaaaaugagaucuaaaaaaaaaaaaaaaaaaaaaaaaaaaaaaaaaaaaaaaaaaaaaaaaaaaaaaaaaaaaaaaaugcaucccccccccccccccccccccccccccccccaaaggcucuuuucagagccaccagaauu

SEQ ID NO: 5095 - RNA, 1898 nt, Artificial Sequence
  mRNA product Design d-2 comprising derived and/or modified sequence from HRSV(A2)__F-del_DSCav1_mut4 (opt1)
gggagagcggcucggccauuuugucccagucaguccggaggcugcggcugcagaaguaccgccugcggaguaacugcaaagaagcuuaccauggagcugcucauccugaaggccaacgccaucaccaccauccugacggcggugaccuucugcuucgccagcggccagaacaucaccgaggaguucuaccaguccacgugcagcgccgucuccaagggguaccucagcgcccugcgcaccggcugguacaccuccgugaucaccaucgagcugagcaacaucaaggagaacaagugcaacgggaccgacgccaaggugaagcucaucaagcaggagcuggacaaguacaagaacgcggucacggagcugcagcuccugaugcaguccacccccgccaccggcagcggguccgccaucugcagcggcguggccgugugcaagguccugcaccucgagggcgaggugaacaagaucaaguccgcgcugcugagcaccaacaaggccguggucucccucagcaacgggguguccgugcugacguucaagguccuggaccucaagaacuacaucgacaagcagcugcugccgauccucaacaagcagagcugcuccaucagcaacaucgagaccgugaucgaguuccagcagaagaacaaccggcugcuggagaucacccgcgaguucuccgugaacgccggcgucaccacgcccgugagcaccuacaugcucaccaacagcgagcugcugucccucaucaacgacaugcccaucaccaacgaccagaagaagcugaugagcaacaacgugcagaucguccggcagcaguccuacagcaucaugugcaucaucaaggaggaggugcuggccuacgugguccagcucccccuguacggggugaucgacacgccgugcuggaagcugcacaccagcccccucugcaccaccaacacgaaggagggcuccaacaucugccugacccgcaccgaccgggggugguacugcgacaacgccggcuccgugagcuucuucccccaggcggagaccugcaagguccaguccaaccgcguguucugcgacacgaugaacagccggacccuccccuccgaggucaaccugugcaacguggacaucuucaacccgaaguacgacugcaagaucaugaccagcaagaccgacguguccagcuccgucaucacgagccugggcgccaucguguccugcuacgggaagaccaagugcaccgccagcaacaagaaccggggcaucaucaagaccuucuccaacgggugcgacuacgugagcaacaagggcgucgacacggugagcgugggcaacacccucuacugcgucaacaagcaggaggggaagucccuguacgugaagggcgagcccaucaucaacuucuacgacccccugguguuccccagcgacgaguucgacgccuccaucagccaggucaacgagaagaucaaccagucccucgccuucauccgcaagagcgacgagcugcugcacaacgugaacgcggggaaguccaccaccaacaucaugaucaccacgaucaucaucgugaucaucgucauccuccugagccugaucgccgugggccuccugcuguacugcaaggcccggugaggacuaguaauaaggaaacuguaugaaugucugugggcaggaagugaagagauccuucuguaaagguuuuuggaauuaugucugcugaauaauaaacuuuuuugaaauaauaaaucugguagaaaaaugagaucuaaaaaaaaaaaaaaaaaaaaaaaaaaaaaaaaaaaaaaaaaaaaaaaaaaaaaaaaaaaaaaaaugcaucccccccccccccccccccccccccccccccaaaggcucuuuucagagccaccagaauu

SEQ ID NO: 5096 - RNA, 1898 nt, Artificial Sequence
  mRNA product Design d-2 comprising derived and/or modified sequence from HRSV(A2)__F-del_DSCav1_mut4 (opt2)
gggagagcggcucggccauuuugucccagucaguccggaggcugcggcugcagaaguaccgccugcggaguaacugcaaagaagcuuaccauggagcuccucauccucaaggccaacgccaucaccaccauccucaccgccgucaccuucugcuucgccuccggccagaacaucaccgaggaguucuaccaguccaccugcuccgccgucuccaagggcuaccucuccgcccuccgcaccggcugguacaccuccgucaucaccaucgagcucuccaacaucaaggagaacaagugcaacggcaccgacgccaaggucaagcucaucaagcaggagcucgacaaguacaagaacgccgucaccgagcuccagcuccucaugcaguccacccccgccaccggcuccggcuccgccaucugcuccggcgucgccgucugcaagguccuccaccucgagggcgaggucaacaagaucaaguccgcccuccucuccaccaacaaggccgucgucucccucuccaacggcgucuccguccucaccuucaagguccucgaccucaagaacuacaucgacaagcagcuccuccccauccucaacaagcaguccugcuccaucuccaacaucgagaccgucaucgaguuccagcagaagaacaaccgccuccucgagaucacccgcgaguucuccgucaacgccggcgucaccacccccgucuccaccuacaugcucaccaacuccgagcuccucucccucaucaacgacaugcccaucaccaacgaccagaagaagcucauguccaacaacguccagaucguccgccagcaguccuacuccaucaugugcaucaucaaggaggagguccucgccuacgucguccagcucccccucuacggcgucaucgacacccccugcuggaagcuccacaccuccccccucugcaccaccaacaccaaggagggcuccaacaucugccucacccgcaccgaccgcggcugguacugcgacaacgccggcuccgucuccuucuucccccaggccgagaccugcaagguccaguccaaccgcgucuucugcgacaccaugaacucccgcacccuccccuccgaggucaaccucugcaacgucgacaucuucaaccccaaguacgacugcaagaucaugaccuccaagaccgacgucuccuccuccgucaucaccucccucggcgccaucgucuccugcuacggcaagaccaagugcaccgccuccaacaagaaccgcggcaucaucaagaccuucuccaacggcugcgacuacgucuccaacaagggcgucgacaccgucuccgucggcaacacccucuacugcgucaacaagcaggagggcaagucccucuacgucaagggcgagcccaucaucaacuucuacgacccccucgucuuccccuccgacgaguucgacgccuccaucucccaggucaacgagaagaucaaccagucccucgccuucauccgcaaguccgacgagcuccuccacaacgucaacgccggcaaguccaccaccaacaucaugaucaccaccaucaucaucgucaucaucgucauccuccucucccucaucgccgucggccuccuccucuacugcaaggcccgcugaggacuaguaauaaggaaacuguaugaaugucugugggcaggaagugaagagauccuucuguaaagguuuuuggaauuaugucugcugaauaauaaacuuuuuugaaauaauaaaucugguagaaaaaugagaucuaaaaaaaaaaaaaaaaaaaaaaaaaaaaaaaaaaaaaaaaaaaaaaaaaaaaaaaaaaaaaaaaugcaucccccccccccccccccccccccccccccccaaaggcucuuuucagagccaccagaauu

SEQ ID NO: 5097 - RNA, 1898 nt, Artificial Sequence
  mRNA product Design d-2 comprising derived and/or modified sequence from HRSV(A2)__F-del_DSCav1_mut4 (opt3)
gggagagcggcucggccauuuugucccagucaguccggaggcugcggcugcagaaguaccgccugcggaguaacugcaaagaagcuuaccauggagcugcucauccuuaaggccaacgcuauuaccacaauacugacugcagugacguucugcuuugccagcggccagaauaucaccgaagaguucuaccaauccacauguucugcggucucaaaaggguauuugagugcuuuaagaacuggaugguacaccagcguuauuacaaucgaacuguccaacauuaaggagaauaaaugcaacgguaccgacgccaaggugaaacuaaucaagcaggaacucgauaaguauaaaaaugcaguaacugagcugcagcuucugaugcagucuacacccgccaccggcucggggucagcuauauguagcggaguggcagucugcaagguguugcaccucgagggcgaaguuaacaaaaucaagagugcccugcuguccacgaauaaagcuguggucucucucagcaacgguguguccguauuaacuuuuaagguucuggaccuuaagaauuacauugauaaacaauugcugccuauccuaaacaagcagucauguaguauuagcaauaucgagaccgugauagaguuccagcagaaaaacaauaggcuccuggaaauuacacgggaguuuucugucaacgccggggugacuaccccaguguccacauauaugcuuaccaauucagaacuguugagccucaucaacgacaugccgauuacgaacgaucaaaagaaacugaugaguaauaacguccagaucguucgccagcagucuuacuccaucaugugcauuauaaaggaggaaguguuagcguauguagugcaacugccccucuacggagucaucgacacuccuuguuggaaacuucauacaagcccacugugcaccacuaauacaaaggagggcucgaacauuuguuugacccgaacggaucguggcugguacugcgacaaugcagggucuguguccuucuuuccccaggccgaaaccuguaagguucagucaaacagaguguucugcgauacaaugaauaguagaacucugccuagcgaggucaaccucugcaauguggacaucuuuaacccaaaauaugauuguaagauaaugaccuccaaaacagacguaucuagcucaguuauuaccagucugggagcuaucguguccugcuacgguaagacuaaauguacagccagcaauaagaacaggggcaucauuaagaccuucucuaaugggugcgauuaugucucaaacaaaggaguggacacugucagugugggcaauacgcuuuacuguguuaacaagcaagaggguaaaagccuguaugugaagggggaacccaucauuaacuuuuacgacccuuugguauucccauccgaugaguuugacgcaucuauaucgcaggucaaugagaaaaucaaccagagccucgcuuucauucggaaguccgaugaacuguuacacaaugugaacgccggaaagucaacaaccaauaucaugaucacuaccauuauaaucguuauuaucgugauucugcuaagucucaucgcggucggccugcuuuuguauugcaaagcccgcugaggacuaguaauaaggaaacuguaugaaugucugugggcaggaagugaagagauccuucuguaaagguuuuuggaauuaugucugcugaauaauaaacuuuuuugaaauaauaaaucugguagaaaaaugagaucuaaaaaaaaaaaaaaaaaaaaaaaaaaaaaaaaaaaaaaaaaaaaaaaaaaaaaaaaaaaaaaaaugcaucccccccccccccccccccccccccccccccaaaggcucuuuucagagccaccagaauu

SEQ ID NO: 5098 - RNA, 1898 nt, Artificial Sequence
  mRNA product Design d-2 comprising derived and/or modified sequence from HRSV(A2)__F-del_DSCav1_mut4 (opt4)
gggagagcggcucggccauuuugucccagucaguccggaggcugcggcugcagaaguaccgccugcggaguaacugcaaagaagcuuaccauggagcugcugauccugaaggccaacgccaucaccaccauccugaccgccgugaccuucugcuucgccagcggccagaacaucaccgaggaguucuaccagagcaccugcagcgccgugagcaagggcuaccugagcgcccugagaaccggcugguacaccagcgugaucaccaucgagcugagcaacaucaaggagaacaagugcaacggcaccgacgccaaggugaagcugaucaagcaggagcuggacaaguacaagaacgccgugaccgagcugcagcugcugaugcagagcacccccgccaccggcagcggcagcgccaucugcagcggcguggccgugugcaaggugcugcaccuggagggcgaggugaacaagaucaagagcgcccugcugagcaccaacaaggccguggugagccugagcaacggcgugagcgugcugaccuucaaggugcuggaccugaagaacuacaucgacaagcagcugcugcccauccugaacaagcagagcugcagcaucagcaacaucgagaccgugaucgaguuccagcagaagaacaacagacugcuggagaucaccagagaguucagcgugaacgccggcgugaccacccccgugagcaccuacaugcugaccaacagcgagcugcugagccugaucaacgacaugcccaucaccaacgaccagaagaagcugaugagcaacaacgugcagaucgugagacagcagagcuacagcaucaugugcaucaucaaggaggaggugcuggccuacguggugcagcugccccuguacggcgugaucgacacccccugcuggaagcugcacaccagcccccugugcaccaccaacaccaaggagggcagcaacaucugccugaccagaaccgacagaggcugguacugcgacaacgccggcagcgugagcuucuucccccaggccgagaccugcaaggugcagagcaacagaguguucugcgacaccaugaacagcagaacccugcccagcgaggugaaccugugcaacguggacaucuucaaccccaaguacgacugcaagaucaugaccagcaagaccgacgugagcagcagcgugaucaccagccugggcgccaucgugagcugcuacggcaagaccaagugcaccgccagcaacaagaacagaggcaucaucaagaccuucagcaacggcugcgacuacgugagcaacaagggcguggacaccgugagcgugggcaacacccuguacugcgugaacaagcaggagggcaagagccuguacgugaagggcgagcccaucaucaacuucuacgacccccugguguuccccagcgacgaguucgacgccagcaucagccaggugaacgagaagaucaaccagagccuggccuucaucagaaagagcgacgagcugcugcacaacgugaacgccggcaagagcaccaccaacaucaugaucaccaccaucaucaucgugaucaucgugauccugcugagccugaucgccgugggccugcugcuguacugcaaggccagaugaggacuaguaauaaggaaacuguaugaaugucugugggcaggaagugaagagauccuucuguaaagguuuuuggaauuaugucugcugaauaauaaacuuuuuugaaauaauaaaucugguagaaaaaugagaucuaaaaaaaaaaaaaaaaaaaaaaaaaaaaaaaaaaaaaaaaaaaaaaaaaaaaaaaaaaaaaaaaugcaucccccccccccccccccccccccccccccccaaaggcucuuuucagagccaccagaauu

SEQ ID NO: 5099 - RNA, 1898 nt, Artificial Sequence
  mRNA product Design d-2 comprising derived and/or modified sequence from HRSV(A2)__F-del_DSCav1_mut4 (opt5)
gggagagcggcucggccauuuugucccagucaguccggaggcugcggcugcagaaguaccgccugcggaguaacugcaaagaagcuuaccauggagcugcucauccugaaggccaacgcuauuaccacaauccuuacggccgugaccuucugcuuugcgagcggccagaauauuacagaagaguucuaccaauccaccuguucugcugucagcaaaggguaucuguccgcccucagaacaggaugguacaccucuguuaucacaauugaacugagcaacaucaaggagaauaaaugcaacggcaccgacgccaaggugaaacuuaucaagcaggaacuggauaaguauaaaaaugcugugacggagcuccagcugcugaugcaguccacccccgccacagggucuggaagcgcuauuuguuccggcgucgccgugugcaagguucuccaccuggagggggaagugaacaaaaucaagagcgcgcuucugucuaccaauaaagccgucgugucccucagcaacggaguuucugugcugacauuuaagguccuugaccugaagaauuacauugauaaacaacuccugccuauccugaacaagcaguccuguagcauuucuaauaucgagaccgugauugaguuccagcagaaaaacaaucggcuccuggaaaucacgcgcgaguuuuccgugaacgcuggcgucacaaccccgguuagcacauauaugcuuaccaauuccgaacugcucucucugaucaacgacaugcccauuaccaacgaucaaaagaaacuuaugagcaauaacgugcagaucgugagacagcaguccuacagcauuaugugcaucauuaaggaggaaguccuggccuaugugguucaacucccucuguacggcgugaucgacacacccuguuggaaacugcauacgucuccucucugcaccacaaauaccaaggagggguccaacaucugucugacacggaccgaucgcggaugguacugcgacaaugcuggcagcgucucuuucuuuccccaggccgaaacguguaaggugcagagcaacagaguuuucugcgauacaaugaacuccagaacccugccuucugaggugaaucucugcaaugucgacauuuuuaacccgaaauaugauuguaagaucaugaccagcaaaacagacguguccagcucugucauuaccucccugggggcgaucgugagcugcuacggaaagacaaaauguacggccucuaauaagaaccggggcauuaucaagaccuucuccaaugggugcgauuauguuagcaacaaaggaguggacacagucuccgugggcaauacccuuuacuguguuaacaagcaagagggcaaaucucuguaugugaagggggaacccaucauuaacuuuuacgacccucucgucuuccccagcgaugaguuugacgcuuccaucucucaggugaaugagaaaauuaaccagagccuggccuucauccgcaaguccgaugaacugcuccacaaugugaacgcuggaaagagcacaaccaauauuaugaucacgaccauuaucaucguuauuaucgucauucugcuuucucugaucgccgugggccuccugcuguauugcaaagccagaugaggacuaguaauaaggaaacuguaugaaugucugugggcaggaagugaagagauccuucuguaaagguuuuuggaauuaugucugcugaauaauaaacuuuuuugaaauaauaaaucugguagaaaaaugagaucuaaaaaaaaaaaaaaaaaaaaaaaaaaaaaaaaaaaaaaaaaaaaaaaaaaaaaaaaaaaaaaaaugcaucccccccccccccccccccccccccccccccaaaggcucuuuucagagccaccagaauu

SEQ ID NO: 5100 - RNA, 1898 nt, Artificial Sequence
  mRNA product Design d-2 comprising derived and/or modified sequence from HRSV(A2)__F-del_DSCav1_mut4 (opt6)
gggagagcggcucggccauuuugucccagucaguccggaggcugcggcugcagaaguaccgccugcggaguaacugcaaagaagcuuaccauggaacuuuuaauacuaaaagcuaacgccauaaccacuauacuaacagcagucacauucugcuucgcaucaggccaaaacauaaccgaagaauuuuaccaauccacuuguucagcagucuccaaaggauauuuauccgcacuucguacaggaugguauacaucaguaauaacaauagaacucuccaacauaaaagaaaauaaaugcaacggcaccgacgcaaaaguaaaacucaucaaacaagaauuagacaaauacaagaacgccguaacagaacuacaauuacuaaugcaaucaacacccgccacaggaucaggaucugcaauaugcucuggaguagcaguaugcaaaguauuacaccuagaaggagaaguaaacaaaaucaaaagcgcacuacuauccacaaacaaagcuguaguaucacuaucaaacggaguaucaguauuaacuuucaaaguacuugaucuaaaaaacuacauagacaaacaacuacuacccauauuaaacaaacaaucaugcucaauaagcaauauagaaacaguaauagaauuucaacaaaaaaacaacagacuacuagaaaucacaagggaauuuucaguaaaugccgguguuacaaccccaguaucaacauacaugcuaacuaacucagaacuacuauccuuaauaaacgauaugccaauaacaaacgaucaaaaaaaacuaauguccaacaacguacaaauaguaagacaacaaucauacucaaucaugugcauuauaaaagaagaagucuuagcauacguaguacaauuaccacuauacgguguaauagauacaccauguuggaaauuacacacaagcccacuaugcacaacuaacacaaaagaaggcucaaauauauguuuaacaagaacagaccgagguugguacugcgacaaugcaggaucaguaucauucuuuccacaagcagaaacauguaaaguucaauccaacagaguauucugcgacacaaugaacuccagaacacuaccuucagaaguaaaccucuguaacguagacauauuuaaucccaaguacgacugcaaaauaaugacaucgaaaacagacguaagcuccucagugauaacaucccucggcgccaucguauccuguuacgguaaaacuaaauguaccgccucaaacaaaaaccgcgguauuauaaaaacuuuuucuaauggcugcgauuacguaagcaacaaaggcgucgacacaguuuccguaggaaacacacuauacugcguaaacaaacaagaagguaaaucucuauacguaaaaggagaaccaauaauaaauuucuaugauccuuuaguauucccauccgaugaauuugacgccucuaucucacaagucaacgaaaaaauaaaucaaucauuagcauucauacgaaaaucagacgaacuacuacacaacguaaacgcaggaaaaucaacaaccaacauaaugauaaccacaauaauaauaguuauuauagugauacuauuauccuuaauugcagucggacuauuauuauacuguaaagcacgcuaaggacuaguaauaaggaaacuguaugaaugucugugggcaggaagugaagagauccuucuguaaagguuuuuggaauuaugucugcugaauaauaaacuuuuuugaaauaauaaaucugguagaaaaaugagaucuaaaaaaaaaaaaaaaaaaaaaaaaaaaaaaaaaaaaaaaaaaaaaaaaaaaaaaaaaaaaaaaaugcaucccccccccccccccccccccccccccccccaaaggcucuuuucagagccaccagaauu

SEQ ID NO: 5101 - RNA, 1898 nt, Artificial Sequence
  mRNA product Design d-2 comprising derived and/or modified sequence from HRSV(A2)__F-del_DSCav1_mut4 (opt11)
gggagagcggcucggccauuuugucccagucaguccggaggcugcggcugcagaaguaccgccugcggaguaacugcaaagaagcuuaccauggaacuccucauccucaaagccaaugccaucaccacaauccugacagcaguaaccuucugcuucgcauccggacaaaacaucaccgaagaauuuuaccagucaaccugcuccgcugucucaaaaggcuaccucucagcccuucgcaccggcugguacaccucggucauaacaauagaacucuccaauaucaaagaaaacaaaugcaacggcacugacgccaagguaaaacucaucaaacaggaacucgauaaauacaagaacgccguaacagaacuacaacuacucaugcaaucaacaccggccaccggcuccgguuccgccauaugcuccggaguggccgugugcaagguccuccaccuugaaggggaaguuaacaaaaucaaaucagcccuccucuccacuaacaaagccguaguaucccuaagcaacgguguauccguccucaccuucaaaguacuagaccuaaagaauuauaucgacaaacaacuccuccccauacucaacaaacaauccugcuccauaagcaacaucgaaacagucaucgaguuccagcagaaaaacaaccgacuccucgaaauaacccgcgaguucucagucaacgccggagucaccacacccgucagcaccuacaugcugaccaacuccgaacuccucuccuuaaucaaugacaugcccaucaccaaugaccaaaagaaacucaugucaaacaacguccaaauaguacgccaacaauccuacuccaucaugugcaucauaaaagaagaaguacucgccuacgucguccaacucccccucuacggcguaaucgacacccccugcuggaaacuacacacaagcccccucugcaccacaaacacuaaagagggcuccaacaucugucuaacccgcaccgaucgaggcugguacugcgacaacgccggaucugucucauucuucccccaagccgaaaccugcaaaguccaauccaaccgcgucuucugcgacaccaugaacucgagaacccucccuuccgaagucaaccuaugcaacgucgacauuuucaaccccaaauacgacugcaaaaucaugaccucgaaaaccgacguaucauccagcgucaucaccagccuaggcgcaaucgugagcugcuacggcaaaaccaaaugcaccgcgagcaauaaaaaccgcgggaucaucaaaacuuucuccaacggcugcgacuacgucuccaacaagggagucgauaccgucuccguaggcaacacccucuacugcgucaacaaacaagaaggcaaaucacuauacguaaaaggcgagccaaucauaaacuucuacgacccucuaguuuucccauccgacgaguucgacgcuagcaucucccaagucaacgagaaaaucaaccaaucccucgcauucauccgcaaauccgacgaacuccuccacaacguaaacgcaggcaaaucaacuacuaauauaaugaucacaaccaucauaauagucauaaucguaauccuccuaucccucaucgccgucggacuacugcucuacugcaaagcccgcuaaggacuaguaauaaggaaacuguaugaaugucugugggcaggaagugaagagauccuucuguaaagguuuuuggaauuaugucugcugaauaauaaacuuuuuugaaauaauaaaucugguagaaaaaugagaucuaaaaaaaaaaaaaaaaaaaaaaaaaaaaaaaaaaaaaaaaaaaaaaaaaaaaaaaaaaaaaaaaugcaucccccccccccccccccccccccccccccccaaaggcucuuuucagagccaccagaauu

SEQ ID NO: 5102 - RNA, 2214 nt, Artificial Sequence
  mRNA product Design d-3 comprising derived and/or modified sequence from HRSV(A2)__F-del_DSCav1_mut4 (opt1)
gggagagggcgcuuggcuugcaaggacccugagcugcggcauugaagcacacccaacccaacucgacugaagucagccucacugaaccggaucugagaaucuucucucucugggcuugccagggcucuccgaaccuagcuagcauccucuucaauuccaacuagaaagcuuaccauggagcugcucauccugaaggccaacgccaucaccaccauccugacggcggugaccuucugcuucgccagcggccagaacaucaccgaggaguucuaccaguccacgugcagcgccgucuccaagggguaccucagcgcccugcggaccggcugguacaccuccgugaucaccaucgagcugagcaacaucaaggagaacaagugcaacgggaccgacgccaaggugaagcucaucaagcaggagcuggacaaguacaagaacgcggucacggagcugcagcuccugaugcaguccaccccggcaaccggcuccggcuccgccaucugcagcggcgucgccgugugcaaggugcugcaccucgagggggaggucaacaagaucaagagcgcccugcuguccaccaacaaggccguggugagccucuccaacggcgucagcgugcugaccuucaaggugcuggaccucaagaacuacaucgacaagcagcugcugcccauccugaacaagcagagcugcuccaucagcaacaucgagacggugaucgaguuccagcagaagaacaaccggcuccuggagaucacccgcgaguucagcgugaacgccggggucaccacccccguguccacguacaugcugaccaacagcgagcuccugucccugaucaacgacaugccgaucaccaacgaccagaagaagcucaugagcaacaacgugcagaucguccggcagcaguccuacagcaucaugugcaucaucaaggaggaggugcuggcguacgugguccagcugccccucuacggcgugaucgacacccccugcuggaagcugcacacgagcccccugugcaccaccaacaccaaggagggguccaacaucugccucacgcgcaccgaccggggcugguacugcgacaacgccggcagcgucuccuucuucccgcaggccgagaccugcaaggugcagagcaaccgcguguucugcgacaccaugaacucccggacgcugcccagcgagguaaaccucugcaacgucgacaucuucaaccccaaguacgacugcaagaucaugaccuccaagaccgacgugagcuccagcgugaucaccucccugggggccaucgucagcugcuacggcaagacgaagugcaccgccagcaacaagaaccgggggaucaucaagaccuucuccaacggcugcgacuacgugagcaacaagggcguggacaccguguccgucgggaacacccuguacugcgugaacaagcaggagggcaagagccucuacgugaagggggagcccaucaucaacuucuacgacccgcuggucuuccccuccgacgaguucgacgcgagcaucucccaggugaacgagaagaucaaccagagccuggccuucauccgcaaguccgacgagcugcuccacaacgugaacgccggcaagagcacgaccaacaucaugaucaccaccaucaucaucgucaucaucgugauccugcugucccucaucgccguggggcugcugcucuacugcaaggcccggugaggacuagugaagggaacacccaaauuuaauucagccuuaagcacaauuaauuaagagugaaacguaauuguacaagcaguuggucacccaccauagggcaugaucaacaccgcaaccuuuccuuuuucccccagugauucugaaaaaccccucuucccuucagcuugcuuagauguuccaaauuuaguaagcuuaaggcggccuacagaagaaaaagaaaaaaaaggccacaaaaguucccucucacuuucaguaaauaaaauaaaagcagcaacagaaauaaagaaauaaaugaaauucaaaaugaaauaaauauuguguugugcagcauuaaaaaaucaauaaaaauuaaaaaugagcaagaucuaaaaaaaaaaaaaaaaaaaaaaaaaaaaaaaaaaaaaaaaaaaaaaaaaaaaaaaaaaaaaaaaugcaucccccccccccccccccccccccccccccccaaaggcucuuuucagagccaccagaauu

SEQ ID NO: 5103 - RNA, 2214 nt, Artificial Sequence
  mRNA product Design d-3 comprising derived and/or modified sequence from HRSV(A2)__F-del_DSCav1_mut4 (opt1)
gggagagggcgcuuggcuugcaaggacccugagcugcggcauugaagcacacccaacccaacucgacugaagucagccucacugaaccggaucugagaaucuucucucucugggcuugccagggcucuccgaaccuagcuagcauccucuucaauuccaacuagaaagcuuaccauggagcugcucauccugaaggccaacgccaucaccaccauccugacggcggugaccuucugcuucgccagcggccagaacaucaccgaggaguucuaccaguccacgugcagcgccgucuccaagggguaccucagcgcccugcgcaccggcugguacaccuccgugaucaccaucgagcugagcaacaucaaggagaacaagugcaacgggaccgacgccaaggugaagcucaucaagcaggagcuggacaaguacaagaacgcggucacggagcugcagcuccugaugcaguccacccccgccaccggcagcggguccgccaucugcagcggcguggccgugugcaagguccugcaccucgagggcgaggugaacaagaucaaguccgcgcugcugagcaccaacaaggccguggucucccucagcaacgggguguccgugcugacguucaagguccuggaccucaagaacuacaucgacaagcagcugcugccgauccucaacaagcagagcugcuccaucagcaacaucgagaccgugaucgaguuccagcagaagaacaaccggcugcuggagaucacccgcgaguucuccgugaacgccggcgucaccacgcccgugagcaccuacaugcucaccaacagcgagcugcugucccucaucaacgacaugcccaucaccaacgaccagaagaagcugaugagcaacaacgugcagaucguccggcagcaguccuacagcaucaugugcaucaucaaggaggaggugcuggccuacgugguccagcucccccuguacggggugaucgacacgccgugcuggaagcugcacaccagcccccucugcaccaccaacacgaaggagggcuccaacaucugccugacccgcaccgaccgggggugguacugcgacaacgccggcuccgugagcuucuucccccaggcggagaccugcaagguccaguccaaccgcguguucugcgacacgaugaacagccggacccuccccuccgaggucaaccugugcaacguggacaucuucaacccgaaguacgacugcaagaucaugaccagcaagaccgacguguccagcuccgucaucacgagccugggcgccaucguguccugcuacgggaagaccaagugcaccgccagcaacaagaaccggggcaucaucaagaccuucuccaacgggugcgacuacgugagcaacaagggcgucgacacggugagcgugggcaacacccucuacugcgucaacaagcaggaggggaagucccuguacgugaagggcgagcccaucaucaacuucuacgacccccugguguuccccagcgacgaguucgacgccuccaucagccaggucaacgagaagaucaaccagucccucgccuucauccgcaagagcgacgagcugcugcacaacgugaacgcggggaaguccaccaccaacaucaugaucaccacgaucaucaucgugaucaucgucauccuccugagccugaucgccgugggccuccugcuguacugcaaggcccggugaggacuagugaagggaacacccaaauuuaauucagccuuaagcacaauuaauuaagagugaaacguaauuguacaagcaguuggucacccaccauagggcaugaucaacaccgcaaccuuuccuuuuucccccagugauucugaaaaaccccucuucccuucagcuugcuuagauguuccaaauuuaguaagcuuaaggcggccuacagaagaaaaagaaaaaaaaggccacaaaaguucccucucacuuucaguaaauaaaauaaaagcagcaacagaaauaaagaaauaaaugaaauucaaaaugaaauaaauauuguguugugcagcauuaaaaaaucaauaaaaauuaaaaaugagcaagaucuaaaaaaaaaaaaaaaaaaaaaaaaaaaaaaaaaaaaaaaaaaaaaaaaaaaaaaaaaaaaaaaaugcaucccccccccccccccccccccccccccccccaaaggcucuuuucagagccaccagaauu

SEQ ID NO: 5104 - RNA, 2214 nt, Artificial Sequence
  mRNA product Design d-3 comprising derived and/or modified sequence from HRSV(A2)__F-del_DSCav1_mut4 (opt2)
gggagagggcgcuuggcuugcaaggacccugagcugcggcauugaagcacacccaacccaacucgacugaagucagccucacugaaccggaucugagaaucuucucucucugggcuugccagggcucuccgaaccuagcuagcauccucuucaauuccaacuagaaagcuuaccauggagcuccucauccucaaggccaacgccaucaccaccauccucaccgccgucaccuucugcuucgccuccggccagaacaucaccgaggaguucuaccaguccaccugcuccgccgucuccaagggcuaccucuccgcccuccgcaccggcugguacaccuccgucaucaccaucgagcucuccaacaucaaggagaacaagugcaacggcaccgacgccaaggucaagcucaucaagcaggagcucgacaaguacaagaacgccgucaccgagcuccagcuccucaugcaguccacccccgccaccggcuccggcuccgccaucugcuccggcgucgccgucugcaagguccuccaccucgagggcgaggucaacaagaucaaguccgcccuccucuccaccaacaaggccgucgucucccucuccaacggcgucuccguccucaccuucaagguccucgaccucaagaacuacaucgacaagcagcuccuccccauccucaacaagcaguccugcuccaucuccaacaucgagaccgucaucgaguuccagcagaagaacaaccgccuccucgagaucacccgcgaguucuccgucaacgccggcgucaccacccccgucuccaccuacaugcucaccaacuccgagcuccucucccucaucaacgacaugcccaucaccaacgaccagaagaagcucauguccaacaacguccagaucguccgccagcaguccuacuccaucaugugcaucaucaaggaggagguccucgccuacgucguccagcucccccucuacggcgucaucgacacccccugcuggaagcuccacaccuccccccucugcaccaccaacaccaaggagggcuccaacaucugccucacccgcaccgaccgcggcugguacugcgacaacgccggcuccgucuccuucuucccccaggccgagaccugcaagguccaguccaaccgcgucuucugcgacaccaugaacucccgcacccuccccuccgaggucaaccucugcaacgucgacaucuucaaccccaaguacgacugcaagaucaugaccuccaagaccgacgucuccuccuccgucaucaccucccucggcgccaucgucuccugcuacggcaagaccaagugcaccgccuccaacaagaaccgcggcaucaucaagaccuucuccaacggcugcgacuacgucuccaacaagggcgucgacaccgucuccgucggcaacacccucuacugcgucaacaagcaggagggcaagucccucuacgucaagggcgagcccaucaucaacuucuacgacccccucgucuuccccuccgacgaguucgacgccuccaucucccaggucaacgagaagaucaaccagucccucgccuucauccgcaaguccgacgagcuccuccacaacgucaacgccggcaaguccaccaccaacaucaugaucaccaccaucaucaucgucaucaucgucauccuccucucccucaucgccgucggccuccuccucuacugcaaggcccgcugaggacuagugaagggaacacccaaauuuaauucagccuuaagcacaauuaauuaagagugaaacguaauuguacaagcaguuggucacccaccauagggcaugaucaacaccgcaaccuuuccuuuuucccccagugauucugaaaaaccccucuucccuucagcuugcuuagauguuccaaauuuaguaagcuuaaggcggccuacagaagaaaaagaaaaaaaaggccacaaaaguucccucucacuuucaguaaauaaaauaaaagcagcaacagaaauaaagaaauaaaugaaauucaaaaugaaauaaauauuguguugugcagcauuaaaaaaucaauaaaaauuaaaaaugagcaagaucuaaaaaaaaaaaaaaaaaaaaaaaaaaaaaaaaaaaaaaaaaaaaaaaaaaaaaaaaaaaaaaaaugcaucccccccccccccccccccccccccccccccaaaggcucuuuucagagccaccagaauu

SEQ ID NO: 5105 - RNA, 2214 nt, Artificial Sequence
  mRNA product Design d-3 comprising derived and/or modified sequence from HRSV(A2)__F-del_DSCav1_mut4 (opt3)
gggagagggcgcuuggcuugcaaggacccugagcugcggcauugaagcacacccaacccaacucgacugaagucagccucacugaaccggaucugagaaucuucucucucugggcuugccagggcucuccgaaccuagcuagcauccucuucaauuccaacuagaaagcuuaccauggagcugcucauccuuaaggccaacgcuauuaccacaauacugacugcagugacguucugcuuugccagcggccagaauaucaccgaagaguucuaccaauccacauguucugcggucucaaaaggguauuugagugcuuuaagaacuggaugguacaccagcguuauuacaaucgaacuguccaacauuaaggagaauaaaugcaacgguaccgacgccaaggugaaacuaaucaagcaggaacucgauaaguauaaaaaugcaguaacugagcugcagcuucugaugcagucuacacccgccaccggcucggggucagcuauauguagcggaguggcagucugcaagguguugcaccucgagggcgaaguuaacaaaaucaagagugcccugcuguccacgaauaaagcuguggucucucucagcaacgguguguccguauuaacuuuuaagguucuggaccuuaagaauuacauugauaaacaauugcugccuauccuaaacaagcagucauguaguauuagcaauaucgagaccgugauagaguuccagcagaaaaacaauaggcuccuggaaauuacacgggaguuuucugucaacgccggggugacuaccccaguguccacauauaugcuuaccaauucagaacuguugagccucaucaacgacaugccgauuacgaacgaucaaaagaaacugaugaguaauaacguccagaucguucgccagcagucuuacuccaucaugugcauuauaaaggaggaaguguuagcguauguagugcaacugccccucuacggagucaucgacacuccuuguuggaaacuucauacaagcccacugugcaccacuaauacaaaggagggcucgaacauuuguuugacccgaacggaucguggcugguacugcgacaaugcagggucuguguccuucuuuccccaggccgaaaccuguaagguucagucaaacagaguguucugcgauacaaugaauaguagaacucugccuagcgaggucaaccucugcaauguggacaucuuuaacccaaaauaugauuguaagauaaugaccuccaaaacagacguaucuagcucaguuauuaccagucugggagcuaucguguccugcuacgguaagacuaaauguacagccagcaauaagaacaggggcaucauuaagaccuucucuaaugggugcgauuaugucucaaacaaaggaguggacacugucagugugggcaauacgcuuuacuguguuaacaagcaagaggguaaaagccuguaugugaagggggaacccaucauuaacuuuuacgacccuuugguauucccauccgaugaguuugacgcaucuauaucgcaggucaaugagaaaaucaaccagagccucgcuuucauucggaaguccgaugaacuguuacacaaugugaacgccggaaagucaacaaccaauaucaugaucacuaccauuauaaucguuauuaucgugauucugcuaagucucaucgcggucggccugcuuuuguauugcaaagcccgcugaggacuagugaagggaacacccaaauuuaauucagccuuaagcacaauuaauuaagagugaaacguaauuguacaagcaguuggucacccaccauagggcaugaucaacaccgcaaccuuuccuuuuucccccagugauucugaaaaaccccucuucccuucagcuugcuuagauguuccaaauuuaguaagcuuaaggcggccuacagaagaaaaagaaaaaaaaggccacaaaaguucccucucacuuucaguaaauaaaauaaaagcagcaacagaaauaaagaaauaaaugaaauucaaaaugaaauaaauauuguguugugcagcauuaaaaaaucaauaaaaauuaaaaaugagcaagaucuaaaaaaaaaaaaaaaaaaaaaaaaaaaaaaaaaaaaaaaaaaaaaaaaaaaaaaaaaaaaaaaaugcaucccccccccccccccccccccccccccccccaaaggcucuuuucagagccaccagaauu

SEQ ID NO: 5106 - RNA, 2214 nt, Artificial Sequence
  mRNA product Design d-3 comprising derived and/or modified sequence from HRSV(A2)__F-del_DSCav1_mut4 (opt4)
gggagagggcgcuuggcuugcaaggacccugagcugcggcauugaagcacacccaacccaacucgacugaagucagccucacugaaccggaucugagaaucuucucucucugggcuugccagggcucuccgaaccuagcuagcauccucuucaauuccaacuagaaagcuuaccauggagcugcugauccugaaggccaacgccaucaccaccauccugaccgccgugaccuucugcuucgccagcggccagaacaucaccgaggaguucuaccagagcaccugcagcgccgugagcaagggcuaccugagcgcccugagaaccggcugguacaccagcgugaucaccaucgagcugagcaacaucaaggagaacaagugcaacggcaccgacgccaaggugaagcugaucaagcaggagcuggacaaguacaagaacgccgugaccgagcugcagcugcugaugcagagcacccccgccaccggcagcggcagcgccaucugcagcggcguggccgugugcaaggugcugcaccuggagggcgaggugaacaagaucaagagcgcccugcugagcaccaacaaggccguggugagccugagcaacggcgugagcgugcugaccuucaaggugcuggaccugaagaacuacaucgacaagcagcugcugcccauccugaacaagcagagcugcagcaucagcaacaucgagaccgugaucgaguuccagcagaagaacaacagacugcuggagaucaccagagaguucagcgugaacgccggcgugaccacccccgugagcaccuacaugcugaccaacagcgagcugcugagccugaucaacgacaugcccaucaccaacgaccagaagaagcugaugagcaacaacgugcagaucgugagacagcagagcuacagcaucaugugcaucaucaaggaggaggugcuggccuacguggugcagcugccccuguacggcgugaucgacacccccugcuggaagcugcacaccagcccccugugcaccaccaacaccaaggagggcagcaacaucugccugaccagaaccgacagaggcugguacugcgacaacgccggcagcgugagcuucuucccccaggccgagaccugcaaggugcagagcaacagaguguucugcgacaccaugaacagcagaacccugcccagcgaggugaaccugugcaacguggacaucuucaaccccaaguacgacugcaagaucaugaccagcaagaccgacgugagcagcagcgugaucaccagccugggcgccaucgugagcugcuacggcaagaccaagugcaccgccagcaacaagaacagaggcaucaucaagaccuucagcaacggcugcgacuacgugagcaacaagggcguggacaccgugagcgugggcaacacccuguacugcgugaacaagcaggagggcaagagccuguacgugaagggcgagcccaucaucaacuucuacgacccccugguguuccccagcgacgaguucgacgccagcaucagccaggugaacgagaagaucaaccagagccuggccuucaucagaaagagcgacgagcugcugcacaacgugaacgccggcaagagcaccaccaacaucaugaucaccaccaucaucaucgugaucaucgugauccugcugagccugaucgccgugggccugcugcuguacugcaaggccagaugaggacuagugaagggaacacccaaauuuaauucagccuuaagcacaauuaauuaagagugaaacguaauuguacaagcaguuggucacccaccauagggcaugaucaacaccgcaaccuuuccuuuuucccccagugauucugaaaaaccccucuucccuucagcuugcuuagauguuccaaauuuaguaagcuuaaggcggccuacagaagaaaaagaaaaaaaaggccacaaaaguucccucucacuuucaguaaauaaaauaaaagcagcaacagaaauaaagaaauaaaugaaauucaaaaugaaauaaauauuguguugugcagcauuaaaaaaucaauaaaaauuaaaaaugagcaagaucuaaaaaaaaaaaaaaaaaaaaaaaaaaaaaaaaaaaaaaaaaaaaaaaaaaaaaaaaaaaaaaaaugcaucccccccccccccccccccccccccccccccaaaggcucuuuucagagccaccagaauu

SEQ ID NO: 5107 - RNA, 2214 nt, Artificial Sequence
  mRNA product Design d-3 comprising derived and/or modified sequence from HRSV(A2)__F-del_DSCav1_mut4 (opt5)
gggagagggcgcuuggcuugcaaggacccugagcugcggcauugaagcacacccaacccaacucgacugaagucagccucacugaaccggaucugagaaucuucucucucugggcuugccagggcucuccgaaccuagcuagcauccucuucaauuccaacuagaaagcuuaccauggagcugcucauccugaaggccaacgcuauuaccacaauccuuacggccgugaccuucugcuuugcgagcggccagaauauuacagaagaguucuaccaauccaccuguucugcugucagcaaaggguaucuguccgcccucagaacaggaugguacaccucuguuaucacaauugaacugagcaacaucaaggagaauaaaugcaacggcaccgacgccaaggugaaacuuaucaagcaggaacuggauaaguauaaaaaugcugugacggagcuccagcugcugaugcaguccacccccgccacagggucuggaagcgcuauuuguuccggcgucgccgugugcaagguucuccaccuggagggggaagugaacaaaaucaagagcgcgcuucugucuaccaauaaagccgucgugucccucagcaacggaguuucugugcugacauuuaagguccuugaccugaagaauuacauugauaaacaacuccugccuauccugaacaagcaguccuguagcauuucuaauaucgagaccgugauugaguuccagcagaaaaacaaucggcuccuggaaaucacgcgcgaguuuuccgugaacgcuggcgucacaaccccgguuagcacauauaugcuuaccaauuccgaacugcucucucugaucaacgacaugcccauuaccaacgaucaaaagaaacuuaugagcaauaacgugcagaucgugagacagcaguccuacagcauuaugugcaucauuaaggaggaaguccuggccuaugugguucaacucccucuguacggcgugaucgacacacccuguuggaaacugcauacgucuccucucugcaccacaaauaccaaggagggguccaacaucugucugacacggaccgaucgcggaugguacugcgacaaugcuggcagcgucucuuucuuuccccaggccgaaacguguaaggugcagagcaacagaguuuucugcgauacaaugaacuccagaacccugccuucugaggugaaucucugcaaugucgacauuuuuaacccgaaauaugauuguaagaucaugaccagcaaaacagacguguccagcucugucauuaccucccugggggcgaucgugagcugcuacggaaagacaaaauguacggccucuaauaagaaccggggcauuaucaagaccuucuccaaugggugcgauuauguuagcaacaaaggaguggacacagucuccgugggcaauacccuuuacuguguuaacaagcaagagggcaaaucucuguaugugaagggggaacccaucauuaacuuuuacgacccucucgucuuccccagcgaugaguuugacgcuuccaucucucaggugaaugagaaaauuaaccagagccuggccuucauccgcaaguccgaugaacugcuccacaaugugaacgcuggaaagagcacaaccaauauuaugaucacgaccauuaucaucguuauuaucgucauucugcuuucucugaucgccgugggccuccugcuguauugcaaagccagaugaggacuagugaagggaacacccaaauuuaauucagccuuaagcacaauuaauuaagagugaaacguaauuguacaagcaguuggucacccaccauagggcaugaucaacaccgcaaccuuuccuuuuucccccagugauucugaaaaaccccucuucccuucagcuugcuuagauguuccaaauuuaguaagcuuaaggcggccuacagaagaaaaagaaaaaaaaggccacaaaaguucccucucacuuucaguaaauaaaauaaaagcagcaacagaaauaaagaaauaaaugaaauucaaaaugaaauaaauauuguguugugcagcauuaaaaaaucaauaaaaauuaaaaaugagcaagaucuaaaaaaaaaaaaaaaaaaaaaaaaaaaaaaaaaaaaaaaaaaaaaaaaaaaaaaaaaaaaaaaaugcaucccccccccccccccccccccccccccccccaaaggcucuuuucagagccaccagaauu

SEQ ID NO: 5108 - RNA, 2214 nt, Artificial Sequence
  mRNA product Design d-3 comprising derived and/or modified sequence from HRSV(A2)__F-del_DSCav1_mut4 (opt6)
gggagagggcgcuuggcuugcaaggacccugagcugcggcauugaagcacacccaacccaacucgacugaagucagccucacugaaccggaucugagaaucuucucucucugggcuugccagggcucuccgaaccuagcuagcauccucuucaauuccaacuagaaagcuuaccauggaacuuuuaauacuaaaagcuaacgccauaaccacuauacuaacagcagucacauucugcuucgcaucaggccaaaacauaaccgaagaauuuuaccaauccacuuguucagcagucuccaaaggauauuuauccgcacuucguacaggaugguauacaucaguaauaacaauagaacucuccaacauaaaagaaaauaaaugcaacggcaccgacgcaaaaguaaaacucaucaaacaagaauuagacaaauacaagaacgccguaacagaacuacaauuacuaaugcaaucaacacccgccacaggaucaggaucugcaauaugcucuggaguagcaguaugcaaaguauuacaccuagaaggagaaguaaacaaaaucaaaagcgcacuacuauccacaaacaaagcuguaguaucacuaucaaacggaguaucaguauuaacuuucaaaguacuugaucuaaaaaacuacauagacaaacaacuacuacccauauuaaacaaacaaucaugcucaauaagcaauauagaaacaguaauagaauuucaacaaaaaaacaacagacuacuagaaaucacaagggaauuuucaguaaaugccgguguuacaaccccaguaucaacauacaugcuaacuaacucagaacuacuauccuuaauaaacgauaugccaauaacaaacgaucaaaaaaaacuaauguccaacaacguacaaauaguaagacaacaaucauacucaaucaugugcauuauaaaagaagaagucuuagcauacguaguacaauuaccacuauacgguguaauagauacaccauguuggaaauuacacacaagcccacuaugcacaacuaacacaaaagaaggcucaaauauauguuuaacaagaacagaccgagguugguacugcgacaaugcaggaucaguaucauucuuuccacaagcagaaacauguaaaguucaauccaacagaguauucugcgacacaaugaacuccagaacacuaccuucagaaguaaaccucuguaacguagacauauuuaaucccaaguacgacugcaaaauaaugacaucgaaaacagacguaagcuccucagugauaacaucccucggcgccaucguauccuguuacgguaaaacuaaauguaccgccucaaacaaaaaccgcgguauuauaaaaacuuuuucuaauggcugcgauuacguaagcaacaaaggcgucgacacaguuuccguaggaaacacacuauacugcguaaacaaacaagaagguaaaucucuauacguaaaaggagaaccaauaauaaauuucuaugauccuuuaguauucccauccgaugaauuugacgccucuaucucacaagucaacgaaaaaauaaaucaaucauuagcauucauacgaaaaucagacgaacuacuacacaacguaaacgcaggaaaaucaacaaccaacauaaugauaaccacaauaauaauaguuauuauagugauacuauuauccuuaauugcagucggacuauuauuauacuguaaagcacgcuaaggacuagugaagggaacacccaaauuuaauucagccuuaagcacaauuaauuaagagugaaacguaauuguacaagcaguuggucacccaccauagggcaugaucaacaccgcaaccuuuccuuuuucccccagugauucugaaaaaccccucuucccuucagcuugcuuagauguuccaaauuuaguaagcuuaaggcggccuacagaagaaaaagaaaaaaaaggccacaaaaguucccucucacuuucaguaaauaaaauaaaagcagcaacagaaauaaagaaauaaaugaaauucaaaaugaaauaaauauuguguugugcagcauuaaaaaaucaauaaaaauuaaaaaugagcaagaucuaaaaaaaaaaaaaaaaaaaaaaaaaaaaaaaaaaaaaaaaaaaaaaaaaaaaaaaaaaaaaaaaugcaucccccccccccccccccccccccccccccccaaaggcucuuuucagagccaccagaauu

SEQ ID NO: 5109 - RNA, 2214 nt, Artificial Sequence
  mRNA product Design d-3 comprising derived and/or modified sequence from HRSV(A2)__F-del_DSCav1_mut4 (opt11)
gggagagggcgcuuggcuugcaaggacccugagcugcggcauugaagcacacccaacccaacucgacugaagucagccucacugaaccggaucugagaaucuucucucucugggcuugccagggcucuccgaaccuagcuagcauccucuucaauuccaacuagaaagcuuaccauggaacuccucauccucaaagccaaugccaucaccacaauccugacagcaguaaccuucugcuucgcauccggacaaaacaucaccgaagaauuuuaccagucaaccugcuccgcugucucaaaaggcuaccucucagcccuucgcaccggcugguacaccucggucauaacaauagaacucuccaauaucaaagaaaacaaaugcaacggcacugacgccaagguaaaacucaucaaacaggaacucgauaaauacaagaacgccguaacagaacuacaacuacucaugcaaucaacaccggccaccggcuccgguuccgccauaugcuccggaguggccgugugcaagguccuccaccuugaaggggaaguuaacaaaaucaaaucagcccuccucuccacuaacaaagccguaguaucccuaagcaacgguguauccguccucaccuucaaaguacuagaccuaaagaauuauaucgacaaacaacuccuccccauacucaacaaacaauccugcuccauaagcaacaucgaaacagucaucgaguuccagcagaaaaacaaccgacuccucgaaauaacccgcgaguucucagucaacgccggagucaccacacccgucagcaccuacaugcugaccaacuccgaacuccucuccuuaaucaaugacaugcccaucaccaaugaccaaaagaaacucaugucaaacaacguccaaauaguacgccaacaauccuacuccaucaugugcaucauaaaagaagaaguacucgccuacgucguccaacucccccucuacggcguaaucgacacccccugcuggaaacuacacacaagcccccucugcaccacaaacacuaaagagggcuccaacaucugucuaacccgcaccgaucgaggcugguacugcgacaacgccggaucugucucauucuucccccaagccgaaaccugcaaaguccaauccaaccgcgucuucugcgacaccaugaacucgagaacccucccuuccgaagucaaccuaugcaacgucgacauuuucaaccccaaauacgacugcaaaaucaugaccucgaaaaccgacguaucauccagcgucaucaccagccuaggcgcaaucgugagcugcuacggcaaaaccaaaugcaccgcgagcaauaaaaaccgcgggaucaucaaaacuuucuccaacggcugcgacuacgucuccaacaagggagucgauaccgucuccguaggcaacacccucuacugcgucaacaaacaagaaggcaaaucacuauacguaaaaggcgagccaaucauaaacuucuacgacccucuaguuuucccauccgacgaguucgacgcuagcaucucccaagucaacgagaaaaucaaccaaucccucgcauucauccgcaaauccgacgaacuccuccacaacguaaacgcaggcaaaucaacuacuaauauaaugaucacaaccaucauaauagucauaaucguaauccuccuaucccucaucgccgucggacuacugcucuacugcaaagcccgcuaaggacuagugaagggaacacccaaauuuaauucagccuuaagcacaauuaauuaagagugaaacguaauuguacaagcaguuggucacccaccauagggcaugaucaacaccgcaaccuuuccuuuuucccccagugauucugaaaaaccccucuucccuucagcuugcuuagauguuccaaauuuaguaagcuuaaggcggccuacagaagaaaaagaaaaaaaaggccacaaaaguucccucucacuuucaguaaauaaaauaaaagcagcaacagaaauaaagaaauaaaugaaauucaaaaugaaauaaauauuguguugugcagcauuaaaaaaucaauaaaaauuaaaaaugagcaagaucuaaaaaaaaaaaaaaaaaaaaaaaaaaaaaaaaaaaaaaaaaaaaaaaaaaaaaaaaaaaaaaaaugcaucccccccccccccccccccccccccccccccaaaggcucuuuucagagccaccagaauu

SEQ ID NO: 5110 - RNA, 1897 nt, Artificial Sequence
  mRNA product Design d-4 comprising derived and/or modified sequence from HRSV(A2)__F-del_DSCav1_mut4 (opt1)
gggagagucccgcagucggcguccagcggcucugcuuguucgugugugugucguugcaggccuuauucaagcuuaccauggagcugcucauccugaaggccaacgccaucaccaccauccugacggcggugaccuucugcuucgccagcggccagaacaucaccgaggaguucuaccaguccacgugcagcgccgucuccaagggguaccucagcgcccugcggaccggcugguacaccuccgugaucaccaucgagcugagcaacaucaaggagaacaagugcaacgggaccgacgccaaggugaagcucaucaagcaggagcuggacaaguacaagaacgcggucacggagcugcagcuccugaugcaguccaccccggcaaccggcuccggcuccgccaucugcagcggcgucgccgugugcaaggugcugcaccucgagggggaggucaacaagaucaagagcgcccugcuguccaccaacaaggccguggugagccucuccaacggcgucagcgugcugaccuucaaggugcuggaccucaagaacuacaucgacaagcagcugcugcccauccugaacaagcagagcugcuccaucagcaacaucgagacggugaucgaguuccagcagaagaacaaccggcuccuggagaucacccgcgaguucagcgugaacgccggggucaccacccccguguccacguacaugcugaccaacagcgagcuccugucccugaucaacgacaugccgaucaccaacgaccagaagaagcucaugagcaacaacgugcagaucguccggcagcaguccuacagcaucaugugcaucaucaaggaggaggugcuggcguacgugguccagcugccccucuacggcgugaucgacacccccugcuggaagcugcacacgagcccccugugcaccaccaacaccaaggagggguccaacaucugccucacgcgcaccgaccggggcugguacugcgacaacgccggcagcgucuccuucuucccgcaggccgagaccugcaaggugcagagcaaccgcguguucugcgacaccaugaacucccggacgcugcccagcgagguaaaccucugcaacgucgacaucuucaaccccaaguacgacugcaagaucaugaccuccaagaccgacgugagcuccagcgugaucaccucccugggggccaucgucagcugcuacggcaagacgaagugcaccgccagcaacaagaaccgggggaucaucaagaccuucuccaacggcugcgacuacgugagcaacaagggcguggacaccguguccgucgggaacacccuguacugcgugaacaagcaggagggcaagagccucuacgugaagggggagcccaucaucaacuucuacgacccgcuggucuuccccuccgacgaguucgacgcgagcaucucccaggugaacgagaagaucaaccagagccuggccuucauccgcaaguccgacgagcugcuccacaacgugaacgccggcaagagcacgaccaacaucaugaucaccaccaucaucaucgucaucaucgugauccugcugucccucaucgccguggggcugcugcucuacugcaaggcccggugaggacuaguggaagcauuuuccuggcugauuaaaagaaauuacucagcuauggucaucuguuccuguuagaaggcuaugcagcauauuauauacuaugcgcauguuaugaaaugcauaauaaaaaauuuuaaaaaaucuaaaagaucuaaaaaaaaaaaaaaaaaaaaaaaaaaaaaaaaaaaaaaaaaaaaaaaaaaaaaaaaaaaaaaaaugcaucccccccccccccccccccccccccccccccaaaggcucuuuucagagccaccagaauu

SEQ ID NO: 5111 - RNA, 1897 nt, Artificial Sequence
  mRNA product Design d-4 comprising derived and/or modified sequence from HRSV(A2)__F-del_DSCav1_mut4 (opt1)
gggagagucccgcagucggcguccagcggcucugcuuguucgugugugugucguugcaggccuuauucaagcuuaccauggagcugcucauccugaaggccaacgccaucaccaccauccugacggcggugaccuucugcuucgccagcggccagaacaucaccgaggaguucuaccaguccacgugcagcgccgucuccaagggguaccucagcgcccugcgcaccggcugguacaccuccgugaucaccaucgagcugagcaacaucaaggagaacaagugcaacgggaccgacgccaaggugaagcucaucaagcaggagcuggacaaguacaagaacgcggucacggagcugcagcuccugaugcaguccacccccgccaccggcagcggguccgccaucugcagcggcguggccgugugcaagguccugcaccucgagggcgaggugaacaagaucaaguccgcgcugcugagcaccaacaaggccguggucucccucagcaacgggguguccgugcugacguucaagguccuggaccucaagaacuacaucgacaagcagcugcugccgauccucaacaagcagagcugcuccaucagcaacaucgagaccgugaucgaguuccagcagaagaacaaccggcugcuggagaucacccgcgaguucuccgugaacgccggcgucaccacgcccgugagcaccuacaugcucaccaacagcgagcugcugucccucaucaacgacaugcccaucaccaacgaccagaagaagcugaugagcaacaacgugcagaucguccggcagcaguccuacagcaucaugugcaucaucaaggaggaggugcuggccuacgugguccagcucccccuguacggggugaucgacacgccgugcuggaagcugcacaccagcccccucugcaccaccaacacgaaggagggcuccaacaucugccugacccgcaccgaccgggggugguacugcgacaacgccggcuccgugagcuucuucccccaggcggagaccugcaagguccaguccaaccgcguguucugcgacacgaugaacagccggacccuccccuccgaggucaaccugugcaacguggacaucuucaacccgaaguacgacugcaagaucaugaccagcaagaccgacguguccagcuccgucaucacgagccugggcgccaucguguccugcuacgggaagaccaagugcaccgccagcaacaagaaccggggcaucaucaagaccuucuccaacgggugcgacuacgugagcaacaagggcgucgacacggugagcgugggcaacacccucuacugcgucaacaagcaggaggggaagucccuguacgugaagggcgagcccaucaucaacuucuacgacccccugguguuccccagcgacgaguucgacgccuccaucagccaggucaacgagaagaucaaccagucccucgccuucauccgcaagagcgacgagcugcugcacaacgugaacgcggggaaguccaccaccaacaucaugaucaccacgaucaucaucgugaucaucgucauccuccugagccugaucgccgugggccuccugcuguacugcaaggcccggugaggacuaguggaagcauuuuccuggcugauuaaaagaaauuacucagcuauggucaucuguuccuguuagaaggcuaugcagcauauuauauacuaugcgcauguuaugaaaugcauaauaaaaaauuuuaaaaaaucuaaaagaucuaaaaaaaaaaaaaaaaaaaaaaaaaaaaaaaaaaaaaaaaaaaaaaaaaaaaaaaaaaaaaaaaugcaucccccccccccccccccccccccccccccccaaaggcucuuuucagagccaccagaauu

SEQ ID NO: 5112 - RNA, 1897 nt, Artificial Sequence
  mRNA product Design d-4 comprising derived and/or modified sequence from HRSV(A2)__F-del_DSCav1_mut4 (opt2)
gggagagucccgcagucggcguccagcggcucugcuuguucgugugugugucguugcaggccuuauucaagcuuaccauggagcuccucauccucaaggccaacgccaucaccaccauccucaccgccgucaccuucugcuucgccuccggccagaacaucaccgaggaguucuaccaguccaccugcuccgccgucuccaagggcuaccucuccgcccuccgcaccggcugguacaccuccgucaucaccaucgagcucuccaacaucaaggagaacaagugcaacggcaccgacgccaaggucaagcucaucaagcaggagcucgacaaguacaagaacgccgucaccgagcuccagcuccucaugcaguccacccccgccaccggcuccggcuccgccaucugcuccggcgucgccgucugcaagguccuccaccucgagggcgaggucaacaagaucaaguccgcccuccucuccaccaacaaggccgucgucucccucuccaacggcgucuccguccucaccuucaagguccucgaccucaagaacuacaucgacaagcagcuccuccccauccucaacaagcaguccugcuccaucuccaacaucgagaccgucaucgaguuccagcagaagaacaaccgccuccucgagaucacccgcgaguucuccgucaacgccggcgucaccacccccgucuccaccuacaugcucaccaacuccgagcuccucucccucaucaacgacaugcccaucaccaacgaccagaagaagcucauguccaacaacguccagaucguccgccagcaguccuacuccaucaugugcaucaucaaggaggagguccucgccuacgucguccagcucccccucuacggcgucaucgacacccccugcuggaagcuccacaccuccccccucugcaccaccaacaccaaggagggcuccaacaucugccucacccgcaccgaccgcggcugguacugcgacaacgccggcuccgucuccuucuucccccaggccgagaccugcaagguccaguccaaccgcgucuucugcgacaccaugaacucccgcacccuccccuccgaggucaaccucugcaacgucgacaucuucaaccccaaguacgacugcaagaucaugaccuccaagaccgacgucuccuccuccgucaucaccucccucggcgccaucgucuccugcuacggcaagaccaagugcaccgccuccaacaagaaccgcggcaucaucaagaccuucuccaacggcugcgacuacgucuccaacaagggcgucgacaccgucuccgucggcaacacccucuacugcgucaacaagcaggagggcaagucccucuacgucaagggcgagcccaucaucaacuucuacgacccccucgucuuccccuccgacgaguucgacgccuccaucucccaggucaacgagaagaucaaccagucccucgccuucauccgcaaguccgacgagcuccuccacaacgucaacgccggcaaguccaccaccaacaucaugaucaccaccaucaucaucgucaucaucgucauccuccucucccucaucgccgucggccuccuccucuacugcaaggcccgcugaggacuaguggaagcauuuuccuggcugauuaaaagaaauuacucagcuauggucaucuguuccuguuagaaggcuaugcagcauauuauauacuaugcgcauguuaugaaaugcauaauaaaaaauuuuaaaaaaucuaaaagaucuaaaaaaaaaaaaaaaaaaaaaaaaaaaaaaaaaaaaaaaaaaaaaaaaaaaaaaaaaaaaaaaaugcaucccccccccccccccccccccccccccccccaaaggcucuuuucagagccaccagaauu

SEQ ID NO: 5113 - RNA, 1897 nt, Artificial Sequence
  mRNA product Design d-4 comprising derived and/or modified sequence from HRSV(A2)__F-del_DSCav1_mut4 (opt3)
gggagagucccgcagucggcguccagcggcucugcuuguucgugugugugucguugcaggccuuauucaagcuuaccauggagcugcucauccuuaaggccaacgcuauuaccacaauacugacugcagugacguucugcuuugccagcggccagaauaucaccgaagaguucuaccaauccacauguucugcggucucaaaaggguauuugagugcuuuaagaacuggaugguacaccagcguuauuacaaucgaacuguccaacauuaaggagaauaaaugcaacgguaccgacgccaaggugaaacuaaucaagcaggaacucgauaaguauaaaaaugcaguaacugagcugcagcuucugaugcagucuacacccgccaccggcucggggucagcuauauguagcggaguggcagucugcaagguguugcaccucgagggcgaaguuaacaaaaucaagagugcccugcuguccacgaauaaagcuguggucucucucagcaacgguguguccguauuaacuuuuaagguucuggaccuuaagaauuacauugauaaacaauugcugccuauccuaaacaagcagucauguaguauuagcaauaucgagaccgugauagaguuccagcagaaaaacaauaggcuccuggaaauuacacgggaguuuucugucaacgccggggugacuaccccaguguccacauauaugcuuaccaauucagaacuguugagccucaucaacgacaugccgauuacgaacgaucaaaagaaacugaugaguaauaacguccagaucguucgccagcagucuuacuccaucaugugcauuauaaaggaggaaguguuagcguauguagugcaacugccccucuacggagucaucgacacuccuuguuggaaacuucauacaagcccacugugcaccacuaauacaaaggagggcucgaacauuuguuugacccgaacggaucguggcugguacugcgacaaugcagggucuguguccuucuuuccccaggccgaaaccuguaagguucagucaaacagaguguucugcgauacaaugaauaguagaacucugccuagcgaggucaaccucugcaauguggacaucuuuaacccaaaauaugauuguaagauaaugaccuccaaaacagacguaucuagcucaguuauuaccagucugggagcuaucguguccugcuacgguaagacuaaauguacagccagcaauaagaacaggggcaucauuaagaccuucucuaaugggugcgauuaugucucaaacaaaggaguggacacugucagugugggcaauacgcuuuacuguguuaacaagcaagaggguaaaagccuguaugugaagggggaacccaucauuaacuuuuacgacccuuugguauucccauccgaugaguuugacgcaucuauaucgcaggucaaugagaaaaucaaccagagccucgcuuucauucggaaguccgaugaacuguuacacaaugugaacgccggaaagucaacaaccaauaucaugaucacuaccauuauaaucguuauuaucgugauucugcuaagucucaucgcggucggccugcuuuuguauugcaaagcccgcugaggacuaguggaagcauuuuccuggcugauuaaaagaaauuacucagcuauggucaucuguuccuguuagaaggcuaugcagcauauuauauacuaugcgcauguuaugaaaugcauaauaaaaaauuuuaaaaaaucuaaaagaucuaaaaaaaaaaaaaaaaaaaaaaaaaaaaaaaaaaaaaaaaaaaaaaaaaaaaaaaaaaaaaaaaugcaucccccccccccccccccccccccccccccccaaaggcucuuuucagagccaccagaauu

SEQ ID NO: 5114 - RNA, 1897 nt, Artificial Sequence
  mRNA product Design d-4 comprising derived and/or modified sequence from HRSV(A2)__F-del_DSCav1_mut4 (opt4)
gggagagucccgcagucggcguccagcggcucugcuuguucgugugugugucguugcaggccuuauucaagcuuaccauggagcugcugauccugaaggccaacgccaucaccaccauccugaccgccgugaccuucugcuucgccagcggccagaacaucaccgaggaguucuaccagagcaccugcagcgccgugagcaagggcuaccugagcgcccugagaaccggcugguacaccagcgugaucaccaucgagcugagcaacaucaaggagaacaagugcaacggcaccgacgccaaggugaagcugaucaagcaggagcuggacaaguacaagaacgccgugaccgagcugcagcugcugaugcagagcacccccgccaccggcagcggcagcgccaucugcagcggcguggccgugugcaaggugcugcaccuggagggcgaggugaacaagaucaagagcgcccugcugagcaccaacaaggccguggugagccugagcaacggcgugagcgugcugaccuucaaggugcuggaccugaagaacuacaucgacaagcagcugcugcccauccugaacaagcagagcugcagcaucagcaacaucgagaccgugaucgaguuccagcagaagaacaacagacugcuggagaucaccagagaguucagcgugaacgccggcgugaccacccccgugagcaccuacaugcugaccaacagcgagcugcugagccugaucaacgacaugcccaucaccaacgaccagaagaagcugaugagcaacaacgugcagaucgugagacagcagagcuacagcaucaugugcaucaucaaggaggaggugcuggccuacguggugcagcugccccuguacggcgugaucgacacccccugcuggaagcugcacaccagcccccugugcaccaccaacaccaaggagggcagcaacaucugccugaccagaaccgacagaggcugguacugcgacaacgccggcagcgugagcuucuucccccaggccgagaccugcaaggugcagagcaacagaguguucugcgacaccaugaacagcagaacccugcccagcgaggugaaccugugcaacguggacaucuucaaccccaaguacgacugcaagaucaugaccagcaagaccgacgugagcagcagcgugaucaccagccugggcgccaucgugagcugcuacggcaagaccaagugcaccgccagcaacaagaacagaggcaucaucaagaccuucagcaacggcugcgacuacgugagcaacaagggcguggacaccgugagcgugggcaacacccuguacugcgugaacaagcaggagggcaagagccuguacgugaagggcgagcccaucaucaacuucuacgacccccugguguuccccagcgacgaguucgacgccagcaucagccaggugaacgagaagaucaaccagagccuggccuucaucagaaagagcgacgagcugcugcacaacgugaacgccggcaagagcaccaccaacaucaugaucaccaccaucaucaucgugaucaucgugauccugcugagccugaucgccgugggccugcugcuguacugcaaggccagaugaggacuaguggaagcauuuuccuggcugauuaaaagaaauuacucagcuauggucaucuguuccuguuagaaggcuaugcagcauauuauauacuaugcgcauguuaugaaaugcauaauaaaaaauuuuaaaaaaucuaaaagaucuaaaaaaaaaaaaaaaaaaaaaaaaaaaaaaaaaaaaaaaaaaaaaaaaaaaaaaaaaaaaaaaaugcaucccccccccccccccccccccccccccccccaaaggcucuuuucagagccaccagaauu

SEQ ID NO: 5115 - RNA, 1897 nt, Artificial Sequence
  mRNA product Design d-4 comprising derived and/or modified sequence from HRSV(A2)__F-del_DSCav1_mut4 (opt5)
gggagagucccgcagucggcguccagcggcucugcuuguucgugugugugucguugcaggccuuauucaagcuuaccauggagcugcucauccugaaggccaacgcuauuaccacaauccuuacggccgugaccuucugcuuugcgagcggccagaauauuacagaagaguucuaccaauccaccuguucugcugucagcaaaggguaucuguccgcccucagaacaggaugguacaccucuguuaucacaauugaacugagcaacaucaaggagaauaaaugcaacggcaccgacgccaaggugaaacuuaucaagcaggaacuggauaaguauaaaaaugcugugacggagcuccagcugcugaugcaguccacccccgccacagggucuggaagcgcuauuuguuccggcgucgccgugugcaagguucuccaccuggagggggaagugaacaaaaucaagagcgcgcuucugucuaccaauaaagccgucgugucccucagcaacggaguuucugugcugacauuuaagguccuugaccugaagaauuacauugauaaacaacuccugccuauccugaacaagcaguccuguagcauuucuaauaucgagaccgugauugaguuccagcagaaaaacaaucggcuccuggaaaucacgcgcgaguuuuccgugaacgcuggcgucacaaccccgguuagcacauauaugcuuaccaauuccgaacugcucucucugaucaacgacaugcccauuaccaacgaucaaaagaaacuuaugagcaauaacgugcagaucgugagacagcaguccuacagcauuaugugcaucauuaaggaggaaguccuggccuaugugguucaacucccucuguacggcgugaucgacacacccuguuggaaacugcauacgucuccucucugcaccacaaauaccaaggagggguccaacaucugucugacacggaccgaucgcggaugguacugcgacaaugcuggcagcgucucuuucuuuccccaggccgaaacguguaaggugcagagcaacagaguuuucugcgauacaaugaacuccagaacccugccuucugaggugaaucucugcaaugucgacauuuuuaacccgaaauaugauuguaagaucaugaccagcaaaacagacguguccagcucugucauuaccucccugggggcgaucgugagcugcuacggaaagacaaaauguacggccucuaauaagaaccggggcauuaucaagaccuucuccaaugggugcgauuauguuagcaacaaaggaguggacacagucuccgugggcaauacccuuuacuguguuaacaagcaagagggcaaaucucuguaugugaagggggaacccaucauuaacuuuuacgacccucucgucuuccccagcgaugaguuugacgcuuccaucucucaggugaaugagaaaauuaaccagagccuggccuucauccgcaaguccgaugaacugcuccacaaugugaacgcuggaaagagcacaaccaauauuaugaucacgaccauuaucaucguuauuaucgucauucugcuuucucugaucgccgugggccuccugcuguauugcaaagccagaugaggacuaguggaagcauuuuccuggcugauuaaaagaaauuacucagcuauggucaucuguuccuguuagaaggcuaugcagcauauuauauacuaugcgcauguuaugaaaugcauaauaaaaaauuuuaaaaaaucuaaaagaucuaaaaaaaaaaaaaaaaaaaaaaaaaaaaaaaaaaaaaaaaaaaaaaaaaaaaaaaaaaaaaaaaugcaucccccccccccccccccccccccccccccccaaaggcucuuuucagagccaccagaauu

SEQ ID NO: 5116 - RNA, 1897 nt, Artificial Sequence
  mRNA product Design d-4 comprising derived and/or modified sequence from HRSV(A2)__F-del_DSCav1_mut4 (opt6)
gggagagucccgcagucggcguccagcggcucugcuuguucgugugugugucguugcaggccuuauucaagcuuaccauggaacuuuuaauacuaaaagcuaacgccauaaccacuauacuaacagcagucacauucugcuucgcaucaggccaaaacauaaccgaagaauuuuaccaauccacuuguucagcagucuccaaaggauauuuauccgcacuucguacaggaugguauacaucaguaauaacaauagaacucuccaacauaaaagaaaauaaaugcaacggcaccgacgcaaaaguaaaacucaucaaacaagaauuagacaaauacaagaacgccguaacagaacuacaauuacuaaugcaaucaacacccgccacaggaucaggaucugcaauaugcucuggaguagcaguaugcaaaguauuacaccuagaaggagaaguaaacaaaaucaaaagcgcacuacuauccacaaacaaagcuguaguaucacuaucaaacggaguaucaguauuaacuuucaaaguacuugaucuaaaaaacuacauagacaaacaacuacuacccauauuaaacaaacaaucaugcucaauaagcaauauagaaacaguaauagaauuucaacaaaaaaacaacagacuacuagaaaucacaagggaauuuucaguaaaugccgguguuacaaccccaguaucaacauacaugcuaacuaacucagaacuacuauccuuaauaaacgauaugccaauaacaaacgaucaaaaaaaacuaauguccaacaacguacaaauaguaagacaacaaucauacucaaucaugugcauuauaaaagaagaagucuuagcauacguaguacaauuaccacuauacgguguaauagauacaccauguuggaaauuacacacaagcccacuaugcacaacuaacacaaaagaaggcucaaauauauguuuaacaagaacagaccgagguugguacugcgacaaugcaggaucaguaucauucuuuccacaagcagaaacauguaaaguucaauccaacagaguauucugcgacacaaugaacuccagaacacuaccuucagaaguaaaccucuguaacguagacauauuuaaucccaaguacgacugcaaaauaaugacaucgaaaacagacguaagcuccucagugauaacaucccucggcgccaucguauccuguuacgguaaaacuaaauguaccgccucaaacaaaaaccgcgguauuauaaaaacuuuuucuaauggcugcgauuacguaagcaacaaaggcgucgacacaguuuccguaggaaacacacuauacugcguaaacaaacaagaagguaaaucucuauacguaaaaggagaaccaauaauaaauuucuaugauccuuuaguauucccauccgaugaauuugacgccucuaucucacaagucaacgaaaaaauaaaucaaucauuagcauucauacgaaaaucagacgaacuacuacacaacguaaacgcaggaaaaucaacaaccaacauaaugauaaccacaauaauaauaguuauuauagugauacuauuauccuuaauugcagucggacuauuauuauacuguaaagcacgcuaaggacuaguggaagcauuuuccuggcugauuaaaagaaauuacucagcuauggucaucuguuccuguuagaaggcuaugcagcauauuauauacuaugcgcauguuaugaaaugcauaauaaaaaauuuuaaaaaaucuaaaagaucuaaaaaaaaaaaaaaaaaaaaaaaaaaaaaaaaaaaaaaaaaaaaaaaaaaaaaaaaaaaaaaaaugcaucccccccccccccccccccccccccccccccaaaggcucuuuucagagccaccagaauu

SEQ ID NO: 5117 - RNA, 1897 nt, Artificial Sequence
  mRNA product Design d-4 comprising derived and/or modified sequence from HRSV(A2)__F-del_DSCav1_mut4 (opt11)
gggagagucccgcagucggcguccagcggcucugcuuguucgugugugugucguugcaggccuuauucaagcuuaccauggaacuccucauccucaaagccaaugccaucaccacaauccugacagcaguaaccuucugcuucgcauccggacaaaacaucaccgaagaauuuuaccagucaaccugcuccgcugucucaaaaggcuaccucucagcccuucgcaccggcugguacaccucggucauaacaauagaacucuccaauaucaaagaaaacaaaugcaacggcacugacgccaagguaaaacucaucaaacaggaacucgauaaauacaagaacgccguaacagaacuacaacuacucaugcaaucaacaccggccaccggcuccgguuccgccauaugcuccggaguggccgugugcaagguccuccaccuugaaggggaaguuaacaaaaucaaaucagcccuccucuccacuaacaaagccguaguaucccuaagcaacgguguauccguccucaccuucaaaguacuagaccuaaagaauuauaucgacaaacaacuccuccccauacucaacaaacaauccugcuccauaagcaacaucgaaacagucaucgaguuccagcagaaaaacaaccgacuccucgaaauaacccgcgaguucucagucaacgccggagucaccacacccgucagcaccuacaugcugaccaacuccgaacuccucuccuuaaucaaugacaugcccaucaccaaugaccaaaagaaacucaugucaaacaacguccaaauaguacgccaacaauccuacuccaucaugugcaucauaaaagaagaaguacucgccuacgucguccaacucccccucuacggcguaaucgacacccccugcuggaaacuacacacaagcccccucugcaccacaaacacuaaagagggcuccaacaucugucuaacccgcaccgaucgaggcugguacugcgacaacgccggaucugucucauucuucccccaagccgaaaccugcaaaguccaauccaaccgcgucuucugcgacaccaugaacucgagaacccucccuuccgaagucaaccuaugcaacgucgacauuuucaaccccaaauacgacugcaaaaucaugaccucgaaaaccgacguaucauccagcgucaucaccagccuaggcgcaaucgugagcugcuacggcaaaaccaaaugcaccgcgagcaauaaaaaccgcgggaucaucaaaacuuucuccaacggcugcgacuacgucuccaacaagggagucgauaccgucuccguaggcaacacccucuacugcgucaacaaacaagaaggcaaaucacuauacguaaaaggcgagccaaucauaaacuucuacgacccucuaguuuucccauccgacgaguucgacgcuagcaucucccaagucaacgagaaaaucaaccaaucccucgcauucauccgcaaauccgacgaacuccuccacaacguaaacgcaggcaaaucaacuacuaauauaaugaucacaaccaucauaauagucauaaucguaauccuccuaucccucaucgccgucggacuacugcucuacugcaaagcccgcuaaggacuaguggaagcauuuuccuggcugauuaaaagaaauuacucagcuauggucaucuguuccuguuagaaggcuaugcagcauauuauauacuaugcgcauguuaugaaaugcauaauaaaaaauuuuaaaaaaucuaaaagaucuaaaaaaaaaaaaaaaaaaaaaaaaaaaaaaaaaaaaaaaaaaaaaaaaaaaaaaaaaaaaaaaaugcaucccccccccccccccccccccccccccccccaaaggcucuuuucagagccaccagaauu

SEQ ID NO: 5118 - RNA, 1994 nt, Artificial Sequence
  mRNA product Design d-5 comprising derived and/or modified sequence from HRSV(A2)__F-del_DSCav1_mut4 (opt1)
gggagagggcgcuuggcuugcaaggacccugagcugcggcauugaagcacacccaacccaacucgacugaagucagccucacugaaccggaucugagaaucuucucucucugggcuugccagggcucuccgaaccuagcuagcauccucuucaauuccaacuagaaagcuuaccauggagcugcucauccugaaggccaacgccaucaccaccauccugacggcggugaccuucugcuucgccagcggccagaacaucaccgaggaguucuaccaguccacgugcagcgccgucuccaagggguaccucagcgcccugcggaccggcugguacaccuccgugaucaccaucgagcugagcaacaucaaggagaacaagugcaacgggaccgacgccaaggugaagcucaucaagcaggagcuggacaaguacaagaacgcggucacggagcugcagcuccugaugcaguccaccccggcaaccggcuccggcuccgccaucugcagcggcgucgccgugugcaaggugcugcaccucgagggggaggucaacaagaucaagagcgcccugcuguccaccaacaaggccguggugagccucuccaacggcgucagcgugcugaccuucaaggugcuggaccucaagaacuacaucgacaagcagcugcugcccauccugaacaagcagagcugcuccaucagcaacaucgagacggugaucgaguuccagcagaagaacaaccggcuccuggagaucacccgcgaguucagcgugaacgccggggucaccacccccguguccacguacaugcugaccaacagcgagcuccugucccugaucaacgacaugccgaucaccaacgaccagaagaagcucaugagcaacaacgugcagaucguccggcagcaguccuacagcaucaugugcaucaucaaggaggaggugcuggcguacgugguccagcugccccucuacggcgugaucgacacccccugcuggaagcugcacacgagcccccugugcaccaccaacaccaaggagggguccaacaucugccucacgcgcaccgaccggggcugguacugcgacaacgccggcagcgucuccuucuucccgcaggccgagaccugcaaggugcagagcaaccgcguguucugcgacaccaugaacucccggacgcugcccagcgagguaaaccucugcaacgucgacaucuucaaccccaaguacgacugcaagaucaugaccuccaagaccgacgugagcuccagcgugaucaccucccugggggccaucgucagcugcuacggcaagacgaagugcaccgccagcaacaagaaccgggggaucaucaagaccuucuccaacggcugcgacuacgugagcaacaagggcguggacaccguguccgucgggaacacccuguacugcgugaacaagcaggagggcaagagccucuacgugaagggggagcccaucaucaacuucuacgacccgcuggucuuccccuccgacgaguucgacgcgagcaucucccaggugaacgagaagaucaaccagagccuggccuucauccgcaaguccgacgagcugcuccacaacgugaacgccggcaagagcacgaccaacaucaugaucaccaccaucaucaucgucaucaucgugauccugcugucccucaucgccguggggcugcugcucuacugcaaggcccggugaggacuaguggaagcauuuuccuggcugauuaaaagaaauuacucagcuauggucaucuguuccuguuagaaggcuaugcagcauauuauauacuaugcgcauguuaugaaaugcauaauaaaaaauuuuaaaaaaucuaaaagaucuaaaaaaaaaaaaaaaaaaaaaaaaaaaaaaaaaaaaaaaaaaaaaaaaaaaaaaaaaaaaaaaaugcaucccccccccccccccccccccccccccccccaaaggcucuuuucagagccaccagaauu

SEQ ID NO: 5119 - RNA, 1994 nt, Artificial Sequence
  mRNA product Design d-5 comprising derived and/or modified sequence from HRSV(A2)__F-del_DSCav1_mut4 (opt1)
gggagagggcgcuuggcuugcaaggacccugagcugcggcauugaagcacacccaacccaacucgacugaagucagccucacugaaccggaucugagaaucuucucucucugggcuugccagggcucuccgaaccuagcuagcauccucuucaauuccaacuagaaagcuuaccauggagcugcucauccugaaggccaacgccaucaccaccauccugacggcggugaccuucugcuucgccagcggccagaacaucaccgaggaguucuaccaguccacgugcagcgccgucuccaagggguaccucagcgcccugcgcaccggcugguacaccuccgugaucaccaucgagcugagcaacaucaaggagaacaagugcaacgggaccgacgccaaggugaagcucaucaagcaggagcuggacaaguacaagaacgcggucacggagcugcagcuccugaugcaguccacccccgccaccggcagcggguccgccaucugcagcggcguggccgugugcaagguccugcaccucgagggcgaggugaacaagaucaaguccgcgcugcugagcaccaacaaggccguggucucccucagcaacgggguguccgugcugacguucaagguccuggaccucaagaacuacaucgacaagcagcugcugccgauccucaacaagcagagcugcuccaucagcaacaucgagaccgugaucgaguuccagcagaagaacaaccggcugcuggagaucacccgcgaguucuccgugaacgccggcgucaccacgcccgugagcaccuacaugcucaccaacagcgagcugcugucccucaucaacgacaugcccaucaccaacgaccagaagaagcugaugagcaacaacgugcagaucguccggcagcaguccuacagcaucaugugcaucaucaaggaggaggugcuggccuacgugguccagcucccccuguacggggugaucgacacgccgugcuggaagcugcacaccagcccccucugcaccaccaacacgaaggagggcuccaacaucugccugacccgcaccgaccgggggugguacugcgacaacgccggcuccgugagcuucuucccccaggcggagaccugcaagguccaguccaaccgcguguucugcgacacgaugaacagccggacccuccccuccgaggucaaccugugcaacguggacaucuucaacccgaaguacgacugcaagaucaugaccagcaagaccgacguguccagcuccgucaucacgagccugggcgccaucguguccugcuacgggaagaccaagugcaccgccagcaacaagaaccggggcaucaucaagaccuucuccaacgggugcgacuacgugagcaacaagggcgucgacacggugagcgugggcaacacccucuacugcgucaacaagcaggaggggaagucccuguacgugaagggcgagcccaucaucaacuucuacgacccccugguguuccccagcgacgaguucgacgccuccaucagccaggucaacgagaagaucaaccagucccucgccuucauccgcaagagcgacgagcugcugcacaacgugaacgcggggaaguccaccaccaacaucaugaucaccacgaucaucaucgugaucaucgucauccuccugagccugaucgccgugggccuccugcuguacugcaaggcccggugaggacuaguggaagcauuuuccuggcugauuaaaagaaauuacucagcuauggucaucuguuccuguuagaaggcuaugcagcauauuauauacuaugcgcauguuaugaaaugcauaauaaaaaauuuuaaaaaaucuaaaagaucuaaaaaaaaaaaaaaaaaaaaaaaaaaaaaaaaaaaaaaaaaaaaaaaaaaaaaaaaaaaaaaaaugcaucccccccccccccccccccccccccccccccaaaggcucuuuucagagccaccagaauu

SEQ ID NO: 5120 - RNA, 1994 nt, Artificial Sequence
  mRNA product Design d-5 comprising derived and/or modified sequence from HRSV(A2)__F-del_DSCav1_mut4 (opt2)
gggagagggcgcuuggcuugcaaggacccugagcugcggcauugaagcacacccaacccaacucgacugaagucagccucacugaaccggaucugagaaucuucucucucugggcuugccagggcucuccgaaccuagcuagcauccucuucaauuccaacuagaaagcuuaccauggagcuccucauccucaaggccaacgccaucaccaccauccucaccgccgucaccuucugcuucgccuccggccagaacaucaccgaggaguucuaccaguccaccugcuccgccgucuccaagggcuaccucuccgcccuccgcaccggcugguacaccuccgucaucaccaucgagcucuccaacaucaaggagaacaagugcaacggcaccgacgccaaggucaagcucaucaagcaggagcucgacaaguacaagaacgccgucaccgagcuccagcuccucaugcaguccacccccgccaccggcuccggcuccgccaucugcuccggcgucgccgucugcaagguccuccaccucgagggcgaggucaacaagaucaaguccgcccuccucuccaccaacaaggccgucgucucccucuccaacggcgucuccguccucaccuucaagguccucgaccucaagaacuacaucgacaagcagcuccuccccauccucaacaagcaguccugcuccaucuccaacaucgagaccgucaucgaguuccagcagaagaacaaccgccuccucgagaucacccgcgaguucuccgucaacgccggcgucaccacccccgucuccaccuacaugcucaccaacuccgagcuccucucccucaucaacgacaugcccaucaccaacgaccagaagaagcucauguccaacaacguccagaucguccgccagcaguccuacuccaucaugugcaucaucaaggaggagguccucgccuacgucguccagcucccccucuacggcgucaucgacacccccugcuggaagcuccacaccuccccccucugcaccaccaacaccaaggagggcuccaacaucugccucacccgcaccgaccgcggcugguacugcgacaacgccggcuccgucuccuucuucccccaggccgagaccugcaagguccaguccaaccgcgucuucugcgacaccaugaacucccgcacccuccccuccgaggucaaccucugcaacgucgacaucuucaaccccaaguacgacugcaagaucaugaccuccaagaccgacgucuccuccuccgucaucaccucccucggcgccaucgucuccugcuacggcaagaccaagugcaccgccuccaacaagaaccgcggcaucaucaagaccuucuccaacggcugcgacuacgucuccaacaagggcgucgacaccgucuccgucggcaacacccucuacugcgucaacaagcaggagggcaagucccucuacgucaagggcgagcccaucaucaacuucuacgacccccucgucuuccccuccgacgaguucgacgccuccaucucccaggucaacgagaagaucaaccagucccucgccuucauccgcaaguccgacgagcuccuccacaacgucaacgccggcaaguccaccaccaacaucaugaucaccaccaucaucaucgucaucaucgucauccuccucucccucaucgccgucggccuccuccucuacugcaaggcccgcugaggacuaguggaagcauuuuccuggcugauuaaaagaaauuacucagcuauggucaucuguuccuguuagaaggcuaugcagcauauuauauacuaugcgcauguuaugaaaugcauaauaaaaaauuuuaaaaaaucuaaaagaucuaaaaaaaaaaaaaaaaaaaaaaaaaaaaaaaaaaaaaaaaaaaaaaaaaaaaaaaaaaaaaaaaugcaucccccccccccccccccccccccccccccccaaaggcucuuuucagagccaccagaauu

SEQ ID NO: 5121 - RNA, 1994 nt, Artificial Sequence
  mRNA product Design d-5 comprising derived and/or modified sequence from HRSV(A2)__F-del_DSCav1_mut4 (opt3)
gggagagggcgcuuggcuugcaaggacccugagcugcggcauugaagcacacccaacccaacucgacugaagucagccucacugaaccggaucugagaaucuucucucucugggcuugccagggcucuccgaaccuagcuagcauccucuucaauuccaacuagaaagcuuaccauggagcugcucauccuuaaggccaacgcuauuaccacaauacugacugcagugacguucugcuuugccagcggccagaauaucaccgaagaguucuaccaauccacauguucugcggucucaaaaggguauuugagugcuuuaagaacuggaugguacaccagcguuauuacaaucgaacuguccaacauuaaggagaauaaaugcaacgguaccgacgccaaggugaaacuaaucaagcaggaacucgauaaguauaaaaaugcaguaacugagcugcagcuucugaugcagucuacacccgccaccggcucggggucagcuauauguagcggaguggcagucugcaagguguugcaccucgagggcgaaguuaacaaaaucaagagugcccugcuguccacgaauaaagcuguggucucucucagcaacgguguguccguauuaacuuuuaagguucuggaccuuaagaauuacauugauaaacaauugcugccuauccuaaacaagcagucauguaguauuagcaauaucgagaccgugauagaguuccagcagaaaaacaauaggcuccuggaaauuacacgggaguuuucugucaacgccggggugacuaccccaguguccacauauaugcuuaccaauucagaacuguugagccucaucaacgacaugccgauuacgaacgaucaaaagaaacugaugaguaauaacguccagaucguucgccagcagucuuacuccaucaugugcauuauaaaggaggaaguguuagcguauguagugcaacugccccucuacggagucaucgacacuccuuguuggaaacuucauacaagcccacugugcaccacuaauacaaaggagggcucgaacauuuguuugacccgaacggaucguggcugguacugcgacaaugcagggucuguguccuucuuuccccaggccgaaaccuguaagguucagucaaacagaguguucugcgauacaaugaauaguagaacucugccuagcgaggucaaccucugcaauguggacaucuuuaacccaaaauaugauuguaagauaaugaccuccaaaacagacguaucuagcucaguuauuaccagucugggagcuaucguguccugcuacgguaagacuaaauguacagccagcaauaagaacaggggcaucauuaagaccuucucuaaugggugcgauuaugucucaaacaaaggaguggacacugucagugugggcaauacgcuuuacuguguuaacaagcaagaggguaaaagccuguaugugaagggggaacccaucauuaacuuuuacgacccuuugguauucccauccgaugaguuugacgcaucuauaucgcaggucaaugagaaaaucaaccagagccucgcuuucauucggaaguccgaugaacuguuacacaaugugaacgccggaaagucaacaaccaauaucaugaucacuaccauuauaaucguuauuaucgugauucugcuaagucucaucgcggucggccugcuuuuguauugcaaagcccgcugaggacuaguggaagcauuuuccuggcugauuaaaagaaauuacucagcuauggucaucuguuccuguuagaaggcuaugcagcauauuauauacuaugcgcauguuaugaaaugcauaauaaaaaauuuuaaaaaaucuaaaagaucuaaaaaaaaaaaaaaaaaaaaaaaaaaaaaaaaaaaaaaaaaaaaaaaaaaaaaaaaaaaaaaaaugcaucccccccccccccccccccccccccccccccaaaggcucuuuucagagccaccagaauu

SEQ ID NO: 5122 - RNA, 1994 nt, Artificial Sequence
  mRNA product Design d-5 comprising derived and/or modified sequence from HRSV(A2)__F-del_DSCav1_mut4 (opt4)
gggagagggcgcuuggcuugcaaggacccugagcugcggcauugaagcacacccaacccaacucgacugaagucagccucacugaaccggaucugagaaucuucucucucugggcuugccagggcucuccgaaccuagcuagcauccucuucaauuccaacuagaaagcuuaccauggagcugcugauccugaaggccaacgccaucaccaccauccugaccgccgugaccuucugcuucgccagcggccagaacaucaccgaggaguucuaccagagcaccugcagcgccgugagcaagggcuaccugagcgcccugagaaccggcugguacaccagcgugaucaccaucgagcugagcaacaucaaggagaacaagugcaacggcaccgacgccaaggugaagcugaucaagcaggagcuggacaaguacaagaacgccgugaccgagcugcagcugcugaugcagagcacccccgccaccggcagcggcagcgccaucugcagcggcguggccgugugcaaggugcugcaccuggagggcgaggugaacaagaucaagagcgcccugcugagcaccaacaaggccguggugagccugagcaacggcgugagcgugcugaccuucaaggugcuggaccugaagaacuacaucgacaagcagcugcugcccauccugaacaagcagagcugcagcaucagcaacaucgagaccgugaucgaguuccagcagaagaacaacagacugcuggagaucaccagagaguucagcgugaacgccggcgugaccacccccgugagcaccuacaugcugaccaacagcgagcugcugagccugaucaacgacaugcccaucaccaacgaccagaagaagcugaugagcaacaacgugcagaucgugagacagcagagcuacagcaucaugugcaucaucaaggaggaggugcuggccuacguggugcagcugccccuguacggcgugaucgacacccccugcuggaagcugcacaccagcccccugugcaccaccaacaccaaggagggcagcaacaucugccugaccagaaccgacagaggcugguacugcgacaacgccggcagcgugagcuucuucccccaggccgagaccugcaaggugcagagcaacagaguguucugcgacaccaugaacagcagaacccugcccagcgaggugaaccugugcaacguggacaucuucaaccccaaguacgacugcaagaucaugaccagcaagaccgacgugagcagcagcgugaucaccagccugggcgccaucgugagcugcuacggcaagaccaagugcaccgccagcaacaagaacagaggcaucaucaagaccuucagcaacggcugcgacuacgugagcaacaagggcguggacaccgugagcgugggcaacacccuguacugcgugaacaagcaggagggcaagagccuguacgugaagggcgagcccaucaucaacuucuacgacccccugguguuccccagcgacgaguucgacgccagcaucagccaggugaacgagaagaucaaccagagccuggccuucaucagaaagagcgacgagcugcugcacaacgugaacgccggcaagagcaccaccaacaucaugaucaccaccaucaucaucgugaucaucgugauccugcugagccugaucgccgugggccugcugcuguacugcaaggccagaugaggacuaguggaagcauuuuccuggcugauuaaaagaaauuacucagcuauggucaucuguuccuguuagaaggcuaugcagcauauuauauacuaugcgcauguuaugaaaugcauaauaaaaaauuuuaaaaaaucuaaaagaucuaaaaaaaaaaaaaaaaaaaaaaaaaaaaaaaaaaaaaaaaaaaaaaaaaaaaaaaaaaaaaaaaugcaucccccccccccccccccccccccccccccccaaaggcucuuuucagagccaccagaauu

SEQ ID NO: 5123 - RNA, 1994 nt, Artificial Sequence
  mRNA product Design d-5 comprising derived and/or modified sequence from HRSV(A2)__F-del_DSCav1_mut4 (opt5)
gggagagggcgcuuggcuugcaaggacccugagcugcggcauugaagcacacccaacccaacucgacugaagucagccucacugaaccggaucugagaaucuucucucucugggcuugccagggcucuccgaaccuagcuagcauccucuucaauuccaacuagaaagcuuaccauggagcugcucauccugaaggccaacgcuauuaccacaauccuuacggccgugaccuucugcuuugcgagcggccagaauauuacagaagaguucuaccaauccaccuguucugcugucagcaaaggguaucuguccgcccucagaacaggaugguacaccucuguuaucacaauugaacugagcaacaucaaggagaauaaaugcaacggcaccgacgccaaggugaaacuuaucaagcaggaacuggauaaguauaaaaaugcugugacggagcuccagcugcugaugcaguccacccccgccacagggucuggaagcgcuauuuguuccggcgucgccgugugcaagguucuccaccuggagggggaagugaacaaaaucaagagcgcgcuucugucuaccaauaaagccgucgugucccucagcaacggaguuucugugcugacauuuaagguccuugaccugaagaauuacauugauaaacaacuccugccuauccugaacaagcaguccuguagcauuucuaauaucgagaccgugauugaguuccagcagaaaaacaaucggcuccuggaaaucacgcgcgaguuuuccgugaacgcuggcgucacaaccccgguuagcacauauaugcuuaccaauuccgaacugcucucucugaucaacgacaugcccauuaccaacgaucaaaagaaacuuaugagcaauaacgugcagaucgugagacagcaguccuacagcauuaugugcaucauuaaggaggaaguccuggccuaugugguucaacucccucuguacggcgugaucgacacacccuguuggaaacugcauacgucuccucucugcaccacaaauaccaaggagggguccaacaucugucugacacggaccgaucgcggaugguacugcgacaaugcuggcagcgucucuuucuuuccccaggccgaaacguguaaggugcagagcaacagaguuuucugcgauacaaugaacuccagaacccugccuucugaggugaaucucugcaaugucgacauuuuuaacccgaaauaugauuguaagaucaugaccagcaaaacagacguguccagcucugucauuaccucccugggggcgaucgugagcugcuacggaaagacaaaauguacggccucuaauaagaaccggggcauuaucaagaccuucuccaaugggugcgauuauguuagcaacaaaggaguggacacagucuccgugggcaauacccuuuacuguguuaacaagcaagagggcaaaucucuguaugugaagggggaacccaucauuaacuuuuacgacccucucgucuuccccagcgaugaguuugacgcuuccaucucucaggugaaugagaaaauuaaccagagccuggccuucauccgcaaguccgaugaacugcuccacaaugugaacgcuggaaagagcacaaccaauauuaugaucacgaccauuaucaucguuauuaucgucauucugcuuucucugaucgccgugggccuccugcuguauugcaaagccagaugaggacuaguggaagcauuuuccuggcugauuaaaagaaauuacucagcuauggucaucuguuccuguuagaaggcuaugcagcauauuauauacuaugcgcauguuaugaaaugcauaauaaaaaauuuuaaaaaaucuaaaagaucuaaaaaaaaaaaaaaaaaaaaaaaaaaaaaaaaaaaaaaaaaaaaaaaaaaaaaaaaaaaaaaaaugcaucccccccccccccccccccccccccccccccaaaggcucuuuucagagccaccagaauu

SEQ ID NO: 5124 - RNA, 1994 nt, Artificial Sequence
  mRNA product Design d-5 comprising derived and/or modified sequence from HRSV(A2)__F-del_DSCav1_mut4 (opt6)
gggagagggcgcuuggcuugcaaggacccugagcugcggcauugaagcacacccaacccaacucgacugaagucagccucacugaaccggaucugagaaucuucucucucugggcuugccagggcucuccgaaccuagcuagcauccucuucaauuccaacuagaaagcuuaccauggaacuuuuaauacuaaaagcuaacgccauaaccacuauacuaacagcagucacauucugcuucgcaucaggccaaaacauaaccgaagaauuuuaccaauccacuuguucagcagucuccaaaggauauuuauccgcacuucguacaggaugguauacaucaguaauaacaauagaacucuccaacauaaaagaaaauaaaugcaacggcaccgacgcaaaaguaaaacucaucaaacaagaauuagacaaauacaagaacgccguaacagaacuacaauuacuaaugcaaucaacacccgccacaggaucaggaucugcaauaugcucuggaguagcaguaugcaaaguauuacaccuagaaggagaaguaaacaaaaucaaaagcgcacuacuauccacaaacaaagcuguaguaucacuaucaaacggaguaucaguauuaacuuucaaaguacuugaucuaaaaaacuacauagacaaacaacuacuacccauauuaaacaaacaaucaugcucaauaagcaauauagaaacaguaauagaauuucaacaaaaaaacaacagacuacuagaaaucacaagggaauuuucaguaaaugccgguguuacaaccccaguaucaacauacaugcuaacuaacucagaacuacuauccuuaauaaacgauaugccaauaacaaacgaucaaaaaaaacuaauguccaacaacguacaaauaguaagacaacaaucauacucaaucaugugcauuauaaaagaagaagucuuagcauacguaguacaauuaccacuauacgguguaauagauacaccauguuggaaauuacacacaagcccacuaugcacaacuaacacaaaagaaggcucaaauauauguuuaacaagaacagaccgagguugguacugcgacaaugcaggaucaguaucauucuuuccacaagcagaaacauguaaaguucaauccaacagaguauucugcgacacaaugaacuccagaacacuaccuucagaaguaaaccucuguaacguagacauauuuaaucccaaguacgacugcaaaauaaugacaucgaaaacagacguaagcuccucagugauaacaucccucggcgccaucguauccuguuacgguaaaacuaaauguaccgccucaaacaaaaaccgcgguauuauaaaaacuuuuucuaauggcugcgauuacguaagcaacaaaggcgucgacacaguuuccguaggaaacacacuauacugcguaaacaaacaagaagguaaaucucuauacguaaaaggagaaccaauaauaaauuucuaugauccuuuaguauucccauccgaugaauuugacgccucuaucucacaagucaacgaaaaaauaaaucaaucauuagcauucauacgaaaaucagacgaacuacuacacaacguaaacgcaggaaaaucaacaaccaacauaaugauaaccacaauaauaauaguuauuauagugauacuauuauccuuaauugcagucggacuauuauuauacuguaaagcacgcuaaggacuaguggaagcauuuuccuggcugauuaaaagaaauuacucagcuauggucaucuguuccuguuagaaggcuaugcagcauauuauauacuaugcgcauguuaugaaaugcauaauaaaaaauuuuaaaaaaucuaaaagaucuaaaaaaaaaaaaaaaaaaaaaaaaaaaaaaaaaaaaaaaaaaaaaaaaaaaaaaaaaaaaaaaaugcaucccccccccccccccccccccccccccccccaaaggcucuuuucagagccaccagaauu

SEQ ID NO: 5125 - RNA, 1994 nt, Artificial Sequence
  mRNA product Design d-5 comprising derived and/or modified sequence from HRSV(A2)__F-del_DSCav1_mut4 (opt11)
gggagagggcgcuuggcuugcaaggacccugagcugcggcauugaagcacacccaacccaacucgacugaagucagccucacugaaccggaucugagaaucuucucucucugggcuugccagggcucuccgaaccuagcuagcauccucuucaauuccaacuagaaagcuuaccauggaacuccucauccucaaagccaaugccaucaccacaauccugacagcaguaaccuucugcuucgcauccggacaaaacaucaccgaagaauuuuaccagucaaccugcuccgcugucucaaaaggcuaccucucagcccuucgcaccggcugguacaccucggucauaacaauagaacucuccaauaucaaagaaaacaaaugcaacggcacugacgccaagguaaaacucaucaaacaggaacucgauaaauacaagaacgccguaacagaacuacaacuacucaugcaaucaacaccggccaccggcuccgguuccgccauaugcuccggaguggccgugugcaagguccuccaccuugaaggggaaguuaacaaaaucaaaucagcccuccucuccacuaacaaagccguaguaucccuaagcaacgguguauccguccucaccuucaaaguacuagaccuaaagaauuauaucgacaaacaacuccuccccauacucaacaaacaauccugcuccauaagcaacaucgaaacagucaucgaguuccagcagaaaaacaaccgacuccucgaaauaacccgcgaguucucagucaacgccggagucaccacacccgucagcaccuacaugcugaccaacuccgaacuccucuccuuaaucaaugacaugcccaucaccaaugaccaaaagaaacucaugucaaacaacguccaaauaguacgccaacaauccuacuccaucaugugcaucauaaaagaagaaguacucgccuacgucguccaacucccccucuacggcguaaucgacacccccugcuggaaacuacacacaagcccccucugcaccacaaacacuaaagagggcuccaacaucugucuaacccgcaccgaucgaggcugguacugcgacaacgccggaucugucucauucuucccccaagccgaaaccugcaaaguccaauccaaccgcgucuucugcgacaccaugaacucgagaacccucccuuccgaagucaaccuaugcaacgucgacauuuucaaccccaaauacgacugcaaaaucaugaccucgaaaaccgacguaucauccagcgucaucaccagccuaggcgcaaucgugagcugcuacggcaaaaccaaaugcaccgcgagcaauaaaaaccgcgggaucaucaaaacuuucuccaacggcugcgacuacgucuccaacaagggagucgauaccgucuccguaggcaacacccucuacugcgucaacaaacaagaaggcaaaucacuauacguaaaaggcgagccaaucauaaacuucuacgacccucuaguuuucccauccgacgaguucgacgcuagcaucucccaagucaacgagaaaaucaaccaaucccucgcauucauccgcaaauccgacgaacuccuccacaacguaaacgcaggcaaaucaacuacuaauauaaugaucacaaccaucauaauagucauaaucguaauccuccuaucccucaucgccgucggacuacugcucuacugcaaagcccgcuaaggacuaguggaagcauuuuccuggcugauuaaaagaaauuacucagcuauggucaucuguuccuguuagaaggcuaugcagcauauuauauacuaugcgcauguuaugaaaugcauaauaaaaaauuuuaaaaaaucuaaaagaucuaaaaaaaaaaaaaaaaaaaaaaaaaaaaaaaaaaaaaaaaaaaaaaaaaaaaaaaaaaaaaaaaugcaucccccccccccccccccccccccccccccccaaaggcucuuuucagagccaccagaauu

SEQ ID NO: 5126 - RNA, 1874 nt, Artificial Sequence
  mRNA product Design e-1 comprising derived and/or modified sequence from HRSV(A2)__F-del_DSCav1_mut4 (opt1)
gggagaauauaagcguuggcggagcgucgguuguagcacucugcgcgcccgcucuucugcugcuguuugucuacuuccuccugcuuccccgccgccgccgccgccaucaagcuuaccauggagcugcucauccugaaggccaacgccaucaccaccauccugacggcggugaccuucugcuucgccagcggccagaacaucaccgaggaguucuaccaguccacgugcagcgccgucuccaagggguaccucagcgcccugcggaccggcugguacaccuccgugaucaccaucgagcugagcaacaucaaggagaacaagugcaacgggaccgacgccaaggugaagcucaucaagcaggagcuggacaaguacaagaacgcggucacggagcugcagcuccugaugcaguccaccccggcaaccggcuccggcuccgccaucugcagcggcgucgccgugugcaaggugcugcaccucgagggggaggucaacaagaucaagagcgcccugcuguccaccaacaaggccguggugagccucuccaacggcgucagcgugcugaccuucaaggugcuggaccucaagaacuacaucgacaagcagcugcugcccauccugaacaagcagagcugcuccaucagcaacaucgagacggugaucgaguuccagcagaagaacaaccggcuccuggagaucacccgcgaguucagcgugaacgccggggucaccacccccguguccacguacaugcugaccaacagcgagcuccugucccugaucaacgacaugccgaucaccaacgaccagaagaagcucaugagcaacaacgugcagaucguccggcagcaguccuacagcaucaugugcaucaucaaggaggaggugcuggcguacgugguccagcugccccucuacggcgugaucgacacccccugcuggaagcugcacacgagcccccugugcaccaccaacaccaaggagggguccaacaucugccucacgcgcaccgaccggggcugguacugcgacaacgccggcagcgucuccuucuucccgcaggccgagaccugcaaggugcagagcaaccgcguguucugcgacaccaugaacucccggacgcugcccagcgagguaaaccucugcaacgucgacaucuucaaccccaaguacgacugcaagaucaugaccuccaagaccgacgugagcuccagcgugaucaccucccugggggccaucgucagcugcuacggcaagacgaagugcaccgccagcaacaagaaccgggggaucaucaagaccuucuccaacggcugcgacuacgugagcaacaagggcguggacaccguguccgucgggaacacccuguacugcgugaacaagcaggagggcaagagccucuacgugaagggggagcccaucaucaacuucuacgacccgcuggucuuccccuccgacgaguucgacgcgagcaucucccaggugaacgagaagaucaaccagagccuggccuucauccgcaaguccgacgagcugcuccacaacgugaacgccggcaagagcacgaccaacaucaugaucaccaccaucaucaucgucaucaucgugauccugcugucccucaucgccguggggcugcugcucuacugcaaggcccggugaggacuaguguccaccugucccuccugggcugcuggauugucucguuuuccugccaaauaaacaggaucagcgcuuuacagaucuaaaaaaaaaaaaaaaaaaaaaaaaaaaaaaaaaaaaaaaaaaaaaaaaaaaaaaaaaaaaaaaaugcaucccccccccccccccccccccccccccccccaaaggcucuuuucagagccaccagaauu

SEQ ID NO: 5127 - RNA, 1874 nt, Artificial Sequence
  mRNA product Design e-1 comprising derived and/or modified sequence from HRSV(A2)__F-del_DSCav1_mut4 (opt1)
gggagaauauaagcguuggcggagcgucgguuguagcacucugcgcgcccgcucuucugcugcuguuugucuacuuccuccugcuuccccgccgccgccgccgccaucaagcuuaccauggagcugcucauccugaaggccaacgccaucaccaccauccugacggcggugaccuucugcuucgccagcggccagaacaucaccgaggaguucuaccaguccacgugcagcgccgucuccaagggguaccucagcgcccugcgcaccggcugguacaccuccgugaucaccaucgagcugagcaacaucaaggagaacaagugcaacgggaccgacgccaaggugaagcucaucaagcaggagcuggacaaguacaagaacgcggucacggagcugcagcuccugaugcaguccacccccgccaccggcagcggguccgccaucugcagcggcguggccgugugcaagguccugcaccucgagggcgaggugaacaagaucaaguccgcgcugcugagcaccaacaaggccguggucucccucagcaacgggguguccgugcugacguucaagguccuggaccucaagaacuacaucgacaagcagcugcugccgauccucaacaagcagagcugcuccaucagcaacaucgagaccgugaucgaguuccagcagaagaacaaccggcugcuggagaucacccgcgaguucuccgugaacgccggcgucaccacgcccgugagcaccuacaugcucaccaacagcgagcugcugucccucaucaacgacaugcccaucaccaacgaccagaagaagcugaugagcaacaacgugcagaucguccggcagcaguccuacagcaucaugugcaucaucaaggaggaggugcuggccuacgugguccagcucccccuguacggggugaucgacacgccgugcuggaagcugcacaccagcccccucugcaccaccaacacgaaggagggcuccaacaucugccugacccgcaccgaccgggggugguacugcgacaacgccggcuccgugagcuucuucccccaggcggagaccugcaagguccaguccaaccgcguguucugcgacacgaugaacagccggacccuccccuccgaggucaaccugugcaacguggacaucuucaacccgaaguacgacugcaagaucaugaccagcaagaccgacguguccagcuccgucaucacgagccugggcgccaucguguccugcuacgggaagaccaagugcaccgccagcaacaagaaccggggcaucaucaagaccuucuccaacgggugcgacuacgugagcaacaagggcgucgacacggugagcgugggcaacacccucuacugcgucaacaagcaggaggggaagucccuguacgugaagggcgagcccaucaucaacuucuacgacccccugguguuccccagcgacgaguucgacgccuccaucagccaggucaacgagaagaucaaccagucccucgccuucauccgcaagagcgacgagcugcugcacaacgugaacgcggggaaguccaccaccaacaucaugaucaccacgaucaucaucgugaucaucgucauccuccugagccugaucgccgugggccuccugcuguacugcaaggcccggugaggacuaguguccaccugucccuccugggcugcuggauugucucguuuuccugccaaauaaacaggaucagcgcuuuacagaucuaaaaaaaaaaaaaaaaaaaaaaaaaaaaaaaaaaaaaaaaaaaaaaaaaaaaaaaaaaaaaaaaugcaucccccccccccccccccccccccccccccccaaaggcucuuuucagagccaccagaauu

SEQ ID NO: 5128 - RNA, 1874 nt, Artificial Sequence
  mRNA product Design e-1 comprising derived and/or modified sequence from HRSV(A2)__F-del_DSCav1_mut4 (opt2)
gggagaauauaagcguuggcggagcgucgguuguagcacucugcgcgcccgcucuucugcugcuguuugucuacuuccuccugcuuccccgccgccgccgccgccaucaagcuuaccauggagcuccucauccucaaggccaacgccaucaccaccauccucaccgccgucaccuucugcuucgccuccggccagaacaucaccgaggaguucuaccaguccaccugcuccgccgucuccaagggcuaccucuccgcccuccgcaccggcugguacaccuccgucaucaccaucgagcucuccaacaucaaggagaacaagugcaacggcaccgacgccaaggucaagcucaucaagcaggagcucgacaaguacaagaacgccgucaccgagcuccagcuccucaugcaguccacccccgccaccggcuccggcuccgccaucugcuccggcgucgccgucugcaagguccuccaccucgagggcgaggucaacaagaucaaguccgcccuccucuccaccaacaaggccgucgucucccucuccaacggcgucuccguccucaccuucaagguccucgaccucaagaacuacaucgacaagcagcuccuccccauccucaacaagcaguccugcuccaucuccaacaucgagaccgucaucgaguuccagcagaagaacaaccgccuccucgagaucacccgcgaguucuccgucaacgccggcgucaccacccccgucuccaccuacaugcucaccaacuccgagcuccucucccucaucaacgacaugcccaucaccaacgaccagaagaagcucauguccaacaacguccagaucguccgccagcaguccuacuccaucaugugcaucaucaaggaggagguccucgccuacgucguccagcucccccucuacggcgucaucgacacccccugcuggaagcuccacaccuccccccucugcaccaccaacaccaaggagggcuccaacaucugccucacccgcaccgaccgcggcugguacugcgacaacgccggcuccgucuccuucuucccccaggccgagaccugcaagguccaguccaaccgcgucuucugcgacaccaugaacucccgcacccuccccuccgaggucaaccucugcaacgucgacaucuucaaccccaaguacgacugcaagaucaugaccuccaagaccgacgucuccuccuccgucaucaccucccucggcgccaucgucuccugcuacggcaagaccaagugcaccgccuccaacaagaaccgcggcaucaucaagaccuucuccaacggcugcgacuacgucuccaacaagggcgucgacaccgucuccgucggcaacacccucuacugcgucaacaagcaggagggcaagucccucuacgucaagggcgagcccaucaucaacuucuacgacccccucgucuuccccuccgacgaguucgacgccuccaucucccaggucaacgagaagaucaaccagucccucgccuucauccgcaaguccgacgagcuccuccacaacgucaacgccggcaaguccaccaccaacaucaugaucaccaccaucaucaucgucaucaucgucauccuccucucccucaucgccgucggccuccuccucuacugcaaggcccgcugaggacuaguguccaccugucccuccugggcugcuggauugucucguuuuccugccaaauaaacaggaucagcgcuuuacagaucuaaaaaaaaaaaaaaaaaaaaaaaaaaaaaaaaaaaaaaaaaaaaaaaaaaaaaaaaaaaaaaaaugcaucccccccccccccccccccccccccccccccaaaggcucuuuucagagccaccagaauu

SEQ ID NO: 5129 - RNA, 1874 nt, Artificial Sequence
  mRNA product Design e-1 comprising derived and/or modified sequence from HRSV(A2)__F-del_DSCav1_mut4 (opt3)
gggagaauauaagcguuggcggagcgucgguuguagcacucugcgcgcccgcucuucugcugcuguuugucuacuuccuccugcuuccccgccgccgccgccgccaucaagcuuaccauggagcugcucauccuuaaggccaacgcuauuaccacaauacugacugcagugacguucugcuuugccagcggccagaauaucaccgaagaguucuaccaauccacauguucugcggucucaaaaggguauuugagugcuuuaagaacuggaugguacaccagcguuauuacaaucgaacuguccaacauuaaggagaauaaaugcaacgguaccgacgccaaggugaaacuaaucaagcaggaacucgauaaguauaaaaaugcaguaacugagcugcagcuucugaugcagucuacacccgccaccggcucggggucagcuauauguagcggaguggcagucugcaagguguugcaccucgagggcgaaguuaacaaaaucaagagugcccugcuguccacgaauaaagcuguggucucucucagcaacgguguguccguauuaacuuuuaagguucuggaccuuaagaauuacauugauaaacaauugcugccuauccuaaacaagcagucauguaguauuagcaauaucgagaccgugauagaguuccagcagaaaaacaauaggcuccuggaaauuacacgggaguuuucugucaacgccggggugacuaccccaguguccacauauaugcuuaccaauucagaacuguugagccucaucaacgacaugccgauuacgaacgaucaaaagaaacugaugaguaauaacguccagaucguucgccagcagucuuacuccaucaugugcauuauaaaggaggaaguguuagcguauguagugcaacugccccucuacggagucaucgacacuccuuguuggaaacuucauacaagcccacugugcaccacuaauacaaaggagggcucgaacauuuguuugacccgaacggaucguggcugguacugcgacaaugcagggucuguguccuucuuuccccaggccgaaaccuguaagguucagucaaacagaguguucugcgauacaaugaauaguagaacucugccuagcgaggucaaccucugcaauguggacaucuuuaacccaaaauaugauuguaagauaaugaccuccaaaacagacguaucuagcucaguuauuaccagucugggagcuaucguguccugcuacgguaagacuaaauguacagccagcaauaagaacaggggcaucauuaagaccuucucuaaugggugcgauuaugucucaaacaaaggaguggacacugucagugugggcaauacgcuuuacuguguuaacaagcaagaggguaaaagccuguaugugaagggggaacccaucauuaacuuuuacgacccuuugguauucccauccgaugaguuugacgcaucuauaucgcaggucaaugagaaaaucaaccagagccucgcuuucauucggaaguccgaugaacuguuacacaaugugaacgccggaaagucaacaaccaauaucaugaucacuaccauuauaaucguuauuaucgugauucugcuaagucucaucgcggucggccugcuuuuguauugcaaagcccgcugaggacuaguguccaccugucccuccugggcugcuggauugucucguuuuccugccaaauaaacaggaucagcgcuuuacagaucuaaaaaaaaaaaaaaaaaaaaaaaaaaaaaaaaaaaaaaaaaaaaaaaaaaaaaaaaaaaaaaaaugcaucccccccccccccccccccccccccccccccaaaggcucuuuucagagccaccagaauu

SEQ ID NO: 5130 - RNA, 1874 nt, Artificial Sequence
  mRNA product Design e-1 comprising derived and/or modified sequence from HRSV(A2)__F-del_DSCav1_mut4 (opt4)
gggagaauauaagcguuggcggagcgucgguuguagcacucugcgcgcccgcucuucugcugcuguuugucuacuuccuccugcuuccccgccgccgccgccgccaucaagcuuaccauggagcugcugauccugaaggccaacgccaucaccaccauccugaccgccgugaccuucugcuucgccagcggccagaacaucaccgaggaguucuaccagagcaccugcagcgccgugagcaagggcuaccugagcgcccugagaaccggcugguacaccagcgugaucaccaucgagcugagcaacaucaaggagaacaagugcaacggcaccgacgccaaggugaagcugaucaagcaggagcuggacaaguacaagaacgccgugaccgagcugcagcugcugaugcagagcacccccgccaccggcagcggcagcgccaucugcagcggcguggccgugugcaaggugcugcaccuggagggcgaggugaacaagaucaagagcgcccugcugagcaccaacaaggccguggugagccugagcaacggcgugagcgugcugaccuucaaggugcuggaccugaagaacuacaucgacaagcagcugcugcccauccugaacaagcagagcugcagcaucagcaacaucgagaccgugaucgaguuccagcagaagaacaacagacugcuggagaucaccagagaguucagcgugaacgccggcgugaccacccccgugagcaccuacaugcugaccaacagcgagcugcugagccugaucaacgacaugcccaucaccaacgaccagaagaagcugaugagcaacaacgugcagaucgugagacagcagagcuacagcaucaugugcaucaucaaggaggaggugcuggccuacguggugcagcugccccuguacggcgugaucgacacccccugcuggaagcugcacaccagcccccugugcaccaccaacaccaaggagggcagcaacaucugccugaccagaaccgacagaggcugguacugcgacaacgccggcagcgugagcuucuucccccaggccgagaccugcaaggugcagagcaacagaguguucugcgacaccaugaacagcagaacccugcccagcgaggugaaccugugcaacguggacaucuucaaccccaaguacgacugcaagaucaugaccagcaagaccgacgugagcagcagcgugaucaccagccugggcgccaucgugagcugcuacggcaagaccaagugcaccgccagcaacaagaacagaggcaucaucaagaccuucagcaacggcugcgacuacgugagcaacaagggcguggacaccgugagcgugggcaacacccuguacugcgugaacaagcaggagggcaagagccuguacgugaagggcgagcccaucaucaacuucuacgacccccugguguuccccagcgacgaguucgacgccagcaucagccaggugaacgagaagaucaaccagagccuggccuucaucagaaagagcgacgagcugcugcacaacgugaacgccggcaagagcaccaccaacaucaugaucaccaccaucaucaucgugaucaucgugauccugcugagccugaucgccgugggccugcugcuguacugcaaggccagaugaggacuaguguccaccugucccuccugggcugcuggauugucucguuuuccugccaaauaaacaggaucagcgcuuuacagaucuaaaaaaaaaaaaaaaaaaaaaaaaaaaaaaaaaaaaaaaaaaaaaaaaaaaaaaaaaaaaaaaaugcaucccccccccccccccccccccccccccccccaaaggcucuuuucagagccaccagaauu

SEQ ID NO: 5131 - RNA, 1874 nt, Artificial Sequence
  mRNA product Design e-1 comprising derived and/or modified sequence from HRSV(A2)__F-del_DSCav1_mut4 (opt5)
gggagaauauaagcguuggcggagcgucgguuguagcacucugcgcgcccgcucuucugcugcuguuugucuacuuccuccugcuuccccgccgccgccgccgccaucaagcuuaccauggagcugcucauccugaaggccaacgcuauuaccacaauccuuacggccgugaccuucugcuuugcgagcggccagaauauuacagaagaguucuaccaauccaccuguucugcugucagcaaaggguaucuguccgcccucagaacaggaugguacaccucuguuaucacaauugaacugagcaacaucaaggagaauaaaugcaacggcaccgacgccaaggugaaacuuaucaagcaggaacuggauaaguauaaaaaugcugugacggagcuccagcugcugaugcaguccacccccgccacagggucuggaagcgcuauuuguuccggcgucgccgugugcaagguucuccaccuggagggggaagugaacaaaaucaagagcgcgcuucugucuaccaauaaagccgucgugucccucagcaacggaguuucugugcugacauuuaagguccuugaccugaagaauuacauugauaaacaacuccugccuauccugaacaagcaguccuguagcauuucuaauaucgagaccgugauugaguuccagcagaaaaacaaucggcuccuggaaaucacgcgcgaguuuuccgugaacgcuggcgucacaaccccgguuagcacauauaugcuuaccaauuccgaacugcucucucugaucaacgacaugcccauuaccaacgaucaaaagaaacuuaugagcaauaacgugcagaucgugagacagcaguccuacagcauuaugugcaucauuaaggaggaaguccuggccuaugugguucaacucccucuguacggcgugaucgacacacccuguuggaaacugcauacgucuccucucugcaccacaaauaccaaggagggguccaacaucugucugacacggaccgaucgcggaugguacugcgacaaugcuggcagcgucucuuucuuuccccaggccgaaacguguaaggugcagagcaacagaguuuucugcgauacaaugaacuccagaacccugccuucugaggugaaucucugcaaugucgacauuuuuaacccgaaauaugauuguaagaucaugaccagcaaaacagacguguccagcucugucauuaccucccugggggcgaucgugagcugcuacggaaagacaaaauguacggccucuaauaagaaccggggcauuaucaagaccuucuccaaugggugcgauuauguuagcaacaaaggaguggacacagucuccgugggcaauacccuuuacuguguuaacaagcaagagggcaaaucucuguaugugaagggggaacccaucauuaacuuuuacgacccucucgucuuccccagcgaugaguuugacgcuuccaucucucaggugaaugagaaaauuaaccagagccuggccuucauccgcaaguccgaugaacugcuccacaaugugaacgcuggaaagagcacaaccaauauuaugaucacgaccauuaucaucguuauuaucgucauucugcuuucucugaucgccgugggccuccugcuguauugcaaagccagaugaggacuaguguccaccugucccuccugggcugcuggauugucucguuuuccugccaaauaaacaggaucagcgcuuuacagaucuaaaaaaaaaaaaaaaaaaaaaaaaaaaaaaaaaaaaaaaaaaaaaaaaaaaaaaaaaaaaaaaaugcaucccccccccccccccccccccccccccccccaaaggcucuuuucagagccaccagaauu

SEQ ID NO: 5132 - RNA, 1874 nt, Artificial Sequence
  mRNA product Design e-1 comprising derived and/or modified sequence from HRSV(A2)__F-del_DSCav1_mut4 (opt6)
gggagaauauaagcguuggcggagcgucgguuguagcacucugcgcgcccgcucuucugcugcuguuugucuacuuccuccugcuuccccgccgccgccgccgccaucaagcuuaccauggaacuuuuaauacuaaaagcuaacgccauaaccacuauacuaacagcagucacauucugcuucgcaucaggccaaaacauaaccgaagaauuuuaccaauccacuuguucagcagucuccaaaggauauuuauccgcacuucguacaggaugguauacaucaguaauaacaauagaacucuccaacauaaaagaaaauaaaugcaacggcaccgacgcaaaaguaaaacucaucaaacaagaauuagacaaauacaagaacgccguaacagaacuacaauuacuaaugcaaucaacacccgccacaggaucaggaucugcaauaugcucuggaguagcaguaugcaaaguauuacaccuagaaggagaaguaaacaaaaucaaaagcgcacuacuauccacaaacaaagcuguaguaucacuaucaaacggaguaucaguauuaacuuucaaaguacuugaucuaaaaaacuacauagacaaacaacuacuacccauauuaaacaaacaaucaugcucaauaagcaauauagaaacaguaauagaauuucaacaaaaaaacaacagacuacuagaaaucacaagggaauuuucaguaaaugccgguguuacaaccccaguaucaacauacaugcuaacuaacucagaacuacuauccuuaauaaacgauaugccaauaacaaacgaucaaaaaaaacuaauguccaacaacguacaaauaguaagacaacaaucauacucaaucaugugcauuauaaaagaagaagucuuagcauacguaguacaauuaccacuauacgguguaauagauacaccauguuggaaauuacacacaagcccacuaugcacaacuaacacaaaagaaggcucaaauauauguuuaacaagaacagaccgagguugguacugcgacaaugcaggaucaguaucauucuuuccacaagcagaaacauguaaaguucaauccaacagaguauucugcgacacaaugaacuccagaacacuaccuucagaaguaaaccucuguaacguagacauauuuaaucccaaguacgacugcaaaauaaugacaucgaaaacagacguaagcuccucagugauaacaucccucggcgccaucguauccuguuacgguaaaacuaaauguaccgccucaaacaaaaaccgcgguauuauaaaaacuuuuucuaauggcugcgauuacguaagcaacaaaggcgucgacacaguuuccguaggaaacacacuauacugcguaaacaaacaagaagguaaaucucuauacguaaaaggagaaccaauaauaaauuucuaugauccuuuaguauucccauccgaugaauuugacgccucuaucucacaagucaacgaaaaaauaaaucaaucauuagcauucauacgaaaaucagacgaacuacuacacaacguaaacgcaggaaaaucaacaaccaacauaaugauaaccacaauaauaauaguuauuauagugauacuauuauccuuaauugcagucggacuauuauuauacuguaaagcacgcuaaggacuaguguccaccugucccuccugggcugcuggauugucucguuuuccugccaaauaaacaggaucagcgcuuuacagaucuaaaaaaaaaaaaaaaaaaaaaaaaaaaaaaaaaaaaaaaaaaaaaaaaaaaaaaaaaaaaaaaaugcaucccccccccccccccccccccccccccccccaaaggcucuuuucagagccaccagaauu

SEQ ID NO: 5133 - RNA, 1874 nt, Artificial Sequence
  mRNA product Design e-1 comprising derived and/or modified sequence from HRSV(A2)__F-del_DSCav1_mut4 (opt11)
gggagaauauaagcguuggcggagcgucgguuguagcacucugcgcgcccgcucuucugcugcuguuugucuacuuccuccugcuuccccgccgccgccgccgccaucaagcuuaccauggaacuccucauccucaaagccaaugccaucaccacaauccugacagcaguaaccuucugcuucgcauccggacaaaacaucaccgaagaauuuuaccagucaaccugcuccgcugucucaaaaggcuaccucucagcccuucgcaccggcugguacaccucggucauaacaauagaacucuccaauaucaaagaaaacaaaugcaacggcacugacgccaagguaaaacucaucaaacaggaacucgauaaauacaagaacgccguaacagaacuacaacuacucaugcaaucaacaccggccaccggcuccgguuccgccauaugcuccggaguggccgugugcaagguccuccaccuugaaggggaaguuaacaaaaucaaaucagcccuccucuccacuaacaaagccguaguaucccuaagcaacgguguauccguccucaccuucaaaguacuagaccuaaagaauuauaucgacaaacaacuccuccccauacucaacaaacaauccugcuccauaagcaacaucgaaacagucaucgaguuccagcagaaaaacaaccgacuccucgaaauaacccgcgaguucucagucaacgccggagucaccacacccgucagcaccuacaugcugaccaacuccgaacuccucuccuuaaucaaugacaugcccaucaccaaugaccaaaagaaacucaugucaaacaacguccaaauaguacgccaacaauccuacuccaucaugugcaucauaaaagaagaaguacucgccuacgucguccaacucccccucuacggcguaaucgacacccccugcuggaaacuacacacaagcccccucugcaccacaaacacuaaagagggcuccaacaucugucuaacccgcaccgaucgaggcugguacugcgacaacgccggaucugucucauucuucccccaagccgaaaccugcaaaguccaauccaaccgcgucuucugcgacaccaugaacucgagaacccucccuuccgaagucaaccuaugcaacgucgacauuuucaaccccaaauacgacugcaaaaucaugaccucgaaaaccgacguaucauccagcgucaucaccagccuaggcgcaaucgugagcugcuacggcaaaaccaaaugcaccgcgagcaauaaaaaccgcgggaucaucaaaacuuucuccaacggcugcgacuacgucuccaacaagggagucgauaccgucuccguaggcaacacccucuacugcgucaacaaacaagaaggcaaaucacuauacguaaaaggcgagccaaucauaaacuucuacgacccucuaguuuucccauccgacgaguucgacgcuagcaucucccaagucaacgagaaaaucaaccaaucccucgcauucauccgcaaauccgacgaacuccuccacaacguaaacgcaggcaaaucaacuacuaauauaaugaucacaaccaucauaauagucauaaucguaauccuccuaucccucaucgccgucggacuacugcucuacugcaaagcccgcuaaggacuaguguccaccugucccuccugggcugcuggauugucucguuuuccugccaaauaaacaggaucagcgcuuuacagaucuaaaaaaaaaaaaaaaaaaaaaaaaaaaaaaaaaaaaaaaaaaaaaaaaaaaaaaaaaaaaaaaaugcaucccccccccccccccccccccccccccccccaaaggcucuuuucagagccaccagaauu

SEQ ID NO: 5134 - RNA, 1856 nt, Artificial Sequence
  mRNA product Design e-2 comprising derived and/or modified sequence from HRSV(A2)__F-del_DSCav1_mut4 (opt1)
gggagacccgugacccggaaguuguacggcuacgcgacuuucccucccacaaacccucgcgcccuuccuuuccuacuugggcccggcagaaagcuuaccauggagcugcucauccugaaggccaacgccaucaccaccauccugacggcggugaccuucugcuucgccagcggccagaacaucaccgaggaguucuaccaguccacgugcagcgccgucuccaagggguaccucagcgcccugcggaccggcugguacaccuccgugaucaccaucgagcugagcaacaucaaggagaacaagugcaacgggaccgacgccaaggugaagcucaucaagcaggagcuggacaaguacaagaacgcggucacggagcugcagcuccugaugcaguccaccccggcaaccggcuccggcuccgccaucugcagcggcgucgccgugugcaaggugcugcaccucgagggggaggucaacaagaucaagagcgcccugcuguccaccaacaaggccguggugagccucuccaacggcgucagcgugcugaccuucaaggugcuggaccucaagaacuacaucgacaagcagcugcugcccauccugaacaagcagagcugcuccaucagcaacaucgagacggugaucgaguuccagcagaagaacaaccggcuccuggagaucacccgcgaguucagcgugaacgccggggucaccacccccguguccacguacaugcugaccaacagcgagcuccugucccugaucaacgacaugccgaucaccaacgaccagaagaagcucaugagcaacaacgugcagaucguccggcagcaguccuacagcaucaugugcaucaucaaggaggaggugcuggcguacgugguccagcugccccucuacggcgugaucgacacccccugcuggaagcugcacacgagcccccugugcaccaccaacaccaaggagggguccaacaucugccucacgcgcaccgaccggggcugguacugcgacaacgccggcagcgucuccuucuucccgcaggccgagaccugcaaggugcagagcaaccgcguguucugcgacaccaugaacucccggacgcugcccagcgagguaaaccucugcaacgucgacaucuucaaccccaaguacgacugcaagaucaugaccuccaagaccgacgugagcuccagcgugaucaccucccugggggccaucgucagcugcuacggcaagacgaagugcaccgccagcaacaagaaccgggggaucaucaagaccuucuccaacggcugcgacuacgugagcaacaagggcguggacaccguguccgucgggaacacccuguacugcgugaacaagcaggagggcaagagccucuacgugaagggggagcccaucaucaacuucuacgacccgcuggucuuccccuccgacgaguucgacgcgagcaucucccaggugaacgagaagaucaaccagagccuggccuucauccgcaaguccgacgagcugcuccacaacgugaacgccggcaagagcacgaccaacaucaugaucaccaccaucaucaucgucaucaucgugauccugcugucccucaucgccguggggcugcugcucuacugcaaggcccggugaggacuaguguccaccugucccuccugggcugcuggauugucucguuuuccugccaaauaaacaggaucagcgcuuuacagaucuaaaaaaaaaaaaaaaaaaaaaaaaaaaaaaaaaaaaaaaaaaaaaaaaaaaaaaaaaaaaaaaaugcaucccccccccccccccccccccccccccccccaaaggcucuuuucagagccaccagaauu

SEQ ID NO: 5135 - RNA, 1856 nt, Artificial Sequence
  mRNA product Design e-2 comprising derived and/or modified sequence from HRSV(A2)__F-del_DSCav1_mut4 (opt1)
gggagacccgugacccggaaguuguacggcuacgcgacuuucccucccacaaacccucgcgcccuuccuuuccuacuugggcccggcagaaagcuuaccauggagcugcucauccugaaggccaacgccaucaccaccauccugacggcggugaccuucugcuucgccagcggccagaacaucaccgaggaguucuaccaguccacgugcagcgccgucuccaagggguaccucagcgcccugcgcaccggcugguacaccuccgugaucaccaucgagcugagcaacaucaaggagaacaagugcaacgggaccgacgccaaggugaagcucaucaagcaggagcuggacaaguacaagaacgcggucacggagcugcagcuccugaugcaguccacccccgccaccggcagcggguccgccaucugcagcggcguggccgugugcaagguccugcaccucgagggcgaggugaacaagaucaaguccgcgcugcugagcaccaacaaggccguggucucccucagcaacgggguguccgugcugacguucaagguccuggaccucaagaacuacaucgacaagcagcugcugccgauccucaacaagcagagcugcuccaucagcaacaucgagaccgugaucgaguuccagcagaagaacaaccggcugcuggagaucacccgcgaguucuccgugaacgccggcgucaccacgcccgugagcaccuacaugcucaccaacagcgagcugcugucccucaucaacgacaugcccaucaccaacgaccagaagaagcugaugagcaacaacgugcagaucguccggcagcaguccuacagcaucaugugcaucaucaaggaggaggugcuggccuacgugguccagcucccccuguacggggugaucgacacgccgugcuggaagcugcacaccagcccccucugcaccaccaacacgaaggagggcuccaacaucugccugacccgcaccgaccgggggugguacugcgacaacgccggcuccgugagcuucuucccccaggcggagaccugcaagguccaguccaaccgcguguucugcgacacgaugaacagccggacccuccccuccgaggucaaccugugcaacguggacaucuucaacccgaaguacgacugcaagaucaugaccagcaagaccgacguguccagcuccgucaucacgagccugggcgccaucguguccugcuacgggaagaccaagugcaccgccagcaacaagaaccggggcaucaucaagaccuucuccaacgggugcgacuacgugagcaacaagggcgucgacacggugagcgugggcaacacccucuacugcgucaacaagcaggaggggaagucccuguacgugaagggcgagcccaucaucaacuucuacgacccccugguguuccccagcgacgaguucgacgccuccaucagccaggucaacgagaagaucaaccagucccucgccuucauccgcaagagcgacgagcugcugcacaacgugaacgcggggaaguccaccaccaacaucaugaucaccacgaucaucaucgugaucaucgucauccuccugagccugaucgccgugggccuccugcuguacugcaaggcccggugaggacuaguguccaccugucccuccugggcugcuggauugucucguuuuccugccaaauaaacaggaucagcgcuuuacagaucuaaaaaaaaaaaaaaaaaaaaaaaaaaaaaaaaaaaaaaaaaaaaaaaaaaaaaaaaaaaaaaaaugcaucccccccccccccccccccccccccccccccaaaggcucuuuucagagccaccagaauu

SEQ ID NO: 5136 - RNA, 1856 nt, Artificial Sequence
  mRNA product Design e-2 comprising derived and/or modified sequence from HRSV(A2)__F-del_DSCav1_mut4 (opt2)
gggagacccgugacccggaaguuguacggcuacgcgacuuucccucccacaaacccucgcgcccuuccuuuccuacuugggcccggcagaaagcuuaccauggagcuccucauccucaaggccaacgccaucaccaccauccucaccgccgucaccuucugcuucgccuccggccagaacaucaccgaggaguucuaccaguccaccugcuccgccgucuccaagggcuaccucuccgcccuccgcaccggcugguacaccuccgucaucaccaucgagcucuccaacaucaaggagaacaagugcaacggcaccgacgccaaggucaagcucaucaagcaggagcucgacaaguacaagaacgccgucaccgagcuccagcuccucaugcaguccacccccgccaccggcuccggcuccgccaucugcuccggcgucgccgucugcaagguccuccaccucgagggcgaggucaacaagaucaaguccgcccuccucuccaccaacaaggccgucgucucccucuccaacggcgucuccguccucaccuucaagguccucgaccucaagaacuacaucgacaagcagcuccuccccauccucaacaagcaguccugcuccaucuccaacaucgagaccgucaucgaguuccagcagaagaacaaccgccuccucgagaucacccgcgaguucuccgucaacgccggcgucaccacccccgucuccaccuacaugcucaccaacuccgagcuccucucccucaucaacgacaugcccaucaccaacgaccagaagaagcucauguccaacaacguccagaucguccgccagcaguccuacuccaucaugugcaucaucaaggaggagguccucgccuacgucguccagcucccccucuacggcgucaucgacacccccugcuggaagcuccacaccuccccccucugcaccaccaacaccaaggagggcuccaacaucugccucacccgcaccgaccgcggcugguacugcgacaacgccggcuccgucuccuucuucccccaggccgagaccugcaagguccaguccaaccgcgucuucugcgacaccaugaacucccgcacccuccccuccgaggucaaccucugcaacgucgacaucuucaaccccaaguacgacugcaagaucaugaccuccaagaccgacgucuccuccuccgucaucaccucccucggcgccaucgucuccugcuacggcaagaccaagugcaccgccuccaacaagaaccgcggcaucaucaagaccuucuccaacggcugcgacuacgucuccaacaagggcgucgacaccgucuccgucggcaacacccucuacugcgucaacaagcaggagggcaagucccucuacgucaagggcgagcccaucaucaacuucuacgacccccucgucuuccccuccgacgaguucgacgccuccaucucccaggucaacgagaagaucaaccagucccucgccuucauccgcaaguccgacgagcuccuccacaacgucaacgccggcaaguccaccaccaacaucaugaucaccaccaucaucaucgucaucaucgucauccuccucucccucaucgccgucggccuccuccucuacugcaaggcccgcugaggacuaguguccaccugucccuccugggcugcuggauugucucguuuuccugccaaauaaacaggaucagcgcuuuacagaucuaaaaaaaaaaaaaaaaaaaaaaaaaaaaaaaaaaaaaaaaaaaaaaaaaaaaaaaaaaaaaaaaugcaucccccccccccccccccccccccccccccccaaaggcucuuuucagagccaccagaauu

SEQ ID NO: 5137 - RNA, 1856 nt, Artificial Sequence
  mRNA product Design e-2 comprising derived and/or modified sequence from HRSV(A2)__F-del_DSCav1_mut4 (opt3)
gggagacccgugacccggaaguuguacggcuacgcgacuuucccucccacaaacccucgcgcccuuccuuuccuacuugggcccggcagaaagcuuaccauggagcugcucauccuuaaggccaacgcuauuaccacaauacugacugcagugacguucugcuuugccagcggccagaauaucaccgaagaguucuaccaauccacauguucugcggucucaaaaggguauuugagugcuuuaagaacuggaugguacaccagcguuauuacaaucgaacuguccaacauuaaggagaauaaaugcaacgguaccgacgccaaggugaaacuaaucaagcaggaacucgauaaguauaaaaaugcaguaacugagcugcagcuucugaugcagucuacacccgccaccggcucggggucagcuauauguagcggaguggcagucugcaagguguugcaccucgagggcgaaguuaacaaaaucaagagugcccugcuguccacgaauaaagcuguggucucucucagcaacgguguguccguauuaacuuuuaagguucuggaccuuaagaauuacauugauaaacaauugcugccuauccuaaacaagcagucauguaguauuagcaauaucgagaccgugauagaguuccagcagaaaaacaauaggcuccuggaaauuacacgggaguuuucugucaacgccggggugacuaccccaguguccacauauaugcuuaccaauucagaacuguugagccucaucaacgacaugccgauuacgaacgaucaaaagaaacugaugaguaauaacguccagaucguucgccagcagucuuacuccaucaugugcauuauaaaggaggaaguguuagcguauguagugcaacugccccucuacggagucaucgacacuccuuguuggaaacuucauacaagcccacugugcaccacuaauacaaaggagggcucgaacauuuguuugacccgaacggaucguggcugguacugcgacaaugcagggucuguguccuucuuuccccaggccgaaaccuguaagguucagucaaacagaguguucugcgauacaaugaauaguagaacucugccuagcgaggucaaccucugcaauguggacaucuuuaacccaaaauaugauuguaagauaaugaccuccaaaacagacguaucuagcucaguuauuaccagucugggagcuaucguguccugcuacgguaagacuaaauguacagccagcaauaagaacaggggcaucauuaagaccuucucuaaugggugcgauuaugucucaaacaaaggaguggacacugucagugugggcaauacgcuuuacuguguuaacaagcaagaggguaaaagccuguaugugaagggggaacccaucauuaacuuuuacgacccuuugguauucccauccgaugaguuugacgcaucuauaucgcaggucaaugagaaaaucaaccagagccucgcuuucauucggaaguccgaugaacuguuacacaaugugaacgccggaaagucaacaaccaauaucaugaucacuaccauuauaaucguuauuaucgugauucugcuaagucucaucgcggucggccugcuuuuguauugcaaagcccgcugaggacuaguguccaccugucccuccugggcugcuggauugucucguuuuccugccaaauaaacaggaucagcgcuuuacagaucuaaaaaaaaaaaaaaaaaaaaaaaaaaaaaaaaaaaaaaaaaaaaaaaaaaaaaaaaaaaaaaaaugcaucccccccccccccccccccccccccccccccaaaggcucuuuucagagccaccagaauu

SEQ ID NO: 5138 - RNA, 1856 nt, Artificial Sequence
  mRNA product Design e-2 comprising derived and/or modified sequence from HRSV(A2)__F-del_DSCav1_mut4 (opt4)
gggagacccgugacccggaaguuguacggcuacgcgacuuucccucccacaaacccucgcgcccuuccuuuccuacuugggcccggcagaaagcuuaccauggagcugcugauccugaaggccaacgccaucaccaccauccugaccgccgugaccuucugcuucgccagcggccagaacaucaccgaggaguucuaccagagcaccugcagcgccgugagcaagggcuaccugagcgcccugagaaccggcugguacaccagcgugaucaccaucgagcugagcaacaucaaggagaacaagugcaacggcaccgacgccaaggugaagcugaucaagcaggagcuggacaaguacaagaacgccgugaccgagcugcagcugcugaugcagagcacccccgccaccggcagcggcagcgccaucugcagcggcguggccgugugcaaggugcugcaccuggagggcgaggugaacaagaucaagagcgcccugcugagcaccaacaaggccguggugagccugagcaacggcgugagcgugcugaccuucaaggugcuggaccugaagaacuacaucgacaagcagcugcugcccauccugaacaagcagagcugcagcaucagcaacaucgagaccgugaucgaguuccagcagaagaacaacagacugcuggagaucaccagagaguucagcgugaacgccggcgugaccacccccgugagcaccuacaugcugaccaacagcgagcugcugagccugaucaacgacaugcccaucaccaacgaccagaagaagcugaugagcaacaacgugcagaucgugagacagcagagcuacagcaucaugugcaucaucaaggaggaggugcuggccuacguggugcagcugccccuguacggcgugaucgacacccccugcuggaagcugcacaccagcccccugugcaccaccaacaccaaggagggcagcaacaucugccugaccagaaccgacagaggcugguacugcgacaacgccggcagcgugagcuucuucccccaggccgagaccugcaaggugcagagcaacagaguguucugcgacaccaugaacagcagaacccugcccagcgaggugaaccugugcaacguggacaucuucaaccccaaguacgacugcaagaucaugaccagcaagaccgacgugagcagcagcgugaucaccagccugggcgccaucgugagcugcuacggcaagaccaagugcaccgccagcaacaagaacagaggcaucaucaagaccuucagcaacggcugcgacuacgugagcaacaagggcguggacaccgugagcgugggcaacacccuguacugcgugaacaagcaggagggcaagagccuguacgugaagggcgagcccaucaucaacuucuacgacccccugguguuccccagcgacgaguucgacgccagcaucagccaggugaacgagaagaucaaccagagccuggccuucaucagaaagagcgacgagcugcugcacaacgugaacgccggcaagagcaccaccaacaucaugaucaccaccaucaucaucgugaucaucgugauccugcugagccugaucgccgugggccugcugcuguacugcaaggccagaugaggacuaguguccaccugucccuccugggcugcuggauugucucguuuuccugccaaauaaacaggaucagcgcuuuacagaucuaaaaaaaaaaaaaaaaaaaaaaaaaaaaaaaaaaaaaaaaaaaaaaaaaaaaaaaaaaaaaaaaugcaucccccccccccccccccccccccccccccccaaaggcucuuuucagagccaccagaauu

SEQ ID NO: 5139 - RNA, 1856 nt, Artificial Sequence
  mRNA product Design e-2 comprising derived and/or modified sequence from HRSV(A2)__F-del_DSCav1_mut4 (opt5)
gggagacccgugacccggaaguuguacggcuacgcgacuuucccucccacaaacccucgcgcccuuccuuuccuacuugggcccggcagaaagcuuaccauggagcugcucauccugaaggccaacgcuauuaccacaauccuuacggccgugaccuucugcuuugcgagcggccagaauauuacagaagaguucuaccaauccaccuguucugcugucagcaaaggguaucuguccgcccucagaacaggaugguacaccucuguuaucacaauugaacugagcaacaucaaggagaauaaaugcaacggcaccgacgccaaggugaaacuuaucaagcaggaacuggauaaguauaaaaaugcugugacggagcuccagcugcugaugcaguccacccccgccacagggucuggaagcgcuauuuguuccggcgucgccgugugcaagguucuccaccuggagggggaagugaacaaaaucaagagcgcgcuucugucuaccaauaaagccgucgugucccucagcaacggaguuucugugcugacauuuaagguccuugaccugaagaauuacauugauaaacaacuccugccuauccugaacaagcaguccuguagcauuucuaauaucgagaccgugauugaguuccagcagaaaaacaaucggcuccuggaaaucacgcgcgaguuuuccgugaacgcuggcgucacaaccccgguuagcacauauaugcuuaccaauuccgaacugcucucucugaucaacgacaugcccauuaccaacgaucaaaagaaacuuaugagcaauaacgugcagaucgugagacagcaguccuacagcauuaugugcaucauuaaggaggaaguccuggccuaugugguucaacucccucuguacggcgugaucgacacacccuguuggaaacugcauacgucuccucucugcaccacaaauaccaaggagggguccaacaucugucugacacggaccgaucgcggaugguacugcgacaaugcuggcagcgucucuuucuuuccccaggccgaaacguguaaggugcagagcaacagaguuuucugcgauacaaugaacuccagaacccugccuucugaggugaaucucugcaaugucgacauuuuuaacccgaaauaugauuguaagaucaugaccagcaaaacagacguguccagcucugucauuaccucccugggggcgaucgugagcugcuacggaaagacaaaauguacggccucuaauaagaaccggggcauuaucaagaccuucuccaaugggugcgauuauguuagcaacaaaggaguggacacagucuccgugggcaauacccuuuacuguguuaacaagcaagagggcaaaucucuguaugugaagggggaacccaucauuaacuuuuacgacccucucgucuuccccagcgaugaguuugacgcuuccaucucucaggugaaugagaaaauuaaccagagccuggccuucauccgcaaguccgaugaacugcuccacaaugugaacgcuggaaagagcacaaccaauauuaugaucacgaccauuaucaucguuauuaucgucauucugcuuucucugaucgccgugggccuccugcuguauugcaaagccagaugaggacuaguguccaccugucccuccugggcugcuggauugucucguuuuccugccaaauaaacaggaucagcgcuuuacagaucuaaaaaaaaaaaaaaaaaaaaaaaaaaaaaaaaaaaaaaaaaaaaaaaaaaaaaaaaaaaaaaaaugcaucccccccccccccccccccccccccccccccaaaggcucuuuucagagccaccagaauu

SEQ ID NO: 5140 - RNA, 1856 nt, Artificial Sequence
  mRNA product Design e-2 comprising derived and/or modified sequence from HRSV(A2)__F-del_DSCav1_mut4 (opt6)
gggagacccgugacccggaaguuguacggcuacgcgacuuucccucccacaaacccucgcgcccuuccuuuccuacuugggcccggcagaaagcuuaccauggaacuuuuaauacuaaaagcuaacgccauaaccacuauacuaacagcagucacauucugcuucgcaucaggccaaaacauaaccgaagaauuuuaccaauccacuuguucagcagucuccaaaggauauuuauccgcacuucguacaggaugguauacaucaguaauaacaauagaacucuccaacauaaaagaaaauaaaugcaacggcaccgacgcaaaaguaaaacucaucaaacaagaauuagacaaauacaagaacgccguaacagaacuacaauuacuaaugcaaucaacacccgccacaggaucaggaucugcaauaugcucuggaguagcaguaugcaaaguauuacaccuagaaggagaaguaaacaaaaucaaaagcgcacuacuauccacaaacaaagcuguaguaucacuaucaaacggaguaucaguauuaacuuucaaaguacuugaucuaaaaaacuacauagacaaacaacuacuacccauauuaaacaaacaaucaugcucaauaagcaauauagaaacaguaauagaauuucaacaaaaaaacaacagacuacuagaaaucacaagggaauuuucaguaaaugccgguguuacaaccccaguaucaacauacaugcuaacuaacucagaacuacuauccuuaauaaacgauaugccaauaacaaacgaucaaaaaaaacuaauguccaacaacguacaaauaguaagacaacaaucauacucaaucaugugcauuauaaaagaagaagucuuagcauacguaguacaauuaccacuauacgguguaauagauacaccauguuggaaauuacacacaagcccacuaugcacaacuaacacaaaagaaggcucaaauauauguuuaacaagaacagaccgagguugguacugcgacaaugcaggaucaguaucauucuuuccacaagcagaaacauguaaaguucaauccaacagaguauucugcgacacaaugaacuccagaacacuaccuucagaaguaaaccucuguaacguagacauauuuaaucccaaguacgacugcaaaauaaugacaucgaaaacagacguaagcuccucagugauaacaucccucggcgccaucguauccuguuacgguaaaacuaaauguaccgccucaaacaaaaaccgcgguauuauaaaaacuuuuucuaauggcugcgauuacguaagcaacaaaggcgucgacacaguuuccguaggaaacacacuauacugcguaaacaaacaagaagguaaaucucuauacguaaaaggagaaccaauaauaaauuucuaugauccuuuaguauucccauccgaugaauuugacgccucuaucucacaagucaacgaaaaaauaaaucaaucauuagcauucauacgaaaaucagacgaacuacuacacaacguaaacgcaggaaaaucaacaaccaacauaaugauaaccacaauaauaauaguuauuauagugauacuauuauccuuaauugcagucggacuauuauuauacuguaaagcacgcuaaggacuaguguccaccugucccuccugggcugcuggauugucucguuuuccugccaaauaaacaggaucagcgcuuuacagaucuaaaaaaaaaaaaaaaaaaaaaaaaaaaaaaaaaaaaaaaaaaaaaaaaaaaaaaaaaaaaaaaaugcaucccccccccccccccccccccccccccccccaaaggcucuuuucagagccaccagaauu

SEQ ID NO: 5141 - RNA, 1856 nt, Artificial Sequence
  mRNA product Design e-2 comprising derived and/or modified sequence from HRSV(A2)__F-del_DSCav1_mut4 (opt11)
gggagacccgugacccggaaguuguacggcuacgcgacuuucccucccacaaacccucgcgcccuuccuuuccuacuugggcccggcagaaagcuuaccauggaacuccucauccucaaagccaaugccaucaccacaauccugacagcaguaaccuucugcuucgcauccggacaaaacaucaccgaagaauuuuaccagucaaccugcuccgcugucucaaaaggcuaccucucagcccuucgcaccggcugguacaccucggucauaacaauagaacucuccaauaucaaagaaaacaaaugcaacggcacugacgccaagguaaaacucaucaaacaggaacucgauaaauacaagaacgccguaacagaacuacaacuacucaugcaaucaacaccggccaccggcuccgguuccgccauaugcuccggaguggccgugugcaagguccuccaccuugaaggggaaguuaacaaaaucaaaucagcccuccucuccacuaacaaagccguaguaucccuaagcaacgguguauccguccucaccuucaaaguacuagaccuaaagaauuauaucgacaaacaacuccuccccauacucaacaaacaauccugcuccauaagcaacaucgaaacagucaucgaguuccagcagaaaaacaaccgacuccucgaaauaacccgcgaguucucagucaacgccggagucaccacacccgucagcaccuacaugcugaccaacuccgaacuccucuccuuaaucaaugacaugcccaucaccaaugaccaaaagaaacucaugucaaacaacguccaaauaguacgccaacaauccuacuccaucaugugcaucauaaaagaagaaguacucgccuacgucguccaacucccccucuacggcguaaucgacacccccugcuggaaacuacacacaagcccccucugcaccacaaacacuaaagagggcuccaacaucugucuaacccgcaccgaucgaggcugguacugcgacaacgccggaucugucucauucuucccccaagccgaaaccugcaaaguccaauccaaccgcgucuucugcgacaccaugaacucgagaacccucccuuccgaagucaaccuaugcaacgucgacauuuucaaccccaaauacgacugcaaaaucaugaccucgaaaaccgacguaucauccagcgucaucaccagccuaggcgcaaucgugagcugcuacggcaaaaccaaaugcaccgcgagcaauaaaaaccgcgggaucaucaaaacuuucuccaacggcugcgacuacgucuccaacaagggagucgauaccgucuccguaggcaacacccucuacugcgucaacaaacaagaaggcaaaucacuauacguaaaaggcgagccaaucauaaacuucuacgacccucuaguuuucccauccgacgaguucgacgcuagcaucucccaagucaacgagaaaaucaaccaaucccucgcauucauccgcaaauccgacgaacuccuccacaacguaaacgcaggcaaaucaacuacuaauauaaugaucacaaccaucauaauagucauaaucguaauccuccuaucccucaucgccgucggacuacugcucuacugcaaagcccgcuaaggacuaguguccaccugucccuccugggcugcuggauugucucguuuuccugccaaauaaacaggaucagcgcuuuacagaucuaaaaaaaaaaaaaaaaaaaaaaaaaaaaaaaaaaaaaaaaaaaaaaaaaaaaaaaaaaaaaaaaugcaucccccccccccccccccccccccccccccccaaaggcucuuuucagagccaccagaauu

SEQ ID NO: 5142 - RNA, 1826 nt, Artificial Sequence
  mRNA product Design e-3 comprising derived and/or modified sequence from HRSV(A2)__F-del_DSCav1_mut4 (opt1)
gggagacuuucccauucuguagcagaauuugguguugccuguggucuuggucccgcggagaagcuuaccauggagcugcucauccugaaggccaacgccaucaccaccauccugacggcggugaccuucugcuucgccagcggccagaacaucaccgaggaguucuaccaguccacgugcagcgccgucuccaagggguaccucagcgcccugcggaccggcugguacaccuccgugaucaccaucgagcugagcaacaucaaggagaacaagugcaacgggaccgacgccaaggugaagcucaucaagcaggagcuggacaaguacaagaacgcggucacggagcugcagcuccugaugcaguccaccccggcaaccggcuccggcuccgccaucugcagcggcgucgccgugugcaaggugcugcaccucgagggggaggucaacaagaucaagagcgcccugcuguccaccaacaaggccguggugagccucuccaacggcgucagcgugcugaccuucaaggugcuggaccucaagaacuacaucgacaagcagcugcugcccauccugaacaagcagagcugcuccaucagcaacaucgagacggugaucgaguuccagcagaagaacaaccggcuccuggagaucacccgcgaguucagcgugaacgccggggucaccacccccguguccacguacaugcugaccaacagcgagcuccugucccugaucaacgacaugccgaucaccaacgaccagaagaagcucaugagcaacaacgugcagaucguccggcagcaguccuacagcaucaugugcaucaucaaggaggaggugcuggcguacgugguccagcugccccucuacggcgugaucgacacccccugcuggaagcugcacacgagcccccugugcaccaccaacaccaaggagggguccaacaucugccucacgcgcaccgaccggggcugguacugcgacaacgccggcagcgucuccuucuucccgcaggccgagaccugcaaggugcagagcaaccgcguguucugcgacaccaugaacucccggacgcugcccagcgagguaaaccucugcaacgucgacaucuucaaccccaaguacgacugcaagaucaugaccuccaagaccgacgugagcuccagcgugaucaccucccugggggccaucgucagcugcuacggcaagacgaagugcaccgccagcaacaagaaccgggggaucaucaagaccuucuccaacggcugcgacuacgugagcaacaagggcguggacaccguguccgucgggaacacccuguacugcgugaacaagcaggagggcaagagccucuacgugaagggggagcccaucaucaacuucuacgacccgcuggucuuccccuccgacgaguucgacgcgagcaucucccaggugaacgagaagaucaaccagagccuggccuucauccgcaaguccgacgagcugcuccacaacgugaacgccggcaagagcacgaccaacaucaugaucaccaccaucaucaucgucaucaucgugauccugcugucccucaucgccguggggcugcugcucuacugcaaggcccggugaggacuaguguccaccugucccuccugggcugcuggauugucucguuuuccugccaaauaaacaggaucagcgcuuuacagaucuaaaaaaaaaaaaaaaaaaaaaaaaaaaaaaaaaaaaaaaaaaaaaaaaaaaaaaaaaaaaaaaaugcaucccccccccccccccccccccccccccccccaaaggcucuuuucagagccaccagaauu

SEQ ID NO: 5143 - RNA, 1826 nt, Artificial Sequence
  mRNA product Design e-3 comprising derived and/or modified sequence from HRSV(A2)__F-del_DSCav1_mut4 (opt1)
gggagacuuucccauucuguagcagaauuugguguugccuguggucuuggucccgcggagaagcuuaccauggagcugcucauccugaaggccaacgccaucaccaccauccugacggcggugaccuucugcuucgccagcggccagaacaucaccgaggaguucuaccaguccacgugcagcgccgucuccaagggguaccucagcgcccugcgcaccggcugguacaccuccgugaucaccaucgagcugagcaacaucaaggagaacaagugcaacgggaccgacgccaaggugaagcucaucaagcaggagcuggacaaguacaagaacgcggucacggagcugcagcuccugaugcaguccacccccgccaccggcagcggguccgccaucugcagcggcguggccgugugcaagguccugcaccucgagggcgaggugaacaagaucaaguccgcgcugcugagcaccaacaaggccguggucucccucagcaacgggguguccgugcugacguucaagguccuggaccucaagaacuacaucgacaagcagcugcugccgauccucaacaagcagagcugcuccaucagcaacaucgagaccgugaucgaguuccagcagaagaacaaccggcugcuggagaucacccgcgaguucuccgugaacgccggcgucaccacgcccgugagcaccuacaugcucaccaacagcgagcugcugucccucaucaacgacaugcccaucaccaacgaccagaagaagcugaugagcaacaacgugcagaucguccggcagcaguccuacagcaucaugugcaucaucaaggaggaggugcuggccuacgugguccagcucccccuguacggggugaucgacacgccgugcuggaagcugcacaccagcccccucugcaccaccaacacgaaggagggcuccaacaucugccugacccgcaccgaccgggggugguacugcgacaacgccggcuccgugagcuucuucccccaggcggagaccugcaagguccaguccaaccgcguguucugcgacacgaugaacagccggacccuccccuccgaggucaaccugugcaacguggacaucuucaacccgaaguacgacugcaagaucaugaccagcaagaccgacguguccagcuccgucaucacgagccugggcgccaucguguccugcuacgggaagaccaagugcaccgccagcaacaagaaccggggcaucaucaagaccuucuccaacgggugcgacuacgugagcaacaagggcgucgacacggugagcgugggcaacacccucuacugcgucaacaagcaggaggggaagucccuguacgugaagggcgagcccaucaucaacuucuacgacccccugguguuccccagcgacgaguucgacgccuccaucagccaggucaacgagaagaucaaccagucccucgccuucauccgcaagagcgacgagcugcugcacaacgugaacgcggggaaguccaccaccaacaucaugaucaccacgaucaucaucgugaucaucgucauccuccugagccugaucgccgugggccuccugcuguacugcaaggcccggugaggacuaguguccaccugucccuccugggcugcuggauugucucguuuuccugccaaauaaacaggaucagcgcuuuacagaucuaaaaaaaaaaaaaaaaaaaaaaaaaaaaaaaaaaaaaaaaaaaaaaaaaaaaaaaaaaaaaaaaugcaucccccccccccccccccccccccccccccccaaaggcucuuuucagagccaccagaauu

SEQ ID NO: 5144 - RNA, 1826 nt, Artificial Sequence
  mRNA product Design e-3 comprising derived and/or modified sequence from HRSV(A2)__F-del_DSCav1_mut4 (opt2)
gggagacuuucccauucuguagcagaauuugguguugccuguggucuuggucccgcggagaagcuuaccauggagcuccucauccucaaggccaacgccaucaccaccauccucaccgccgucaccuucugcuucgccuccggccagaacaucaccgaggaguucuaccaguccaccugcuccgccgucuccaagggcuaccucuccgcccuccgcaccggcugguacaccuccgucaucaccaucgagcucuccaacaucaaggagaacaagugcaacggcaccgacgccaaggucaagcucaucaagcaggagcucgacaaguacaagaacgccgucaccgagcuccagcuccucaugcaguccacccccgccaccggcuccggcuccgccaucugcuccggcgucgccgucugcaagguccuccaccucgagggcgaggucaacaagaucaaguccgcccuccucuccaccaacaaggccgucgucucccucuccaacggcgucuccguccucaccuucaagguccucgaccucaagaacuacaucgacaagcagcuccuccccauccucaacaagcaguccugcuccaucuccaacaucgagaccgucaucgaguuccagcagaagaacaaccgccuccucgagaucacccgcgaguucuccgucaacgccggcgucaccacccccgucuccaccuacaugcucaccaacuccgagcuccucucccucaucaacgacaugcccaucaccaacgaccagaagaagcucauguccaacaacguccagaucguccgccagcaguccuacuccaucaugugcaucaucaaggaggagguccucgccuacgucguccagcucccccucuacggcgucaucgacacccccugcuggaagcuccacaccuccccccucugcaccaccaacaccaaggagggcuccaacaucugccucacccgcaccgaccgcggcugguacugcgacaacgccggcuccgucuccuucuucccccaggccgagaccugcaagguccaguccaaccgcgucuucugcgacaccaugaacucccgcacccuccccuccgaggucaaccucugcaacgucgacaucuucaaccccaaguacgacugcaagaucaugaccuccaagaccgacgucuccuccuccgucaucaccucccucggcgccaucgucuccugcuacggcaagaccaagugcaccgccuccaacaagaaccgcggcaucaucaagaccuucuccaacggcugcgacuacgucuccaacaagggcgucgacaccgucuccgucggcaacacccucuacugcgucaacaagcaggagggcaagucccucuacgucaagggcgagcccaucaucaacuucuacgacccccucgucuuccccuccgacgaguucgacgccuccaucucccaggucaacgagaagaucaaccagucccucgccuucauccgcaaguccgacgagcuccuccacaacgucaacgccggcaaguccaccaccaacaucaugaucaccaccaucaucaucgucaucaucgucauccuccucucccucaucgccgucggccuccuccucuacugcaaggcccgcugaggacuaguguccaccugucccuccugggcugcuggauugucucguuuuccugccaaauaaacaggaucagcgcuuuacagaucuaaaaaaaaaaaaaaaaaaaaaaaaaaaaaaaaaaaaaaaaaaaaaaaaaaaaaaaaaaaaaaaaugcaucccccccccccccccccccccccccccccccaaaggcucuuuucagagccaccagaauu

SEQ ID NO: 5145 - RNA, 1826 nt, Artificial Sequence
  mRNA product Design e-3 comprising derived and/or modified sequence from HRSV(A2)__F-del_DSCav1_mut4 (opt3)
gggagacuuucccauucuguagcagaauuugguguugccuguggucuuggucccgcggagaagcuuaccauggagcugcucauccuuaaggccaacgcuauuaccacaauacugacugcagugacguucugcuuugccagcggccagaauaucaccgaagaguucuaccaauccacauguucugcggucucaaaaggguauuugagugcuuuaagaacuggaugguacaccagcguuauuacaaucgaacuguccaacauuaaggagaauaaaugcaacgguaccgacgccaaggugaaacuaaucaagcaggaacucgauaaguauaaaaaugcaguaacugagcugcagcuucugaugcagucuacacccgccaccggcucggggucagcuauauguagcggaguggcagucugcaagguguugcaccucgagggcgaaguuaacaaaaucaagagugcccugcuguccacgaauaaagcuguggucucucucagcaacgguguguccguauuaacuuuuaagguucuggaccuuaagaauuacauugauaaacaauugcugccuauccuaaacaagcagucauguaguauuagcaauaucgagaccgugauagaguuccagcagaaaaacaauaggcuccuggaaauuacacgggaguuuucugucaacgccggggugacuaccccaguguccacauauaugcuuaccaauucagaacuguugagccucaucaacgacaugccgauuacgaacgaucaaaagaaacugaugaguaauaacguccagaucguucgccagcagucuuacuccaucaugugcauuauaaaggaggaaguguuagcguauguagugcaacugccccucuacggagucaucgacacuccuuguuggaaacuucauacaagcccacugugcaccacuaauacaaaggagggcucgaacauuuguuugacccgaacggaucguggcugguacugcgacaaugcagggucuguguccuucuuuccccaggccgaaaccuguaagguucagucaaacagaguguucugcgauacaaugaauaguagaacucugccuagcgaggucaaccucugcaauguggacaucuuuaacccaaaauaugauuguaagauaaugaccuccaaaacagacguaucuagcucaguuauuaccagucugggagcuaucguguccugcuacgguaagacuaaauguacagccagcaauaagaacaggggcaucauuaagaccuucucuaaugggugcgauuaugucucaaacaaaggaguggacacugucagugugggcaauacgcuuuacuguguuaacaagcaagaggguaaaagccuguaugugaagggggaacccaucauuaacuuuuacgacccuuugguauucccauccgaugaguuugacgcaucuauaucgcaggucaaugagaaaaucaaccagagccucgcuuucauucggaaguccgaugaacuguuacacaaugugaacgccggaaagucaacaaccaauaucaugaucacuaccauuauaaucguuauuaucgugauucugcuaagucucaucgcggucggccugcuuuuguauugcaaagcccgcugaggacuaguguccaccugucccuccugggcugcuggauugucucguuuuccugccaaauaaacaggaucagcgcuuuacagaucuaaaaaaaaaaaaaaaaaaaaaaaaaaaaaaaaaaaaaaaaaaaaaaaaaaaaaaaaaaaaaaaaugcaucccccccccccccccccccccccccccccccaaaggcucuuuucagagccaccagaauu

SEQ ID NO: 5146 - RNA, 1826 nt, Artificial Sequence
  mRNA product Design e-3 comprising derived and/or modified sequence from HRSV(A2)__F-del_DSCav1_mut4 (opt4)
gggagacuuucccauucuguagcagaauuugguguugccuguggucuuggucccgcggagaagcuuaccauggagcugcugauccugaaggccaacgccaucaccaccauccugaccgccgugaccuucugcuucgccagcggccagaacaucaccgaggaguucuaccagagcaccugcagcgccgugagcaagggcuaccugagcgcccugagaaccggcugguacaccagcgugaucaccaucgagcugagcaacaucaaggagaacaagugcaacggcaccgacgccaaggugaagcugaucaagcaggagcuggacaaguacaagaacgccgugaccgagcugcagcugcugaugcagagcacccccgccaccggcagcggcagcgccaucugcagcggcguggccgugugcaaggugcugcaccuggagggcgaggugaacaagaucaagagcgcccugcugagcaccaacaaggccguggugagccugagcaacggcgugagcgugcugaccuucaaggugcuggaccugaagaacuacaucgacaagcagcugcugcccauccugaacaagcagagcugcagcaucagcaacaucgagaccgugaucgaguuccagcagaagaacaacagacugcuggagaucaccagagaguucagcgugaacgccggcgugaccacccccgugagcaccuacaugcugaccaacagcgagcugcugagccugaucaacgacaugcccaucaccaacgaccagaagaagcugaugagcaacaacgugcagaucgugagacagcagagcuacagcaucaugugcaucaucaaggaggaggugcuggccuacguggugcagcugccccuguacggcgugaucgacacccccugcuggaagcugcacaccagcccccugugcaccaccaacaccaaggagggcagcaacaucugccugaccagaaccgacagaggcugguacugcgacaacgccggcagcgugagcuucuucccccaggccgagaccugcaaggugcagagcaacagaguguucugcgacaccaugaacagcagaacccugcccagcgaggugaaccugugcaacguggacaucuucaaccccaaguacgacugcaagaucaugaccagcaagaccgacgugagcagcagcgugaucaccagccugggcgccaucgugagcugcuacggcaagaccaagugcaccgccagcaacaagaacagaggcaucaucaagaccuucagcaacggcugcgacuacgugagcaacaagggcguggacaccgugagcgugggcaacacccuguacugcgugaacaagcaggagggcaagagccuguacgugaagggcgagcccaucaucaacuucuacgacccccugguguuccccagcgacgaguucgacgccagcaucagccaggugaacgagaagaucaaccagagccuggccuucaucagaaagagcgacgagcugcugcacaacgugaacgccggcaagagcaccaccaacaucaugaucaccaccaucaucaucgugaucaucgugauccugcugagccugaucgccgugggccugcugcuguacugcaaggccagaugaggacuaguguccaccugucccuccugggcugcuggauugucucguuuuccugccaaauaaacaggaucagcgcuuuacagaucuaaaaaaaaaaaaaaaaaaaaaaaaaaaaaaaaaaaaaaaaaaaaaaaaaaaaaaaaaaaaaaaaugcaucccccccccccccccccccccccccccccccaaaggcucuuuucagagccaccagaauu

SEQ ID NO: 5147 - RNA, 1826 nt, Artificial Sequence
  mRNA product Design e-3 comprising derived and/or modified sequence from HRSV(A2)__F-del_DSCav1_mut4 (opt5)
gggagacuuucccauucuguagcagaauuugguguugccuguggucuuggucccgcggagaagcuuaccauggagcugcucauccugaaggccaacgcuauuaccacaauccuuacggccgugaccuucugcuuugcgagcggccagaauauuacagaagaguucuaccaauccaccuguucugcugucagcaaaggguaucuguccgcccucagaacaggaugguacaccucuguuaucacaauugaacugagcaacaucaaggagaauaaaugcaacggcaccgacgccaaggugaaacuuaucaagcaggaacuggauaaguauaaaaaugcugugacggagcuccagcugcugaugcaguccacccccgccacagggucuggaagcgcuauuuguuccggcgucgccgugugcaagguucuccaccuggagggggaagugaacaaaaucaagagcgcgcuucugucuaccaauaaagccgucgugucccucagcaacggaguuucugugcugacauuuaagguccuugaccugaagaauuacauugauaaacaacuccugccuauccugaacaagcaguccuguagcauuucuaauaucgagaccgugauugaguuccagcagaaaaacaaucggcuccuggaaaucacgcgcgaguuuuccgugaacgcuggcgucacaaccccgguuagcacauauaugcuuaccaauuccgaacugcucucucugaucaacgacaugcccauuaccaacgaucaaaagaaacuuaugagcaauaacgugcagaucgugagacagcaguccuacagcauuaugugcaucauuaaggaggaaguccuggccuaugugguucaacucccucuguacggcgugaucgacacacccuguuggaaacugcauacgucuccucucugcaccacaaauaccaaggagggguccaacaucugucugacacggaccgaucgcggaugguacugcgacaaugcuggcagcgucucuuucuuuccccaggccgaaacguguaaggugcagagcaacagaguuuucugcgauacaaugaacuccagaacccugccuucugaggugaaucucugcaaugucgacauuuuuaacccgaaauaugauuguaagaucaugaccagcaaaacagacguguccagcucugucauuaccucccugggggcgaucgugagcugcuacggaaagacaaaauguacggccucuaauaagaaccggggcauuaucaagaccuucuccaaugggugcgauuauguuagcaacaaaggaguggacacagucuccgugggcaauacccuuuacuguguuaacaagcaagagggcaaaucucuguaugugaagggggaacccaucauuaacuuuuacgacccucucgucuuccccagcgaugaguuugacgcuuccaucucucaggugaaugagaaaauuaaccagagccuggccuucauccgcaaguccgaugaacugcuccacaaugugaacgcuggaaagagcacaaccaauauuaugaucacgaccauuaucaucguuauuaucgucauucugcuuucucugaucgccgugggccuccugcuguauugcaaagccagaugaggacuaguguccaccugucccuccugggcugcuggauugucucguuuuccugccaaauaaacaggaucagcgcuuuacagaucuaaaaaaaaaaaaaaaaaaaaaaaaaaaaaaaaaaaaaaaaaaaaaaaaaaaaaaaaaaaaaaaaugcaucccccccccccccccccccccccccccccccaaaggcucuuuucagagccaccagaauu

SEQ ID NO: 5148 - RNA, 1826 nt, Artificial Sequence
  mRNA product Design e-3 comprising derived and/or modified sequence from HRSV(A2)__F-del_DSCav1_mut4 (opt6)
gggagacuuucccauucuguagcagaauuugguguugccuguggucuuggucccgcggagaagcuuaccauggaacuuuuaauacuaaaagcuaacgccauaaccacuauacuaacagcagucacauucugcuucgcaucaggccaaaacauaaccgaagaauuuuaccaauccacuuguucagcagucuccaaaggauauuuauccgcacuucguacaggaugguauacaucaguaauaacaauagaacucuccaacauaaaagaaaauaaaugcaacggcaccgacgcaaaaguaaaacucaucaaacaagaauuagacaaauacaagaacgccguaacagaacuacaauuacuaaugcaaucaacacccgccacaggaucaggaucugcaauaugcucuggaguagcaguaugcaaaguauuacaccuagaaggagaaguaaacaaaaucaaaagcgcacuacuauccacaaacaaagcuguaguaucacuaucaaacggaguaucaguauuaacuuucaaaguacuugaucuaaaaaacuacauagacaaacaacuacuacccauauuaaacaaacaaucaugcucaauaagcaauauagaaacaguaauagaauuucaacaaaaaaacaacagacuacuagaaaucacaagggaauuuucaguaaaugccgguguuacaaccccaguaucaacauacaugcuaacuaacucagaacuacuauccuuaauaaacgauaugccaauaacaaacgaucaaaaaaaacuaauguccaacaacguacaaauaguaagacaacaaucauacucaaucaugugcauuauaaaagaagaagucuuagcauacguaguacaauuaccacuauacgguguaauagauacaccauguuggaaauuacacacaagcccacuaugcacaacuaacacaaaagaaggcucaaauauauguuuaacaagaacagaccgagguugguacugcgacaaugcaggaucaguaucauucuuuccacaagcagaaacauguaaaguucaauccaacagaguauucugcgacacaaugaacuccagaacacuaccuucagaaguaaaccucuguaacguagacauauuuaaucccaaguacgacugcaaaauaaugacaucgaaaacagacguaagcuccucagugauaacaucccucggcgccaucguauccuguuacgguaaaacuaaauguaccgccucaaacaaaaaccgcgguauuauaaaaacuuuuucuaauggcugcgauuacguaagcaacaaaggcgucgacacaguuuccguaggaaacacacuauacugcguaaacaaacaagaagguaaaucucuauacguaaaaggagaaccaauaauaaauuucuaugauccuuuaguauucccauccgaugaauuugacgccucuaucucacaagucaacgaaaaaauaaaucaaucauuagcauucauacgaaaaucagacgaacuacuacacaacguaaacgcaggaaaaucaacaaccaacauaaugauaaccacaauaauaauaguuauuauagugauacuauuauccuuaauugcagucggacuauuauuauacuguaaagcacgcuaaggacuaguguccaccugucccuccugggcugcuggauugucucguuuuccugccaaauaaacaggaucagcgcuuuacagaucuaaaaaaaaaaaaaaaaaaaaaaaaaaaaaaaaaaaaaaaaaaaaaaaaaaaaaaaaaaaaaaaaugcaucccccccccccccccccccccccccccccccaaaggcucuuuucagagccaccagaauu

SEQ ID NO: 5149 - RNA, 1826 nt, Artificial Sequence
  mRNA product Design e-3 comprising derived and/or modified sequence from HRSV(A2)__F-del_DSCav1_mut4 (opt11)
gggagacuuucccauucuguagcagaauuugguguugccuguggucuuggucccgcggagaagcuuaccauggaacuccucauccucaaagccaaugccaucaccacaauccugacagcaguaaccuucugcuucgcauccggacaaaacaucaccgaagaauuuuaccagucaaccugcuccgcugucucaaaaggcuaccucucagcccuucgcaccggcugguacaccucggucauaacaauagaacucuccaauaucaaagaaaacaaaugcaacggcacugacgccaagguaaaacucaucaaacaggaacucgauaaauacaagaacgccguaacagaacuacaacuacucaugcaaucaacaccggccaccggcuccgguuccgccauaugcuccggaguggccgugugcaagguccuccaccuugaaggggaaguuaacaaaaucaaaucagcccuccucuccacuaacaaagccguaguaucccuaagcaacgguguauccguccucaccuucaaaguacuagaccuaaagaauuauaucgacaaacaacuccuccccauacucaacaaacaauccugcuccauaagcaacaucgaaacagucaucgaguuccagcagaaaaacaaccgacuccucgaaauaacccgcgaguucucagucaacgccggagucaccacacccgucagcaccuacaugcugaccaacuccgaacuccucuccuuaaucaaugacaugcccaucaccaaugaccaaaagaaacucaugucaaacaacguccaaauaguacgccaacaauccuacuccaucaugugcaucauaaaagaagaaguacucgccuacgucguccaacucccccucuacggcguaaucgacacccccugcuggaaacuacacacaagcccccucugcaccacaaacacuaaagagggcuccaacaucugucuaacccgcaccgaucgaggcugguacugcgacaacgccggaucugucucauucuucccccaagccgaaaccugcaaaguccaauccaaccgcgucuucugcgacaccaugaacucgagaacccucccuuccgaagucaaccuaugcaacgucgacauuuucaaccccaaauacgacugcaaaaucaugaccucgaaaaccgacguaucauccagcgucaucaccagccuaggcgcaaucgugagcugcuacggcaaaaccaaaugcaccgcgagcaauaaaaaccgcgggaucaucaaaacuuucuccaacggcugcgacuacgucuccaacaagggagucgauaccgucuccguaggcaacacccucuacugcgucaacaaacaagaaggcaaaucacuauacguaaaaggcgagccaaucauaaacuucuacgacccucuaguuuucccauccgacgaguucgacgcuagcaucucccaagucaacgagaaaaucaaccaaucccucgcauucauccgcaaauccgacgaacuccuccacaacguaaacgcaggcaaaucaacuacuaauauaaugaucacaaccaucauaauagucauaaucguaauccuccuaucccucaucgccgucggacuacugcucuacugcaaagcccgcuaaggacuaguguccaccugucccuccugggcugcuggauugucucguuuuccugccaaauaaacaggaucagcgcuuuacagaucuaaaaaaaaaaaaaaaaaaaaaaaaaaaaaaaaaaaaaaaaaaaaaaaaaaaaaaaaaaaaaaaaugcaucccccccccccccccccccccccccccccccaaaggcucuuuucagagccaccagaauu

SEQ ID NO: 5150 - RNA, 1880 nt, Artificial Sequence
  mRNA product Design e-4 comprising derived and/or modified sequence from HRSV(A2)__F-del_DSCav1_mut4 (opt1)
gggagacuccugucgggcggaaguaggaggaguagaguuuaaaaacaguacucuuuuuccgguucgggacguaguugaagcaacgacaagccggauaaccgcucuugagacaggaagcuuaccauggagcugcucauccugaaggccaacgccaucaccaccauccugacggcggugaccuucugcuucgccagcggccagaacaucaccgaggaguucuaccaguccacgugcagcgccgucuccaagggguaccucagcgcccugcggaccggcugguacaccuccgugaucaccaucgagcugagcaacaucaaggagaacaagugcaacgggaccgacgccaaggugaagcucaucaagcaggagcuggacaaguacaagaacgcggucacggagcugcagcuccugaugcaguccaccccggcaaccggcuccggcuccgccaucugcagcggcgucgccgugugcaaggugcugcaccucgagggggaggucaacaagaucaagagcgcccugcuguccaccaacaaggccguggugagccucuccaacggcgucagcgugcugaccuucaaggugcuggaccucaagaacuacaucgacaagcagcugcugcccauccugaacaagcagagcugcuccaucagcaacaucgagacggugaucgaguuccagcagaagaacaaccggcuccuggagaucacccgcgaguucagcgugaacgccggggucaccacccccguguccacguacaugcugaccaacagcgagcuccugucccugaucaacgacaugccgaucaccaacgaccagaagaagcucaugagcaacaacgugcagaucguccggcagcaguccuacagcaucaugugcaucaucaaggaggaggugcuggcguacgugguccagcugccccucuacggcgugaucgacacccccugcuggaagcugcacacgagcccccugugcaccaccaacaccaaggagggguccaacaucugccucacgcgcaccgaccggggcugguacugcgacaacgccggcagcgucuccuucuucccgcaggccgagaccugcaaggugcagagcaaccgcguguucugcgacaccaugaacucccggacgcugcccagcgagguaaaccucugcaacgucgacaucuucaaccccaaguacgacugcaagaucaugaccuccaagaccgacgugagcuccagcgugaucaccucccugggggccaucgucagcugcuacggcaagacgaagugcaccgccagcaacaagaaccgggggaucaucaagaccuucuccaacggcugcgacuacgugagcaacaagggcguggacaccguguccgucgggaacacccuguacugcgugaacaagcaggagggcaagagccucuacgugaagggggagcccaucaucaacuucuacgacccgcuggucuuccccuccgacgaguucgacgcgagcaucucccaggugaacgagaagaucaaccagagccuggccuucauccgcaaguccgacgagcugcuccacaacgugaacgccggcaagagcacgaccaacaucaugaucaccaccaucaucaucgucaucaucgugauccugcugucccucaucgccguggggcugcugcucuacugcaaggcccggugaggacuaguguccaccugucccuccugggcugcuggauugucucguuuuccugccaaauaaacaggaucagcgcuuuacagaucuaaaaaaaaaaaaaaaaaaaaaaaaaaaaaaaaaaaaaaaaaaaaaaaaaaaaaaaaaaaaaaaaugcaucccccccccccccccccccccccccccccccaaaggcucuuuucagagccaccagaauu

SEQ ID NO: 5151 - RNA, 1880 nt, Artificial Sequence
  mRNA product Design e-4 comprising derived and/or modified sequence from HRSV(A2)__F-del_DSCav1_mut4 (opt1)
gggagacuccugucgggcggaaguaggaggaguagaguuuaaaaacaguacucuuuuuccgguucgggacguaguugaagcaacgacaagccggauaaccgcucuugagacaggaagcuuaccauggagcugcucauccugaaggccaacgccaucaccaccauccugacggcggugaccuucugcuucgccagcggccagaacaucaccgaggaguucuaccaguccacgugcagcgccgucuccaagggguaccucagcgcccugcgcaccggcugguacaccuccgugaucaccaucgagcugagcaacaucaaggagaacaagugcaacgggaccgacgccaaggugaagcucaucaagcaggagcuggacaaguacaagaacgcggucacggagcugcagcuccugaugcaguccacccccgccaccggcagcggguccgccaucugcagcggcguggccgugugcaagguccugcaccucgagggcgaggugaacaagaucaaguccgcgcugcugagcaccaacaaggccguggucucccucagcaacgggguguccgugcugacguucaagguccuggaccucaagaacuacaucgacaagcagcugcugccgauccucaacaagcagagcugcuccaucagcaacaucgagaccgugaucgaguuccagcagaagaacaaccggcugcuggagaucacccgcgaguucuccgugaacgccggcgucaccacgcccgugagcaccuacaugcucaccaacagcgagcugcugucccucaucaacgacaugcccaucaccaacgaccagaagaagcugaugagcaacaacgugcagaucguccggcagcaguccuacagcaucaugugcaucaucaaggaggaggugcuggccuacgugguccagcucccccuguacggggugaucgacacgccgugcuggaagcugcacaccagcccccucugcaccaccaacacgaaggagggcuccaacaucugccugacccgcaccgaccgggggugguacugcgacaacgccggcuccgugagcuucuucccccaggcggagaccugcaagguccaguccaaccgcguguucugcgacacgaugaacagccggacccuccccuccgaggucaaccugugcaacguggacaucuucaacccgaaguacgacugcaagaucaugaccagcaagaccgacguguccagcuccgucaucacgagccugggcgccaucguguccugcuacgggaagaccaagugcaccgccagcaacaagaaccggggcaucaucaagaccuucuccaacgggugcgacuacgugagcaacaagggcgucgacacggugagcgugggcaacacccucuacugcgucaacaagcaggaggggaagucccuguacgugaagggcgagcccaucaucaacuucuacgacccccugguguuccccagcgacgaguucgacgccuccaucagccaggucaacgagaagaucaaccagucccucgccuucauccgcaagagcgacgagcugcugcacaacgugaacgcggggaaguccaccaccaacaucaugaucaccacgaucaucaucgugaucaucgucauccuccugagccugaucgccgugggccuccugcuguacugcaaggcccggugaggacuaguguccaccugucccuccugggcugcuggauugucucguuuuccugccaaauaaacaggaucagcgcuuuacagaucuaaaaaaaaaaaaaaaaaaaaaaaaaaaaaaaaaaaaaaaaaaaaaaaaaaaaaaaaaaaaaaaaugcaucccccccccccccccccccccccccccccccaaaggcucuuuucagagccaccagaauu

SEQ ID NO: 5152 - RNA, 1880 nt, Artificial Sequence
  mRNA product Design e-4 comprising derived and/or modified sequence from HRSV(A2)__F-del_DSCav1_mut4 (opt2)
gggagacuccugucgggcggaaguaggaggaguagaguuuaaaaacaguacucuuuuuccgguucgggacguaguugaagcaacgacaagccggauaaccgcucuugagacaggaagcuuaccauggagcuccucauccucaaggccaacgccaucaccaccauccucaccgccgucaccuucugcuucgccuccggccagaacaucaccgaggaguucuaccaguccaccugcuccgccgucuccaagggcuaccucuccgcccuccgcaccggcugguacaccuccgucaucaccaucgagcucuccaacaucaaggagaacaagugcaacggcaccgacgccaaggucaagcucaucaagcaggagcucgacaaguacaagaacgccgucaccgagcuccagcuccucaugcaguccacccccgccaccggcuccggcuccgccaucugcuccggcgucgccgucugcaagguccuccaccucgagggcgaggucaacaagaucaaguccgcccuccucuccaccaacaaggccgucgucucccucuccaacggcgucuccguccucaccuucaagguccucgaccucaagaacuacaucgacaagcagcuccuccccauccucaacaagcaguccugcuccaucuccaacaucgagaccgucaucgaguuccagcagaagaacaaccgccuccucgagaucacccgcgaguucuccgucaacgccggcgucaccacccccgucuccaccuacaugcucaccaacuccgagcuccucucccucaucaacgacaugcccaucaccaacgaccagaagaagcucauguccaacaacguccagaucguccgccagcaguccuacuccaucaugugcaucaucaaggaggagguccucgccuacgucguccagcucccccucuacggcgucaucgacacccccugcuggaagcuccacaccuccccccucugcaccaccaacaccaaggagggcuccaacaucugccucacccgcaccgaccgcggcugguacugcgacaacgccggcuccgucuccuucuucccccaggccgagaccugcaagguccaguccaaccgcgucuucugcgacaccaugaacucccgcacccuccccuccgaggucaaccucugcaacgucgacaucuucaaccccaaguacgacugcaagaucaugaccuccaagaccgacgucuccuccuccgucaucaccucccucggcgccaucgucuccugcuacggcaagaccaagugcaccgccuccaacaagaaccgcggcaucaucaagaccuucuccaacggcugcgacuacgucuccaacaagggcgucgacaccgucuccgucggcaacacccucuacugcgucaacaagcaggagggcaagucccucuacgucaagggcgagcccaucaucaacuucuacgacccccucgucuuccccuccgacgaguucgacgccuccaucucccaggucaacgagaagaucaaccagucccucgccuucauccgcaaguccgacgagcuccuccacaacgucaacgccggcaaguccaccaccaacaucaugaucaccaccaucaucaucgucaucaucgucauccuccucucccucaucgccgucggccuccuccucuacugcaaggcccgcugaggacuaguguccaccugucccuccugggcugcuggauugucucguuuuccugccaaauaaacaggaucagcgcuuuacagaucuaaaaaaaaaaaaaaaaaaaaaaaaaaaaaaaaaaaaaaaaaaaaaaaaaaaaaaaaaaaaaaaaugcaucccccccccccccccccccccccccccccccaaaggcucuuuucagagccaccagaauu

SEQ ID NO: 5153 - RNA, 1880 nt, Artificial Sequence
  mRNA product Design e-4 comprising derived and/or modified sequence from HRSV(A2)__F-del_DSCav1_mut4 (opt3)
gggagacuccugucgggcggaaguaggaggaguagaguuuaaaaacaguacucuuuuuccgguucgggacguaguugaagcaacgacaagccggauaaccgcucuugagacaggaagcuuaccauggagcugcucauccuuaaggccaacgcuauuaccacaauacugacugcagugacguucugcuuugccagcggccagaauaucaccgaagaguucuaccaauccacauguucugcggucucaaaaggguauuugagugcuuuaagaacuggaugguacaccagcguuauuacaaucgaacuguccaacauuaaggagaauaaaugcaacgguaccgacgccaaggugaaacuaaucaagcaggaacucgauaaguauaaaaaugcaguaacugagcugcagcuucugaugcagucuacacccgccaccggcucggggucagcuauauguagcggaguggcagucugcaagguguugcaccucgagggcgaaguuaacaaaaucaagagugcccugcuguccacgaauaaagcuguggucucucucagcaacgguguguccguauuaacuuuuaagguucuggaccuuaagaauuacauugauaaacaauugcugccuauccuaaacaagcagucauguaguauuagcaauaucgagaccgugauagaguuccagcagaaaaacaauaggcuccuggaaauuacacgggaguuuucugucaacgccggggugacuaccccaguguccacauauaugcuuaccaauucagaacuguugagccucaucaacgacaugccgauuacgaacgaucaaaagaaacugaugaguaauaacguccagaucguucgccagcagucuuacuccaucaugugcauuauaaaggaggaaguguuagcguauguagugcaacugccccucuacggagucaucgacacuccuuguuggaaacuucauacaagcccacugugcaccacuaauacaaaggagggcucgaacauuuguuugacccgaacggaucguggcugguacugcgacaaugcagggucuguguccuucuuuccccaggccgaaaccuguaagguucagucaaacagaguguucugcgauacaaugaauaguagaacucugccuagcgaggucaaccucugcaauguggacaucuuuaacccaaaauaugauuguaagauaaugaccuccaaaacagacguaucuagcucaguuauuaccagucugggagcuaucguguccugcuacgguaagacuaaauguacagccagcaauaagaacaggggcaucauuaagaccuucucuaaugggugcgauuaugucucaaacaaaggaguggacacugucagugugggcaauacgcuuuacuguguuaacaagcaagaggguaaaagccuguaugugaagggggaacccaucauuaacuuuuacgacccuuugguauucccauccgaugaguuugacgcaucuauaucgcaggucaaugagaaaaucaaccagagccucgcuuucauucggaaguccgaugaacuguuacacaaugugaacgccggaaagucaacaaccaauaucaugaucacuaccauuauaaucguuauuaucgugauucugcuaagucucaucgcggucggccugcuuuuguauugcaaagcccgcugaggacuaguguccaccugucccuccugggcugcuggauugucucguuuuccugccaaauaaacaggaucagcgcuuuacagaucuaaaaaaaaaaaaaaaaaaaaaaaaaaaaaaaaaaaaaaaaaaaaaaaaaaaaaaaaaaaaaaaaugcaucccccccccccccccccccccccccccccccaaaggcucuuuucagagccaccagaauu

SEQ ID NO: 5154 - RNA, 1880 nt, Artificial Sequence
  mRNA product Design e-4 comprising derived and/or modified sequence from HRSV(A2)__F-del_DSCav1_mut4 (opt4)
gggagacuccugucgggcggaaguaggaggaguagaguuuaaaaacaguacucuuuuuccgguucgggacguaguugaagcaacgacaagccggauaaccgcucuugagacaggaagcuuaccauggagcugcugauccugaaggccaacgccaucaccaccauccugaccgccgugaccuucugcuucgccagcggccagaacaucaccgaggaguucuaccagagcaccugcagcgccgugagcaagggcuaccugagcgcccugagaaccggcugguacaccagcgugaucaccaucgagcugagcaacaucaaggagaacaagugcaacggcaccgacgccaaggugaagcugaucaagcaggagcuggacaaguacaagaacgccgugaccgagcugcagcugcugaugcagagcacccccgccaccggcagcggcagcgccaucugcagcggcguggccgugugcaaggugcugcaccuggagggcgaggugaacaagaucaagagcgcccugcugagcaccaacaaggccguggugagccugagcaacggcgugagcgugcugaccuucaaggugcuggaccugaagaacuacaucgacaagcagcugcugcccauccugaacaagcagagcugcagcaucagcaacaucgagaccgugaucgaguuccagcagaagaacaacagacugcuggagaucaccagagaguucagcgugaacgccggcgugaccacccccgugagcaccuacaugcugaccaacagcgagcugcugagccugaucaacgacaugcccaucaccaacgaccagaagaagcugaugagcaacaacgugcagaucgugagacagcagagcuacagcaucaugugcaucaucaaggaggaggugcuggccuacguggugcagcugccccuguacggcgugaucgacacccccugcuggaagcugcacaccagcccccugugcaccaccaacaccaaggagggcagcaacaucugccugaccagaaccgacagaggcugguacugcgacaacgccggcagcgugagcuucuucccccaggccgagaccugcaaggugcagagcaacagaguguucugcgacaccaugaacagcagaacccugcccagcgaggugaaccugugcaacguggacaucuucaaccccaaguacgacugcaagaucaugaccagcaagaccgacgugagcagcagcgugaucaccagccugggcgccaucgugagcugcuacggcaagaccaagugcaccgccagcaacaagaacagaggcaucaucaagaccuucagcaacggcugcgacuacgugagcaacaagggcguggacaccgugagcgugggcaacacccuguacugcgugaacaagcaggagggcaagagccuguacgugaagggcgagcccaucaucaacuucuacgacccccugguguuccccagcgacgaguucgacgccagcaucagccaggugaacgagaagaucaaccagagccuggccuucaucagaaagagcgacgagcugcugcacaacgugaacgccggcaagagcaccaccaacaucaugaucaccaccaucaucaucgugaucaucgugauccugcugagccugaucgccgugggccugcugcuguacugcaaggccagaugaggacuaguguccaccugucccuccugggcugcuggauugucucguuuuccugccaaauaaacaggaucagcgcuuuacagaucuaaaaaaaaaaaaaaaaaaaaaaaaaaaaaaaaaaaaaaaaaaaaaaaaaaaaaaaaaaaaaaaaugcaucccccccccccccccccccccccccccccccaaaggcucuuuucagagccaccagaauu

SEQ ID NO: 5155 - RNA, 1880 nt, Artificial Sequence
  mRNA product Design e-4 comprising derived and/or modified sequence from HRSV(A2)__F-del_DSCav1_mut4 (opt5)
gggagacuccugucgggcggaaguaggaggaguagaguuuaaaaacaguacucuuuuuccgguucgggacguaguugaagcaacgacaagccggauaaccgcucuugagacaggaagcuuaccauggagcugcucauccugaaggccaacgcuauuaccacaauccuuacggccgugaccuucugcuuugcgagcggccagaauauuacagaagaguucuaccaauccaccuguucugcugucagcaaaggguaucuguccgcccucagaacaggaugguacaccucuguuaucacaauugaacugagcaacaucaaggagaauaaaugcaacggcaccgacgccaaggugaaacuuaucaagcaggaacuggauaaguauaaaaaugcugugacggagcuccagcugcugaugcaguccacccccgccacagggucuggaagcgcuauuuguuccggcgucgccgugugcaagguucuccaccuggagggggaagugaacaaaaucaagagcgcgcuucugucuaccaauaaagccgucgugucccucagcaacggaguuucugugcugacauuuaagguccuugaccugaagaauuacauugauaaacaacuccugccuauccugaacaagcaguccuguagcauuucuaauaucgagaccgugauugaguuccagcagaaaaacaaucggcuccuggaaaucacgcgcgaguuuuccgugaacgcuggcgucacaaccccgguuagcacauauaugcuuaccaauuccgaacugcucucucugaucaacgacaugcccauuaccaacgaucaaaagaaacuuaugagcaauaacgugcagaucgugagacagcaguccuacagcauuaugugcaucauuaaggaggaaguccuggccuaugugguucaacucccucuguacggcgugaucgacacacccuguuggaaacugcauacgucuccucucugcaccacaaauaccaaggagggguccaacaucugucugacacggaccgaucgcggaugguacugcgacaaugcuggcagcgucucuuucuuuccccaggccgaaacguguaaggugcagagcaacagaguuuucugcgauacaaugaacuccagaacccugccuucugaggugaaucucugcaaugucgacauuuuuaacccgaaauaugauuguaagaucaugaccagcaaaacagacguguccagcucugucauuaccucccugggggcgaucgugagcugcuacggaaagacaaaauguacggccucuaauaagaaccggggcauuaucaagaccuucuccaaugggugcgauuauguuagcaacaaaggaguggacacagucuccgugggcaauacccuuuacuguguuaacaagcaagagggcaaaucucuguaugugaagggggaacccaucauuaacuuuuacgacccucucgucuuccccagcgaugaguuugacgcuuccaucucucaggugaaugagaaaauuaaccagagccuggccuucauccgcaaguccgaugaacugcuccacaaugugaacgcuggaaagagcacaaccaauauuaugaucacgaccauuaucaucguuauuaucgucauucugcuuucucugaucgccgugggccuccugcuguauugcaaagccagaugaggacuaguguccaccugucccuccugggcugcuggauugucucguuuuccugccaaauaaacaggaucagcgcuuuacagaucuaaaaaaaaaaaaaaaaaaaaaaaaaaaaaaaaaaaaaaaaaaaaaaaaaaaaaaaaaaaaaaaaugcaucccccccccccccccccccccccccccccccaaaggcucuuuucagagccaccagaauu

SEQ ID NO: 5156 - RNA, 1880 nt, Artificial Sequence
  mRNA product Design e-4 comprising derived and/or modified sequence from HRSV(A2)__F-del_DSCav1_mut4 (opt6)
gggagacuccugucgggcggaaguaggaggaguagaguuuaaaaacaguacucuuuuuccgguucgggacguaguugaagcaacgacaagccggauaaccgcucuugagacaggaagcuuaccauggaacuuuuaauacuaaaagcuaacgccauaaccacuauacuaacagcagucacauucugcuucgcaucaggccaaaacauaaccgaagaauuuuaccaauccacuuguucagcagucuccaaaggauauuuauccgcacuucguacaggaugguauacaucaguaauaacaauagaacucuccaacauaaaagaaaauaaaugcaacggcaccgacgcaaaaguaaaacucaucaaacaagaauuagacaaauacaagaacgccguaacagaacuacaauuacuaaugcaaucaacacccgccacaggaucaggaucugcaauaugcucuggaguagcaguaugcaaaguauuacaccuagaaggagaaguaaacaaaaucaaaagcgcacuacuauccacaaacaaagcuguaguaucacuaucaaacggaguaucaguauuaacuuucaaaguacuugaucuaaaaaacuacauagacaaacaacuacuacccauauuaaacaaacaaucaugcucaauaagcaauauagaaacaguaauagaauuucaacaaaaaaacaacagacuacuagaaaucacaagggaauuuucaguaaaugccgguguuacaaccccaguaucaacauacaugcuaacuaacucagaacuacuauccuuaauaaacgauaugccaauaacaaacgaucaaaaaaaacuaauguccaacaacguacaaauaguaagacaacaaucauacucaaucaugugcauuauaaaagaagaagucuuagcauacguaguacaauuaccacuauacgguguaauagauacaccauguuggaaauuacacacaagcccacuaugcacaacuaacacaaaagaaggcucaaauauauguuuaacaagaacagaccgagguugguacugcgacaaugcaggaucaguaucauucuuuccacaagcagaaacauguaaaguucaauccaacagaguauucugcgacacaaugaacuccagaacacuaccuucagaaguaaaccucuguaacguagacauauuuaaucccaaguacgacugcaaaauaaugacaucgaaaacagacguaagcuccucagugauaacaucccucggcgccaucguauccuguuacgguaaaacuaaauguaccgccucaaacaaaaaccgcgguauuauaaaaacuuuuucuaauggcugcgauuacguaagcaacaaaggcgucgacacaguuuccguaggaaacacacuauacugcguaaacaaacaagaagguaaaucucuauacguaaaaggagaaccaauaauaaauuucuaugauccuuuaguauucccauccgaugaauuugacgccucuaucucacaagucaacgaaaaaauaaaucaaucauuagcauucauacgaaaaucagacgaacuacuacacaacguaaacgcaggaaaaucaacaaccaacauaaugauaaccacaauaauaauaguuauuauagugauacuauuauccuuaauugcagucggacuauuauuauacuguaaagcacgcuaaggacuaguguccaccugucccuccugggcugcuggauugucucguuuuccugccaaauaaacaggaucagcgcuuuacagaucuaaaaaaaaaaaaaaaaaaaaaaaaaaaaaaaaaaaaaaaaaaaaaaaaaaaaaaaaaaaaaaaaugcaucccccccccccccccccccccccccccccccaaaggcucuuuucagagccaccagaauu

SEQ ID NO: 5157 - RNA, 1880 nt, Artificial Sequence
  mRNA product Design e-4 comprising derived and/or modified sequence from HRSV(A2)__F-del_DSCav1_mut4 (opt11)
gggagacuccugucgggcggaaguaggaggaguagaguuuaaaaacaguacucuuuuuccgguucgggacguaguugaagcaacgacaagccggauaaccgcucuugagacaggaagcuuaccauggaacuccucauccucaaagccaaugccaucaccacaauccugacagcaguaaccuucugcuucgcauccggacaaaacaucaccgaagaauuuuaccagucaaccugcuccgcugucucaaaaggcuaccucucagcccuucgcaccggcugguacaccucggucauaacaauagaacucuccaauaucaaagaaaacaaaugcaacggcacugacgccaagguaaaacucaucaaacaggaacucgauaaauacaagaacgccguaacagaacuacaacuacucaugcaaucaacaccggccaccggcuccgguuccgccauaugcuccggaguggccgugugcaagguccuccaccuugaaggggaaguuaacaaaaucaaaucagcccuccucuccacuaacaaagccguaguaucccuaagcaacgguguauccguccucaccuucaaaguacuagaccuaaagaauuauaucgacaaacaacuccuccccauacucaacaaacaauccugcuccauaagcaacaucgaaacagucaucgaguuccagcagaaaaacaaccgacuccucgaaauaacccgcgaguucucagucaacgccggagucaccacacccgucagcaccuacaugcugaccaacuccgaacuccucuccuuaaucaaugacaugcccaucaccaaugaccaaaagaaacucaugucaaacaacguccaaauaguacgccaacaauccuacuccaucaugugcaucauaaaagaagaaguacucgccuacgucguccaacucccccucuacggcguaaucgacacccccugcuggaaacuacacacaagcccccucugcaccacaaacacuaaagagggcuccaacaucugucuaacccgcaccgaucgaggcugguacugcgacaacgccggaucugucucauucuucccccaagccgaaaccugcaaaguccaauccaaccgcgucuucugcgacaccaugaacucgagaacccucccuuccgaagucaaccuaugcaacgucgacauuuucaaccccaaauacgacugcaaaaucaugaccucgaaaaccgacguaucauccagcgucaucaccagccuaggcgcaaucgugagcugcuacggcaaaaccaaaugcaccgcgagcaauaaaaaccgcgggaucaucaaaacuuucuccaacggcugcgacuacgucuccaacaagggagucgauaccgucuccguaggcaacacccucuacugcgucaacaaacaagaaggcaaaucacuauacguaaaaggcgagccaaucauaaacuucuacgacccucuaguuuucccauccgacgaguucgacgcuagcaucucccaagucaacgagaaaaucaaccaaucccucgcauucauccgcaaauccgacgaacuccuccacaacguaaacgcaggcaaaucaacuacuaauauaaugaucacaaccaucauaauagucauaaucguaauccuccuaucccucaucgccgucggacuacugcucuacugcaaagcccgcuaaggacuaguguccaccugucccuccugggcugcuggauugucucguuuuccugccaaauaaacaggaucagcgcuuuacagaucuaaaaaaaaaaaaaaaaaaaaaaaaaaaaaaaaaaaaaaaaaaaaaaaaaaaaaaaaaaaaaaaaugcaucccccccccccccccccccccccccccccccaaaggcucuuuucagagccaccagaauu

SEQ ID NO: 5158 - RNA, 1847 nt, Artificial Sequence
  mRNA product Design e-5 comprising derived and/or modified sequence from HRSV(A2)__F-del_DSCav1_mut4 (opt1)
gggagagcggcucggccauuuugucccagucaguccggaggcugcggcugcagaaguaccgccugcggaguaacugcaaagaagcuuaccauggagcugcucauccugaaggccaacgccaucaccaccauccugacggcggugaccuucugcuucgccagcggccagaacaucaccgaggaguucuaccaguccacgugcagcgccgucuccaagggguaccucagcgcccugcggaccggcugguacaccuccgugaucaccaucgagcugagcaacaucaaggagaacaagugcaacgggaccgacgccaaggugaagcucaucaagcaggagcuggacaaguacaagaacgcggucacggagcugcagcuccugaugcaguccaccccggcaaccggcuccggcuccgccaucugcagcggcgucgccgugugcaaggugcugcaccucgagggggaggucaacaagaucaagagcgcccugcuguccaccaacaaggccguggugagccucuccaacggcgucagcgugcugaccuucaaggugcuggaccucaagaacuacaucgacaagcagcugcugcccauccugaacaagcagagcugcuccaucagcaacaucgagacggugaucgaguuccagcagaagaacaaccggcuccuggagaucacccgcgaguucagcgugaacgccggggucaccacccccguguccacguacaugcugaccaacagcgagcuccugucccugaucaacgacaugccgaucaccaacgaccagaagaagcucaugagcaacaacgugcagaucguccggcagcaguccuacagcaucaugugcaucaucaaggaggaggugcuggcguacgugguccagcugccccucuacggcgugaucgacacccccugcuggaagcugcacacgagcccccugugcaccaccaacaccaaggagggguccaacaucugccucacgcgcaccgaccggggcugguacugcgacaacgccggcagcgucuccuucuucccgcaggccgagaccugcaaggugcagagcaaccgcguguucugcgacaccaugaacucccggacgcugcccagcgagguaaaccucugcaacgucgacaucuucaaccccaaguacgacugcaagaucaugaccuccaagaccgacgugagcuccagcgugaucaccucccugggggccaucgucagcugcuacggcaagacgaagugcaccgccagcaacaagaaccgggggaucaucaagaccuucuccaacggcugcgacuacgugagcaacaagggcguggacaccguguccgucgggaacacccuguacugcgugaacaagcaggagggcaagagccucuacgugaagggggagcccaucaucaacuucuacgacccgcuggucuuccccuccgacgaguucgacgcgagcaucucccaggugaacgagaagaucaaccagagccuggccuucauccgcaaguccgacgagcugcuccacaacgugaacgccggcaagagcacgaccaacaucaugaucaccaccaucaucaucgucaucaucgugauccugcugucccucaucgccguggggcugcugcucuacugcaaggcccggugaggacuaguguccaccugucccuccugggcugcuggauugucucguuuuccugccaaauaaacaggaucagcgcuuuacagaucuaaaaaaaaaaaaaaaaaaaaaaaaaaaaaaaaaaaaaaaaaaaaaaaaaaaaaaaaaaaaaaaaugcaucccccccccccccccccccccccccccccccaaaggcucuuuucagagccaccagaauu

SEQ ID NO: 5159 - RNA, 1847 nt, Artificial Sequence
  mRNA product Design e-5 comprising derived and/or modified sequence from HRSV(A2)__F-del_DSCav1_mut4 (opt1)
gggagagcggcucggccauuuugucccagucaguccggaggcugcggcugcagaaguaccgccugcggaguaacugcaaagaagcuuaccauggagcugcucauccugaaggccaacgccaucaccaccauccugacggcggugaccuucugcuucgccagcggccagaacaucaccgaggaguucuaccaguccacgugcagcgccgucuccaagggguaccucagcgcccugcgcaccggcugguacaccuccgugaucaccaucgagcugagcaacaucaaggagaacaagugcaacgggaccgacgccaaggugaagcucaucaagcaggagcuggacaaguacaagaacgcggucacggagcugcagcuccugaugcaguccacccccgccaccggcagcggguccgccaucugcagcggcguggccgugugcaagguccugcaccucgagggcgaggugaacaagaucaaguccgcgcugcugagcaccaacaaggccguggucucccucagcaacgggguguccgugcugacguucaagguccuggaccucaagaacuacaucgacaagcagcugcugccgauccucaacaagcagagcugcuccaucagcaacaucgagaccgugaucgaguuccagcagaagaacaaccggcugcuggagaucacccgcgaguucuccgugaacgccggcgucaccacgcccgugagcaccuacaugcucaccaacagcgagcugcugucccucaucaacgacaugcccaucaccaacgaccagaagaagcugaugagcaacaacgugcagaucguccggcagcaguccuacagcaucaugugcaucaucaaggaggaggugcuggccuacgugguccagcucccccuguacggggugaucgacacgccgugcuggaagcugcacaccagcccccucugcaccaccaacacgaaggagggcuccaacaucugccugacccgcaccgaccgggggugguacugcgacaacgccggcuccgugagcuucuucccccaggcggagaccugcaagguccaguccaaccgcguguucugcgacacgaugaacagccggacccuccccuccgaggucaaccugugcaacguggacaucuucaacccgaaguacgacugcaagaucaugaccagcaagaccgacguguccagcuccgucaucacgagccugggcgccaucguguccugcuacgggaagaccaagugcaccgccagcaacaagaaccggggcaucaucaagaccuucuccaacgggugcgacuacgugagcaacaagggcgucgacacggugagcgugggcaacacccucuacugcgucaacaagcaggaggggaagucccuguacgugaagggcgagcccaucaucaacuucuacgacccccugguguuccccagcgacgaguucgacgccuccaucagccaggucaacgagaagaucaaccagucccucgccuucauccgcaagagcgacgagcugcugcacaacgugaacgcggggaaguccaccaccaacaucaugaucaccacgaucaucaucgugaucaucgucauccuccugagccugaucgccgugggccuccugcuguacugcaaggcccggugaggacuaguguccaccugucccuccugggcugcuggauugucucguuuuccugccaaauaaacaggaucagcgcuuuacagaucuaaaaaaaaaaaaaaaaaaaaaaaaaaaaaaaaaaaaaaaaaaaaaaaaaaaaaaaaaaaaaaaaugcaucccccccccccccccccccccccccccccccaaaggcucuuuucagagccaccagaauu

SEQ ID NO: 5160 - RNA, 1847 nt, Artificial Sequence
  mRNA product Design e-5 comprising derived and/or modified sequence from HRSV(A2)__F-del_DSCav1_mut4 (opt2)
gggagagcggcucggccauuuugucccagucaguccggaggcugcggcugcagaaguaccgccugcggaguaacugcaaagaagcuuaccauggagcuccucauccucaaggccaacgccaucaccaccauccucaccgccgucaccuucugcuucgccuccggccagaacaucaccgaggaguucuaccaguccaccugcuccgccgucuccaagggcuaccucuccgcccuccgcaccggcugguacaccuccgucaucaccaucgagcucuccaacaucaaggagaacaagugcaacggcaccgacgccaaggucaagcucaucaagcaggagcucgacaaguacaagaacgccgucaccgagcuccagcuccucaugcaguccacccccgccaccggcuccggcuccgccaucugcuccggcgucgccgucugcaagguccuccaccucgagggcgaggucaacaagaucaaguccgcccuccucuccaccaacaaggccgucgucucccucuccaacggcgucuccguccucaccuucaagguccucgaccucaagaacuacaucgacaagcagcuccuccccauccucaacaagcaguccugcuccaucuccaacaucgagaccgucaucgaguuccagcagaagaacaaccgccuccucgagaucacccgcgaguucuccgucaacgccggcgucaccacccccgucuccaccuacaugcucaccaacuccgagcuccucucccucaucaacgacaugcccaucaccaacgaccagaagaagcucauguccaacaacguccagaucguccgccagcaguccuacuccaucaugugcaucaucaaggaggagguccucgccuacgucguccagcucccccucuacggcgucaucgacacccccugcuggaagcuccacaccuccccccucugcaccaccaacaccaaggagggcuccaacaucugccucacccgcaccgaccgcggcugguacugcgacaacgccggcuccgucuccuucuucccccaggccgagaccugcaagguccaguccaaccgcgucuucugcgacaccaugaacucccgcacccuccccuccgaggucaaccucugcaacgucgacaucuucaaccccaaguacgacugcaagaucaugaccuccaagaccgacgucuccuccuccgucaucaccucccucggcgccaucgucuccugcuacggcaagaccaagugcaccgccuccaacaagaaccgcggcaucaucaagaccuucuccaacggcugcgacuacgucuccaacaagggcgucgacaccgucuccgucggcaacacccucuacugcgucaacaagcaggagggcaagucccucuacgucaagggcgagcccaucaucaacuucuacgacccccucgucuuccccuccgacgaguucgacgccuccaucucccaggucaacgagaagaucaaccagucccucgccuucauccgcaaguccgacgagcuccuccacaacgucaacgccggcaaguccaccaccaacaucaugaucaccaccaucaucaucgucaucaucgucauccuccucucccucaucgccgucggccuccuccucuacugcaaggcccgcugaggacuaguguccaccugucccuccugggcugcuggauugucucguuuuccugccaaauaaacaggaucagcgcuuuacagaucuaaaaaaaaaaaaaaaaaaaaaaaaaaaaaaaaaaaaaaaaaaaaaaaaaaaaaaaaaaaaaaaaugcaucccccccccccccccccccccccccccccccaaaggcucuuuucagagccaccagaauu

SEQ ID NO: 5161 - RNA, 1847 nt, Artificial Sequence
  mRNA product Design e-5 comprising derived and/or modified sequence from HRSV(A2)__F-del_DSCav1_mut4 (opt3)
gggagagcggcucggccauuuugucccagucaguccggaggcugcggcugcagaaguaccgccugcggaguaacugcaaagaagcuuaccauggagcugcucauccuuaaggccaacgcuauuaccacaauacugacugcagugacguucugcuuugccagcggccagaauaucaccgaagaguucuaccaauccacauguucugcggucucaaaaggguauuugagugcuuuaagaacuggaugguacaccagcguuauuacaaucgaacuguccaacauuaaggagaauaaaugcaacgguaccgacgccaaggugaaacuaaucaagcaggaacucgauaaguauaaaaaugcaguaacugagcugcagcuucugaugcagucuacacccgccaccggcucggggucagcuauauguagcggaguggcagucugcaagguguugcaccucgagggcgaaguuaacaaaaucaagagugcccugcuguccacgaauaaagcuguggucucucucagcaacgguguguccguauuaacuuuuaagguucuggaccuuaagaauuacauugauaaacaauugcugccuauccuaaacaagcagucauguaguauuagcaauaucgagaccgugauagaguuccagcagaaaaacaauaggcuccuggaaauuacacgggaguuuucugucaacgccggggugacuaccccaguguccacauauaugcuuaccaauucagaacuguugagccucaucaacgacaugccgauuacgaacgaucaaaagaaacugaugaguaauaacguccagaucguucgccagcagucuuacuccaucaugugcauuauaaaggaggaaguguuagcguauguagugcaacugccccucuacggagucaucgacacuccuuguuggaaacuucauacaagcccacugugcaccacuaauacaaaggagggcucgaacauuuguuugacccgaacggaucguggcugguacugcgacaaugcagggucuguguccuucuuuccccaggccgaaaccuguaagguucagucaaacagaguguucugcgauacaaugaauaguagaacucugccuagcgaggucaaccucugcaauguggacaucuuuaacccaaaauaugauuguaagauaaugaccuccaaaacagacguaucuagcucaguuauuaccagucugggagcuaucguguccugcuacgguaagacuaaauguacagccagcaauaagaacaggggcaucauuaagaccuucucuaaugggugcgauuaugucucaaacaaaggaguggacacugucagugugggcaauacgcuuuacuguguuaacaagcaagaggguaaaagccuguaugugaagggggaacccaucauuaacuuuuacgacccuuugguauucccauccgaugaguuugacgcaucuauaucgcaggucaaugagaaaaucaaccagagccucgcuuucauucggaaguccgaugaacuguuacacaaugugaacgccggaaagucaacaaccaauaucaugaucacuaccauuauaaucguuauuaucgugauucugcuaagucucaucgcggucggccugcuuuuguauugcaaagcccgcugaggacuaguguccaccugucccuccugggcugcuggauugucucguuuuccugccaaauaaacaggaucagcgcuuuacagaucuaaaaaaaaaaaaaaaaaaaaaaaaaaaaaaaaaaaaaaaaaaaaaaaaaaaaaaaaaaaaaaaaugcaucccccccccccccccccccccccccccccccaaaggcucuuuucagagccaccagaauu

SEQ ID NO: 5162 - RNA, 1847 nt, Artificial Sequence
  mRNA product Design e-5 comprising derived and/or modified sequence from HRSV(A2)__F-del_DSCav1_mut4 (opt4)
gggagagcggcucggccauuuugucccagucaguccggaggcugcggcugcagaaguaccgccugcggaguaacugcaaagaagcuuaccauggagcugcugauccugaaggccaacgccaucaccaccauccugaccgccgugaccuucugcuucgccagcggccagaacaucaccgaggaguucuaccagagcaccugcagcgccgugagcaagggcuaccugagcgcccugagaaccggcugguacaccagcgugaucaccaucgagcugagcaacaucaaggagaacaagugcaacggcaccgacgccaaggugaagcugaucaagcaggagcuggacaaguacaagaacgccgugaccgagcugcagcugcugaugcagagcacccccgccaccggcagcggcagcgccaucugcagcggcguggccgugugcaaggugcugcaccuggagggcgaggugaacaagaucaagagcgcccugcugagcaccaacaaggccguggugagccugagcaacggcgugagcgugcugaccuucaaggugcuggaccugaagaacuacaucgacaagcagcugcugcccauccugaacaagcagagcugcagcaucagcaacaucgagaccgugaucgaguuccagcagaagaacaacagacugcuggagaucaccagagaguucagcgugaacgccggcgugaccacccccgugagcaccuacaugcugaccaacagcgagcugcugagccugaucaacgacaugcccaucaccaacgaccagaagaagcugaugagcaacaacgugcagaucgugagacagcagagcuacagcaucaugugcaucaucaaggaggaggugcuggccuacguggugcagcugccccuguacggcgugaucgacacccccugcuggaagcugcacaccagcccccugugcaccaccaacaccaaggagggcagcaacaucugccugaccagaaccgacagaggcugguacugcgacaacgccggcagcgugagcuucuucccccaggccgagaccugcaaggugcagagcaacagaguguucugcgacaccaugaacagcagaacccugcccagcgaggugaaccugugcaacguggacaucuucaaccccaaguacgacugcaagaucaugaccagcaagaccgacgugagcagcagcgugaucaccagccugggcgccaucgugagcugcuacggcaagaccaagugcaccgccagcaacaagaacagaggcaucaucaagaccuucagcaacggcugcgacuacgugagcaacaagggcguggacaccgugagcgugggcaacacccuguacugcgugaacaagcaggagggcaagagccuguacgugaagggcgagcccaucaucaacuucuacgacccccugguguuccccagcgacgaguucgacgccagcaucagccaggugaacgagaagaucaaccagagccuggccuucaucagaaagagcgacgagcugcugcacaacgugaacgccggcaagagcaccaccaacaucaugaucaccaccaucaucaucgugaucaucgugauccugcugagccugaucgccgugggccugcugcuguacugcaaggccagaugaggacuaguguccaccugucccuccugggcugcuggauugucucguuuuccugccaaauaaacaggaucagcgcuuuacagaucuaaaaaaaaaaaaaaaaaaaaaaaaaaaaaaaaaaaaaaaaaaaaaaaaaaaaaaaaaaaaaaaaugcaucccccccccccccccccccccccccccccccaaaggcucuuuucagagccaccagaauu

SEQ ID NO: 5163 - RNA, 1847 nt, Artificial Sequence
  mRNA product Design e-5 comprising derived and/or modified sequence from HRSV(A2)__F-del_DSCav1_mut4 (opt5)
gggagagcggcucggccauuuugucccagucaguccggaggcugcggcugcagaaguaccgccugcggaguaacugcaaagaagcuuaccauggagcugcucauccugaaggccaacgcuauuaccacaauccuuacggccgugaccuucugcuuugcgagcggccagaauauuacagaagaguucuaccaauccaccuguucugcugucagcaaaggguaucuguccgcccucagaacaggaugguacaccucuguuaucacaauugaacugagcaacaucaaggagaauaaaugcaacggcaccgacgccaaggugaaacuuaucaagcaggaacuggauaaguauaaaaaugcugugacggagcuccagcugcugaugcaguccacccccgccacagggucuggaagcgcuauuuguuccggcgucgccgugugcaagguucuccaccuggagggggaagugaacaaaaucaagagcgcgcuucugucuaccaauaaagccgucgugucccucagcaacggaguuucugugcugacauuuaagguccuugaccugaagaauuacauugauaaacaacuccugccuauccugaacaagcaguccuguagcauuucuaauaucgagaccgugauugaguuccagcagaaaaacaaucggcuccuggaaaucacgcgcgaguuuuccgugaacgcuggcgucacaaccccgguuagcacauauaugcuuaccaauuccgaacugcucucucugaucaacgacaugcccauuaccaacgaucaaaagaaacuuaugagcaauaacgugcagaucgugagacagcaguccuacagcauuaugugcaucauuaaggaggaaguccuggccuaugugguucaacucccucuguacggcgugaucgacacacccuguuggaaacugcauacgucuccucucugcaccacaaauaccaaggagggguccaacaucugucugacacggaccgaucgcggaugguacugcgacaaugcuggcagcgucucuuucuuuccccaggccgaaacguguaaggugcagagcaacagaguuuucugcgauacaaugaacuccagaacccugccuucugaggugaaucucugcaaugucgacauuuuuaacccgaaauaugauuguaagaucaugaccagcaaaacagacguguccagcucugucauuaccucccugggggcgaucgugagcugcuacggaaagacaaaauguacggccucuaauaagaaccggggcauuaucaagaccuucuccaaugggugcgauuauguuagcaacaaaggaguggacacagucuccgugggcaauacccuuuacuguguuaacaagcaagagggcaaaucucuguaugugaagggggaacccaucauuaacuuuuacgacccucucgucuuccccagcgaugaguuugacgcuuccaucucucaggugaaugagaaaauuaaccagagccuggccuucauccgcaaguccgaugaacugcuccacaaugugaacgcuggaaagagcacaaccaauauuaugaucacgaccauuaucaucguuauuaucgucauucugcuuucucugaucgccgugggccuccugcuguauugcaaagccagaugaggacuaguguccaccugucccuccugggcugcuggauugucucguuuuccugccaaauaaacaggaucagcgcuuuacagaucuaaaaaaaaaaaaaaaaaaaaaaaaaaaaaaaaaaaaaaaaaaaaaaaaaaaaaaaaaaaaaaaaugcaucccccccccccccccccccccccccccccccaaaggcucuuuucagagccaccagaauu

SEQ ID NO: 5164 - RNA, 1847 nt, Artificial Sequence
  mRNA product Design e-5 comprising derived and/or modified sequence from HRSV(A2)__F-del_DSCav1_mut4 (opt6)
gggagagcggcucggccauuuugucccagucaguccggaggcugcggcugcagaaguaccgccugcggaguaacugcaaagaagcuuaccauggaacuuuuaauacuaaaagcuaacgccauaaccacuauacuaacagcagucacauucugcuucgcaucaggccaaaacauaaccgaagaauuuuaccaauccacuuguucagcagucuccaaaggauauuuauccgcacuucguacaggaugguauacaucaguaauaacaauagaacucuccaacauaaaagaaaauaaaugcaacggcaccgacgcaaaaguaaaacucaucaaacaagaauuagacaaauacaagaacgccguaacagaacuacaauuacuaaugcaaucaacacccgccacaggaucaggaucugcaauaugcucuggaguagcaguaugcaaaguauuacaccuagaaggagaaguaaacaaaaucaaaagcgcacuacuauccacaaacaaagcuguaguaucacuaucaaacggaguaucaguauuaacuuucaaaguacuugaucuaaaaaacuacauagacaaacaacuacuacccauauuaaacaaacaaucaugcucaauaagcaauauagaaacaguaauagaauuucaacaaaaaaacaacagacuacuagaaaucacaagggaauuuucaguaaaugccgguguuacaaccccaguaucaacauacaugcuaacuaacucagaacuacuauccuuaauaaacgauaugccaauaacaaacgaucaaaaaaaacuaauguccaacaacguacaaauaguaagacaacaaucauacucaaucaugugcauuauaaaagaagaagucuuagcauacguaguacaauuaccacuauacgguguaauagauacaccauguuggaaauuacacacaagcccacuaugcacaacuaacacaaaagaaggcucaaauauauguuuaacaagaacagaccgagguugguacugcgacaaugcaggaucaguaucauucuuuccacaagcagaaacauguaaaguucaauccaacagaguauucugcgacacaaugaacuccagaacacuaccuucagaaguaaaccucuguaacguagacauauuuaaucccaaguacgacugcaaaauaaugacaucgaaaacagacguaagcuccucagugauaacaucccucggcgccaucguauccuguuacgguaaaacuaaauguaccgccucaaacaaaaaccgcgguauuauaaaaacuuuuucuaauggcugcgauuacguaagcaacaaaggcgucgacacaguuuccguaggaaacacacuauacugcguaaacaaacaagaagguaaaucucuauacguaaaaggagaaccaauaauaaauuucuaugauccuuuaguauucccauccgaugaauuugacgccucuaucucacaagucaacgaaaaaauaaaucaaucauuagcauucauacgaaaaucagacgaacuacuacacaacguaaacgcaggaaaaucaacaaccaacauaaugauaaccacaauaauaauaguuauuauagugauacuauuauccuuaauugcagucggacuauuauuauacuguaaagcacgcuaaggacuaguguccaccugucccuccugggcugcuggauugucucguuuuccugccaaauaaacaggaucagcgcuuuacagaucuaaaaaaaaaaaaaaaaaaaaaaaaaaaaaaaaaaaaaaaaaaaaaaaaaaaaaaaaaaaaaaaaugcaucccccccccccccccccccccccccccccccaaaggcucuuuucagagccaccagaauu

SEQ ID NO: 5165 - RNA, 1847 nt, Artificial Sequence
  mRNA product Design e-5 comprising derived and/or modified sequence from HRSV(A2)__F-del_DSCav1_mut4 (opt11)
gggagagcggcucggccauuuugucccagucaguccggaggcugcggcugcagaaguaccgccugcggaguaacugcaaagaagcuuaccauggaacuccucauccucaaagccaaugccaucaccacaauccugacagcaguaaccuucugcuucgcauccggacaaaacaucaccgaagaauuuuaccagucaaccugcuccgcugucucaaaaggcuaccucucagcccuucgcaccggcugguacaccucggucauaacaauagaacucuccaauaucaaagaaaacaaaugcaacggcacugacgccaagguaaaacucaucaaacaggaacucgauaaauacaagaacgccguaacagaacuacaacuacucaugcaaucaacaccggccaccggcuccgguuccgccauaugcuccggaguggccgugugcaagguccuccaccuugaaggggaaguuaacaaaaucaaaucagcccuccucuccacuaacaaagccguaguaucccuaagcaacgguguauccguccucaccuucaaaguacuagaccuaaagaauuauaucgacaaacaacuccuccccauacucaacaaacaauccugcuccauaagcaacaucgaaacagucaucgaguuccagcagaaaaacaaccgacuccucgaaauaacccgcgaguucucagucaacgccggagucaccacacccgucagcaccuacaugcugaccaacuccgaacuccucuccuuaaucaaugacaugcccaucaccaaugaccaaaagaaacucaugucaaacaacguccaaauaguacgccaacaauccuacuccaucaugugcaucauaaaagaagaaguacucgccuacgucguccaacucccccucuacggcguaaucgacacccccugcuggaaacuacacacaagcccccucugcaccacaaacacuaaagagggcuccaacaucugucuaacccgcaccgaucgaggcugguacugcgacaacgccggaucugucucauucuucccccaagccgaaaccugcaaaguccaauccaaccgcgucuucugcgacaccaugaacucgagaacccucccuuccgaagucaaccuaugcaacgucgacauuuucaaccccaaauacgacugcaaaaucaugaccucgaaaaccgacguaucauccagcgucaucaccagccuaggcgcaaucgugagcugcuacggcaaaaccaaaugcaccgcgagcaauaaaaaccgcgggaucaucaaaacuuucuccaacggcugcgacuacgucuccaacaagggagucgauaccgucuccguaggcaacacccucuacugcgucaacaaacaagaaggcaaaucacuauacguaaaaggcgagccaaucauaaacuucuacgacccucuaguuuucccauccgacgaguucgacgcuagcaucucccaagucaacgagaaaaucaaccaaucccucgcauucauccgcaaauccgacgaacuccuccacaacguaaacgcaggcaaaucaacuacuaauauaaugaucacaaccaucauaauagucauaaucguaauccuccuaucccucaucgccgucggacuacugcucuacugcaaagcccgcuaaggacuaguguccaccugucccuccugggcugcuggauugucucguuuuccugccaaauaaacaggaucagcgcuuuacagaucuaaaaaaaaaaaaaaaaaaaaaaaaaaaaaaaaaaaaaaaaaaaaaaaaaaaaaaaaaaaaaaaaugcaucccccccccccccccccccccccccccccccaaaggcucuuuucagagccaccagaauu

SEQ ID NO: 5166 - RNA, 1914 nt, Artificial Sequence
  mRNA product Design e-6 comprising derived and/or modified sequence from HRSV(A2)__F-del_DSCav1_mut4 (opt1)
gggagagcggcucggccauuuugucccagucaguccggaggcugcggcugcagaaguaccgccugcggaguaacugcaaagaagcuuaccauggagcugcucauccugaaggccaacgccaucaccaccauccugacggcggugaccuucugcuucgccagcggccagaacaucaccgaggaguucuaccaguccacgugcagcgccgucuccaagggguaccucagcgcccugcggaccggcugguacaccuccgugaucaccaucgagcugagcaacaucaaggagaacaagugcaacgggaccgacgccaaggugaagcucaucaagcaggagcuggacaaguacaagaacgcggucacggagcugcagcuccugaugcaguccaccccggcaaccggcuccggcuccgccaucugcagcggcgucgccgugugcaaggugcugcaccucgagggggaggucaacaagaucaagagcgcccugcuguccaccaacaaggccguggugagccucuccaacggcgucagcgugcugaccuucaaggugcuggaccucaagaacuacaucgacaagcagcugcugcccauccugaacaagcagagcugcuccaucagcaacaucgagacggugaucgaguuccagcagaagaacaaccggcuccuggagaucacccgcgaguucagcgugaacgccggggucaccacccccguguccacguacaugcugaccaacagcgagcuccugucccugaucaacgacaugccgaucaccaacgaccagaagaagcucaugagcaacaacgugcagaucguccggcagcaguccuacagcaucaugugcaucaucaaggaggaggugcuggcguacgugguccagcugccccucuacggcgugaucgacacccccugcuggaagcugcacacgagcccccugugcaccaccaacaccaaggagggguccaacaucugccucacgcgcaccgaccggggcugguacugcgacaacgccggcagcgucuccuucuucccgcaggccgagaccugcaaggugcagagcaaccgcguguucugcgacaccaugaacucccggacgcugcccagcgagguaaaccucugcaacgucgacaucuucaaccccaaguacgacugcaagaucaugaccuccaagaccgacgugagcuccagcgugaucaccucccugggggccaucgucagcugcuacggcaagacgaagugcaccgccagcaacaagaaccgggggaucaucaagaccuucuccaacggcugcgacuacgugagcaacaagggcguggacaccguguccgucgggaacacccuguacugcgugaacaagcaggagggcaagagccucuacgugaagggggagcccaucaucaacuucuacgacccgcuggucuuccccuccgacgaguucgacgcgagcaucucccaggugaacgagaagaucaaccagagccuggccuucauccgcaaguccgacgagcugcuccacaacgugaacgccggcaagagcacgaccaacaucaugaucaccaccaucaucaucgucaucaucgugauccugcugucccucaucgccguggggcugcugcucuacugcaaggcccggugaggacuaguacuggcugcaucucccuuuccucuguccuccauccuucucccaggauggugaagggggaccugguacccagugauccccaccccaggauccuaaaucaugacuuaccugcuaauaaaaacucauuggaaaagugagaagaucuaaaaaaaaaaaaaaaaaaaaaaaaaaaaaaaaaaaaaaaaaaaaaaaaaaaaaaaaaaaaaaaaugcaucccccccccccccccccccccccccccccccaaaggcucuuuucagagccaccagaauu

SEQ ID NO: 5167 - RNA, 1914 nt, Artificial Sequence
  mRNA product Design e-6 comprising derived and/or modified sequence from HRSV(A2)__F-del_DSCav1_mut4 (opt1)
gggagagcggcucggccauuuugucccagucaguccggaggcugcggcugcagaaguaccgccugcggaguaacugcaaagaagcuuaccauggagcugcucauccugaaggccaacgccaucaccaccauccugacggcggugaccuucugcuucgccagcggccagaacaucaccgaggaguucuaccaguccacgugcagcgccgucuccaagggguaccucagcgcccugcgcaccggcugguacaccuccgugaucaccaucgagcugagcaacaucaaggagaacaagugcaacgggaccgacgccaaggugaagcucaucaagcaggagcuggacaaguacaagaacgcggucacggagcugcagcuccugaugcaguccacccccgccaccggcagcggguccgccaucugcagcggcguggccgugugcaagguccugcaccucgagggcgaggugaacaagaucaaguccgcgcugcugagcaccaacaaggccguggucucccucagcaacgggguguccgugcugacguucaagguccuggaccucaagaacuacaucgacaagcagcugcugccgauccucaacaagcagagcugcuccaucagcaacaucgagaccgugaucgaguuccagcagaagaacaaccggcugcuggagaucacccgcgaguucuccgugaacgccggcgucaccacgcccgugagcaccuacaugcucaccaacagcgagcugcugucccucaucaacgacaugcccaucaccaacgaccagaagaagcugaugagcaacaacgugcagaucguccggcagcaguccuacagcaucaugugcaucaucaaggaggaggugcuggccuacgugguccagcucccccuguacggggugaucgacacgccgugcuggaagcugcacaccagcccccucugcaccaccaacacgaaggagggcuccaacaucugccugacccgcaccgaccgggggugguacugcgacaacgccggcuccgugagcuucuucccccaggcggagaccugcaagguccaguccaaccgcguguucugcgacacgaugaacagccggacccuccccuccgaggucaaccugugcaacguggacaucuucaacccgaaguacgacugcaagaucaugaccagcaagaccgacguguccagcuccgucaucacgagccugggcgccaucguguccugcuacgggaagaccaagugcaccgccagcaacaagaaccggggcaucaucaagaccuucuccaacgggugcgacuacgugagcaacaagggcgucgacacggugagcgugggcaacacccucuacugcgucaacaagcaggaggggaagucccuguacgugaagggcgagcccaucaucaacuucuacgacccccugguguuccccagcgacgaguucgacgccuccaucagccaggucaacgagaagaucaaccagucccucgccuucauccgcaagagcgacgagcugcugcacaacgugaacgcggggaaguccaccaccaacaucaugaucaccacgaucaucaucgugaucaucgucauccuccugagccugaucgccgugggccuccugcuguacugcaaggcccggugaggacuaguacuggcugcaucucccuuuccucuguccuccauccuucucccaggauggugaagggggaccugguacccagugauccccaccccaggauccuaaaucaugacuuaccugcuaauaaaaacucauuggaaaagugagaagaucuaaaaaaaaaaaaaaaaaaaaaaaaaaaaaaaaaaaaaaaaaaaaaaaaaaaaaaaaaaaaaaaaugcaucccccccccccccccccccccccccccccccaaaggcucuuuucagagccaccagaauu

SEQ ID NO: 5168 - RNA, 1914 nt, Artificial Sequence
  mRNA product Design e-6 comprising derived and/or modified sequence from HRSV(A2)__F-del_DSCav1_mut4 (opt2)
gggagagcggcucggccauuuugucccagucaguccggaggcugcggcugcagaaguaccgccugcggaguaacugcaaagaagcuuaccauggagcuccucauccucaaggccaacgccaucaccaccauccucaccgccgucaccuucugcuucgccuccggccagaacaucaccgaggaguucuaccaguccaccugcuccgccgucuccaagggcuaccucuccgcccuccgcaccggcugguacaccuccgucaucaccaucgagcucuccaacaucaaggagaacaagugcaacggcaccgacgccaaggucaagcucaucaagcaggagcucgacaaguacaagaacgccgucaccgagcuccagcuccucaugcaguccacccccgccaccggcuccggcuccgccaucugcuccggcgucgccgucugcaagguccuccaccucgagggcgaggucaacaagaucaaguccgcccuccucuccaccaacaaggccgucgucucccucuccaacggcgucuccguccucaccuucaagguccucgaccucaagaacuacaucgacaagcagcuccuccccauccucaacaagcaguccugcuccaucuccaacaucgagaccgucaucgaguuccagcagaagaacaaccgccuccucgagaucacccgcgaguucuccgucaacgccggcgucaccacccccgucuccaccuacaugcucaccaacuccgagcuccucucccucaucaacgacaugcccaucaccaacgaccagaagaagcucauguccaacaacguccagaucguccgccagcaguccuacuccaucaugugcaucaucaaggaggagguccucgccuacgucguccagcucccccucuacggcgucaucgacacccccugcuggaagcuccacaccuccccccucugcaccaccaacaccaaggagggcuccaacaucugccucacccgcaccgaccgcggcugguacugcgacaacgccggcuccgucuccuucuucccccaggccgagaccugcaagguccaguccaaccgcgucuucugcgacaccaugaacucccgcacccuccccuccgaggucaaccucugcaacgucgacaucuucaaccccaaguacgacugcaagaucaugaccuccaagaccgacgucuccuccuccgucaucaccucccucggcgccaucgucuccugcuacggcaagaccaagugcaccgccuccaacaagaaccgcggcaucaucaagaccuucuccaacggcugcgacuacgucuccaacaagggcgucgacaccgucuccgucggcaacacccucuacugcgucaacaagcaggagggcaagucccucuacgucaagggcgagcccaucaucaacuucuacgacccccucgucuuccccuccgacgaguucgacgccuccaucucccaggucaacgagaagaucaaccagucccucgccuucauccgcaaguccgacgagcuccuccacaacgucaacgccggcaaguccaccaccaacaucaugaucaccaccaucaucaucgucaucaucgucauccuccucucccucaucgccgucggccuccuccucuacugcaaggcccgcugaggacuaguacuggcugcaucucccuuuccucuguccuccauccuucucccaggauggugaagggggaccugguacccagugauccccaccccaggauccuaaaucaugacuuaccugcuaauaaaaacucauuggaaaagugagaagaucuaaaaaaaaaaaaaaaaaaaaaaaaaaaaaaaaaaaaaaaaaaaaaaaaaaaaaaaaaaaaaaaaugcaucccccccccccccccccccccccccccccccaaaggcucuuuucagagccaccagaauu

SEQ ID NO: 5169 - RNA, 1914 nt, Artificial Sequence
  mRNA product Design e-6 comprising derived and/or modified sequence from HRSV(A2)__F-del_DSCav1_mut4 (opt3)
gggagagcggcucggccauuuugucccagucaguccggaggcugcggcugcagaaguaccgccugcggaguaacugcaaagaagcuuaccauggagcugcucauccuuaaggccaacgcuauuaccacaauacugacugcagugacguucugcuuugccagcggccagaauaucaccgaagaguucuaccaauccacauguucugcggucucaaaaggguauuugagugcuuuaagaacuggaugguacaccagcguuauuacaaucgaacuguccaacauuaaggagaauaaaugcaacgguaccgacgccaaggugaaacuaaucaagcaggaacucgauaaguauaaaaaugcaguaacugagcugcagcuucugaugcagucuacacccgccaccggcucggggucagcuauauguagcggaguggcagucugcaagguguugcaccucgagggcgaaguuaacaaaaucaagagugcccugcuguccacgaauaaagcuguggucucucucagcaacgguguguccguauuaacuuuuaagguucuggaccuuaagaauuacauugauaaacaauugcugccuauccuaaacaagcagucauguaguauuagcaauaucgagaccgugauagaguuccagcagaaaaacaauaggcuccuggaaauuacacgggaguuuucugucaacgccggggugacuaccccaguguccacauauaugcuuaccaauucagaacuguugagccucaucaacgacaugccgauuacgaacgaucaaaagaaacugaugaguaauaacguccagaucguucgccagcagucuuacuccaucaugugcauuauaaaggaggaaguguuagcguauguagugcaacugccccucuacggagucaucgacacuccuuguuggaaacuucauacaagcccacugugcaccacuaauacaaaggagggcucgaacauuuguuugacccgaacggaucguggcugguacugcgacaaugcagggucuguguccuucuuuccccaggccgaaaccuguaagguucagucaaacagaguguucugcgauacaaugaauaguagaacucugccuagcgaggucaaccucugcaauguggacaucuuuaacccaaaauaugauuguaagauaaugaccuccaaaacagacguaucuagcucaguuauuaccagucugggagcuaucguguccugcuacgguaagacuaaauguacagccagcaauaagaacaggggcaucauuaagaccuucucuaaugggugcgauuaugucucaaacaaaggaguggacacugucagugugggcaauacgcuuuacuguguuaacaagcaagaggguaaaagccuguaugugaagggggaacccaucauuaacuuuuacgacccuuugguauucccauccgaugaguuugacgcaucuauaucgcaggucaaugagaaaaucaaccagagccucgcuuucauucggaaguccgaugaacuguuacacaaugugaacgccggaaagucaacaaccaauaucaugaucacuaccauuauaaucguuauuaucgugauucugcuaagucucaucgcggucggccugcuuuuguauugcaaagcccgcugaggacuaguacuggcugcaucucccuuuccucuguccuccauccuucucccaggauggugaagggggaccugguacccagugauccccaccccaggauccuaaaucaugacuuaccugcuaauaaaaacucauuggaaaagugagaagaucuaaaaaaaaaaaaaaaaaaaaaaaaaaaaaaaaaaaaaaaaaaaaaaaaaaaaaaaaaaaaaaaaugcaucccccccccccccccccccccccccccccccaaaggcucuuuucagagccaccagaauu

SEQ ID NO: 5170 - RNA, 1914 nt, Artificial Sequence
  mRNA product Design e-6 comprising derived and/or modified sequence from HRSV(A2)__F-del_DSCav1_mut4 (opt4)
gggagagcggcucggccauuuugucccagucaguccggaggcugcggcugcagaaguaccgccugcggaguaacugcaaagaagcuuaccauggagcugcugauccugaaggccaacgccaucaccaccauccugaccgccgugaccuucugcuucgccagcggccagaacaucaccgaggaguucuaccagagcaccugcagcgccgugagcaagggcuaccugagcgcccugagaaccggcugguacaccagcgugaucaccaucgagcugagcaacaucaaggagaacaagugcaacggcaccgacgccaaggugaagcugaucaagcaggagcuggacaaguacaagaacgccgugaccgagcugcagcugcugaugcagagcacccccgccaccggcagcggcagcgccaucugcagcggcguggccgugugcaaggugcugcaccuggagggcgaggugaacaagaucaagagcgcccugcugagcaccaacaaggccguggugagccugagcaacggcgugagcgugcugaccuucaaggugcuggaccugaagaacuacaucgacaagcagcugcugcccauccugaacaagcagagcugcagcaucagcaacaucgagaccgugaucgaguuccagcagaagaacaacagacugcuggagaucaccagagaguucagcgugaacgccggcgugaccacccccgugagcaccuacaugcugaccaacagcgagcugcugagccugaucaacgacaugcccaucaccaacgaccagaagaagcugaugagcaacaacgugcagaucgugagacagcagagcuacagcaucaugugcaucaucaaggaggaggugcuggccuacguggugcagcugccccuguacggcgugaucgacacccccugcuggaagcugcacaccagcccccugugcaccaccaacaccaaggagggcagcaacaucugccugaccagaaccgacagaggcugguacugcgacaacgccggcagcgugagcuucuucccccaggccgagaccugcaaggugcagagcaacagaguguucugcgacaccaugaacagcagaacccugcccagcgaggugaaccugugcaacguggacaucuucaaccccaaguacgacugcaagaucaugaccagcaagaccgacgugagcagcagcgugaucaccagccugggcgccaucgugagcugcuacggcaagaccaagugcaccgccagcaacaagaacagaggcaucaucaagaccuucagcaacggcugcgacuacgugagcaacaagggcguggacaccgugagcgugggcaacacccuguacugcgugaacaagcaggagggcaagagccuguacgugaagggcgagcccaucaucaacuucuacgacccccugguguuccccagcgacgaguucgacgccagcaucagccaggugaacgagaagaucaaccagagccuggccuucaucagaaagagcgacgagcugcugcacaacgugaacgccggcaagagcaccaccaacaucaugaucaccaccaucaucaucgugaucaucgugauccugcugagccugaucgccgugggccugcugcuguacugcaaggccagaugaggacuaguacuggcugcaucucccuuuccucuguccuccauccuucucccaggauggugaagggggaccugguacccagugauccccaccccaggauccuaaaucaugacuuaccugcuaauaaaaacucauuggaaaagugagaagaucuaaaaaaaaaaaaaaaaaaaaaaaaaaaaaaaaaaaaaaaaaaaaaaaaaaaaaaaaaaaaaaaaugcaucccccccccccccccccccccccccccccccaaaggcucuuuucagagccaccagaauu

SEQ ID NO: 5171 - RNA, 1914 nt, Artificial Sequence
  mRNA product Design e-6 comprising derived and/or modified sequence from HRSV(A2)__F-del_DSCav1_mut4 (opt5)
gggagagcggcucggccauuuugucccagucaguccggaggcugcggcugcagaaguaccgccugcggaguaacugcaaagaagcuuaccauggagcugcucauccugaaggccaacgcuauuaccacaauccuuacggccgugaccuucugcuuugcgagcggccagaauauuacagaagaguucuaccaauccaccuguucugcugucagcaaaggguaucuguccgcccucagaacaggaugguacaccucuguuaucacaauugaacugagcaacaucaaggagaauaaaugcaacggcaccgacgccaaggugaaacuuaucaagcaggaacuggauaaguauaaaaaugcugugacggagcuccagcugcugaugcaguccacccccgccacagggucuggaagcgcuauuuguuccggcgucgccgugugcaagguucuccaccuggagggggaagugaacaaaaucaagagcgcgcuucugucuaccaauaaagccgucgugucccucagcaacggaguuucugugcugacauuuaagguccuugaccugaagaauuacauugauaaacaacuccugccuauccugaacaagcaguccuguagcauuucuaauaucgagaccgugauugaguuccagcagaaaaacaaucggcuccuggaaaucacgcgcgaguuuuccgugaacgcuggcgucacaaccccgguuagcacauauaugcuuaccaauuccgaacugcucucucugaucaacgacaugcccauuaccaacgaucaaaagaaacuuaugagcaauaacgugcagaucgugagacagcaguccuacagcauuaugugcaucauuaaggaggaaguccuggccuaugugguucaacucccucuguacggcgugaucgacacacccuguuggaaacugcauacgucuccucucugcaccacaaauaccaaggagggguccaacaucugucugacacggaccgaucgcggaugguacugcgacaaugcuggcagcgucucuuucuuuccccaggccgaaacguguaaggugcagagcaacagaguuuucugcgauacaaugaacuccagaacccugccuucugaggugaaucucugcaaugucgacauuuuuaacccgaaauaugauuguaagaucaugaccagcaaaacagacguguccagcucugucauuaccucccugggggcgaucgugagcugcuacggaaagacaaaauguacggccucuaauaagaaccggggcauuaucaagaccuucuccaaugggugcgauuauguuagcaacaaaggaguggacacagucuccgugggcaauacccuuuacuguguuaacaagcaagagggcaaaucucuguaugugaagggggaacccaucauuaacuuuuacgacccucucgucuuccccagcgaugaguuugacgcuuccaucucucaggugaaugagaaaauuaaccagagccuggccuucauccgcaaguccgaugaacugcuccacaaugugaacgcuggaaagagcacaaccaauauuaugaucacgaccauuaucaucguuauuaucgucauucugcuuucucugaucgccgugggccuccugcuguauugcaaagccagaugaggacuaguacuggcugcaucucccuuuccucuguccuccauccuucucccaggauggugaagggggaccugguacccagugauccccaccccaggauccuaaaucaugacuuaccugcuaauaaaaacucauuggaaaagugagaagaucuaaaaaaaaaaaaaaaaaaaaaaaaaaaaaaaaaaaaaaaaaaaaaaaaaaaaaaaaaaaaaaaaugcaucccccccccccccccccccccccccccccccaaaggcucuuuucagagccaccagaauu

SEQ ID NO: 5172 - RNA, 1914 nt, Artificial Sequence
  mRNA product Design e-6 comprising derived and/or modified sequence from HRSV(A2)__F-del_DSCav1_mut4 (opt6)
gggagagcggcucggccauuuugucccagucaguccggaggcugcggcugcagaaguaccgccugcggaguaacugcaaagaagcuuaccauggaacuuuuaauacuaaaagcuaacgccauaaccacuauacuaacagcagucacauucugcuucgcaucaggccaaaacauaaccgaagaauuuuaccaauccacuuguucagcagucuccaaaggauauuuauccgcacuucguacaggaugguauacaucaguaauaacaauagaacucuccaacauaaaagaaaauaaaugcaacggcaccgacgcaaaaguaaaacucaucaaacaagaauuagacaaauacaagaacgccguaacagaacuacaauuacuaaugcaaucaacacccgccacaggaucaggaucugcaauaugcucuggaguagcaguaugcaaaguauuacaccuagaaggagaaguaaacaaaaucaaaagcgcacuacuauccacaaacaaagcuguaguaucacuaucaaacggaguaucaguauuaacuuucaaaguacuugaucuaaaaaacuacauagacaaacaacuacuacccauauuaaacaaacaaucaugcucaauaagcaauauagaaacaguaauagaauuucaacaaaaaaacaacagacuacuagaaaucacaagggaauuuucaguaaaugccgguguuacaaccccaguaucaacauacaugcuaacuaacucagaacuacuauccuuaauaaacgauaugccaauaacaaacgaucaaaaaaaacuaauguccaacaacguacaaauaguaagacaacaaucauacucaaucaugugcauuauaaaagaagaagucuuagcauacguaguacaauuaccacuauacgguguaauagauacaccauguuggaaauuacacacaagcccacuaugcacaacuaacacaaaagaaggcucaaauauauguuuaacaagaacagaccgagguugguacugcgacaaugcaggaucaguaucauucuuuccacaagcagaaacauguaaaguucaauccaacagaguauucugcgacacaaugaacuccagaacacuaccuucagaaguaaaccucuguaacguagacauauuuaaucccaaguacgacugcaaaauaaugacaucgaaaacagacguaagcuccucagugauaacaucccucggcgccaucguauccuguuacgguaaaacuaaauguaccgccucaaacaaaaaccgcgguauuauaaaaacuuuuucuaauggcugcgauuacguaagcaacaaaggcgucgacacaguuuccguaggaaacacacuauacugcguaaacaaacaagaagguaaaucucuauacguaaaaggagaaccaauaauaaauuucuaugauccuuuaguauucccauccgaugaauuugacgccucuaucucacaagucaacgaaaaaauaaaucaaucauuagcauucauacgaaaaucagacgaacuacuacacaacguaaacgcaggaaaaucaacaaccaacauaaugauaaccacaauaauaauaguuauuauagugauacuauuauccuuaauugcagucggacuauuauuauacuguaaagcacgcuaaggacuaguacuggcugcaucucccuuuccucuguccuccauccuucucccaggauggugaagggggaccugguacccagugauccccaccccaggauccuaaaucaugacuuaccugcuaauaaaaacucauuggaaaagugagaagaucuaaaaaaaaaaaaaaaaaaaaaaaaaaaaaaaaaaaaaaaaaaaaaaaaaaaaaaaaaaaaaaaaugcaucccccccccccccccccccccccccccccccaaaggcucuuuucagagccaccagaauu

SEQ ID NO: 5173 - RNA, 1914 nt, Artificial Sequence
  mRNA product Design e-6 comprising derived and/or modified sequence from HRSV(A2)__F-del_DSCav1_mut4 (opt11)
gggagagcggcucggccauuuugucccagucaguccggaggcugcggcugcagaaguaccgccugcggaguaacugcaaagaagcuuaccauggaacuccucauccucaaagccaaugccaucaccacaauccugacagcaguaaccuucugcuucgcauccggacaaaacaucaccgaagaauuuuaccagucaaccugcuccgcugucucaaaaggcuaccucucagcccuucgcaccggcugguacaccucggucauaacaauagaacucuccaauaucaaagaaaacaaaugcaacggcacugacgccaagguaaaacucaucaaacaggaacucgauaaauacaagaacgccguaacagaacuacaacuacucaugcaaucaacaccggccaccggcuccgguuccgccauaugcuccggaguggccgugugcaagguccuccaccuugaaggggaaguuaacaaaaucaaaucagcccuccucuccacuaacaaagccguaguaucccuaagcaacgguguauccguccucaccuucaaaguacuagaccuaaagaauuauaucgacaaacaacuccuccccauacucaacaaacaauccugcuccauaagcaacaucgaaacagucaucgaguuccagcagaaaaacaaccgacuccucgaaauaacccgcgaguucucagucaacgccggagucaccacacccgucagcaccuacaugcugaccaacuccgaacuccucuccuuaaucaaugacaugcccaucaccaaugaccaaaagaaacucaugucaaacaacguccaaauaguacgccaacaauccuacuccaucaugugcaucauaaaagaagaaguacucgccuacgucguccaacucccccucuacggcguaaucgacacccccugcuggaaacuacacacaagcccccucugcaccacaaacacuaaagagggcuccaacaucugucuaacccgcaccgaucgaggcugguacugcgacaacgccggaucugucucauucuucccccaagccgaaaccugcaaaguccaauccaaccgcgucuucugcgacaccaugaacucgagaacccucccuuccgaagucaaccuaugcaacgucgacauuuucaaccccaaauacgacugcaaaaucaugaccucgaaaaccgacguaucauccagcgucaucaccagccuaggcgcaaucgugagcugcuacggcaaaaccaaaugcaccgcgagcaauaaaaaccgcgggaucaucaaaacuuucuccaacggcugcgacuacgucuccaacaagggagucgauaccgucuccguaggcaacacccucuacugcgucaacaaacaagaaggcaaaucacuauacguaaaaggcgagccaaucauaaacuucuacgacccucuaguuuucccauccgacgaguucgacgcuagcaucucccaagucaacgagaaaaucaaccaaucccucgcauucauccgcaaauccgacgaacuccuccacaacguaaacgcaggcaaaucaacuacuaauauaaugaucacaaccaucauaauagucauaaucguaauccuccuaucccucaucgccgucggacuacugcucuacugcaaagcccgcuaaggacuaguacuggcugcaucucccuuuccucuguccuccauccuucucccaggauggugaagggggaccugguacccagugauccccaccccaggauccuaaaucaugacuuaccugcuaauaaaaacucauuggaaaagugagaagaucuaaaaaaaaaaaaaaaaaaaaaaaaaaaaaaaaaaaaaaaaaaaaaaaaaaaaaaaaaaaaaaaaugcaucccccccccccccccccccccccccccccccaaaggcucuuuucagagccaccagaauu

SEQ ID NO: 5174 - RNA, 2130 nt, Artificial Sequence
  mRNA product Design f-1 comprising derived and/or modified sequence from HRSV(A2)__F-del_DSCav1_mut4 (opt1)
gggagagcggcucggccauuuugucccagucaguccggaggcugcggcugcagaaguaccgccugcggaguaacugcaaagaagcuuaccauggagcugcucauccugaaggccaacgccaucaccaccauccugacggcggugaccuucugcuucgccagcggccagaacaucaccgaggaguucuaccaguccacgugcagcgccgucuccaagggguaccucagcgcccugcggaccggcugguacaccuccgugaucaccaucgagcugagcaacaucaaggagaacaagugcaacgggaccgacgccaaggugaagcucaucaagcaggagcuggacaaguacaagaacgcggucacggagcugcagcuccugaugcaguccaccccggcaaccggcuccggcuccgccaucugcagcggcgucgccgugugcaaggugcugcaccucgagggggaggucaacaagaucaagagcgcccugcuguccaccaacaaggccguggugagccucuccaacggcgucagcgugcugaccuucaaggugcuggaccucaagaacuacaucgacaagcagcugcugcccauccugaacaagcagagcugcuccaucagcaacaucgagacggugaucgaguuccagcagaagaacaaccggcuccuggagaucacccgcgaguucagcgugaacgccggggucaccacccccguguccacguacaugcugaccaacagcgagcuccugucccugaucaacgacaugccgaucaccaacgaccagaagaagcucaugagcaacaacgugcagaucguccggcagcaguccuacagcaucaugugcaucaucaaggaggaggugcuggcguacgugguccagcugccccucuacggcgugaucgacacccccugcuggaagcugcacacgagcccccugugcaccaccaacaccaaggagggguccaacaucugccucacgcgcaccgaccggggcugguacugcgacaacgccggcagcgucuccuucuucccgcaggccgagaccugcaaggugcagagcaaccgcguguucugcgacaccaugaacucccggacgcugcccagcgagguaaaccucugcaacgucgacaucuucaaccccaaguacgacugcaagaucaugaccuccaagaccgacgugagcuccagcgugaucaccucccugggggccaucgucagcugcuacggcaagacgaagugcaccgccagcaacaagaaccgggggaucaucaagaccuucuccaacggcugcgacuacgugagcaacaagggcguggacaccguguccgucgggaacacccuguacugcgugaacaagcaggagggcaagagccucuacgugaagggggagcccaucaucaacuucuacgacccgcuggucuuccccuccgacgaguucgacgcgagcaucucccaggugaacgagaagaucaaccagagccuggccuucauccgcaaguccgacgagcugcuccacaacgugaacgccggcaagagcacgaccaacaucaugaucaccaccaucaucaucgucaucaucgugauccugcugucccucaucgccguggggcugcugcucuacugcaaggcccggugaggacuagugaagggaacacccaaauuuaauucagccuuaagcacaauuaauuaagagugaaacguaauuguacaagcaguuggucacccaccauagggcaugaucaacaccgcaaccuuuccuuuuucccccagugauucugaaaaaccccucuucccuucagcuugcuuagauguuccaaauuuaguaagcuuaaggcggccuacagaagaaaaagaaaaaaaaggccacaaaaguucccucucacuuucaguaaauaaaauaaaagcagcaacagaaauaaagaaauaaaugaaauucaaaaugaaauaaauauuguguugugcagcauuaaaaaaucaauaaaaauuaaaaaugagcaagaucuaaaaaaaaaaaaaaaaaaaaaaaaaaaaaaaaaaaaaaaaaaaaaaaaaaaaaaaaaaaaaaaaugcaucccccccccccccccccccccccccccccccaaaggcucuuuucagagccaccagaauu

SEQ ID NO: 5175 - RNA, 2130 nt, Artificial Sequence
  mRNA product Design f-1 comprising derived and/or modified sequence from HRSV(A2)__F-del_DSCav1_mut4 (opt1)
gggagagcggcucggccauuuugucccagucaguccggaggcugcggcugcagaaguaccgccugcggaguaacugcaaagaagcuuaccauggagcugcucauccugaaggccaacgccaucaccaccauccugacggcggugaccuucugcuucgccagcggccagaacaucaccgaggaguucuaccaguccacgugcagcgccgucuccaagggguaccucagcgcccugcgcaccggcugguacaccuccgugaucaccaucgagcugagcaacaucaaggagaacaagugcaacgggaccgacgccaaggugaagcucaucaagcaggagcuggacaaguacaagaacgcggucacggagcugcagcuccugaugcaguccacccccgccaccggcagcggguccgccaucugcagcggcguggccgugugcaagguccugcaccucgagggcgaggugaacaagaucaaguccgcgcugcugagcaccaacaaggccguggucucccucagcaacgggguguccgugcugacguucaagguccuggaccucaagaacuacaucgacaagcagcugcugccgauccucaacaagcagagcugcuccaucagcaacaucgagaccgugaucgaguuccagcagaagaacaaccggcugcuggagaucacccgcgaguucuccgugaacgccggcgucaccacgcccgugagcaccuacaugcucaccaacagcgagcugcugucccucaucaacgacaugcccaucaccaacgaccagaagaagcugaugagcaacaacgugcagaucguccggcagcaguccuacagcaucaugugcaucaucaaggaggaggugcuggccuacgugguccagcucccccuguacggggugaucgacacgccgugcuggaagcugcacaccagcccccucugcaccaccaacacgaaggagggcuccaacaucugccugacccgcaccgaccgggggugguacugcgacaacgccggcuccgugagcuucuucccccaggcggagaccugcaagguccaguccaaccgcguguucugcgacacgaugaacagccggacccuccccuccgaggucaaccugugcaacguggacaucuucaacccgaaguacgacugcaagaucaugaccagcaagaccgacguguccagcuccgucaucacgagccugggcgccaucguguccugcuacgggaagaccaagugcaccgccagcaacaagaaccggggcaucaucaagaccuucuccaacgggugcgacuacgugagcaacaagggcgucgacacggugagcgugggcaacacccucuacugcgucaacaagcaggaggggaagucccuguacgugaagggcgagcccaucaucaacuucuacgacccccugguguuccccagcgacgaguucgacgccuccaucagccaggucaacgagaagaucaaccagucccucgccuucauccgcaagagcgacgagcugcugcacaacgugaacgcggggaaguccaccaccaacaucaugaucaccacgaucaucaucgugaucaucgucauccuccugagccugaucgccgugggccuccugcuguacugcaaggcccggugaggacuagugaagggaacacccaaauuuaauucagccuuaagcacaauuaauuaagagugaaacguaauuguacaagcaguuggucacccaccauagggcaugaucaacaccgcaaccuuuccuuuuucccccagugauucugaaaaaccccucuucccuucagcuugcuuagauguuccaaauuuaguaagcuuaaggcggccuacagaagaaaaagaaaaaaaaggccacaaaaguucccucucacuuucaguaaauaaaauaaaagcagcaacagaaauaaagaaauaaaugaaauucaaaaugaaauaaauauuguguugugcagcauuaaaaaaucaauaaaaauuaaaaaugagcaagaucuaaaaaaaaaaaaaaaaaaaaaaaaaaaaaaaaaaaaaaaaaaaaaaaaaaaaaaaaaaaaaaaaugcaucccccccccccccccccccccccccccccccaaaggcucuuuucagagccaccagaauu

SEQ ID NO: 5176 - RNA, 2130 nt, Artificial Sequence
  mRNA product Design f-1 comprising derived and/or modified sequence from HRSV(A2)__F-del_DSCav1_mut4 (opt2)
gggagagcggcucggccauuuugucccagucaguccggaggcugcggcugcagaaguaccgccugcggaguaacugcaaagaagcuuaccauggagcuccucauccucaaggccaacgccaucaccaccauccucaccgccgucaccuucugcuucgccuccggccagaacaucaccgaggaguucuaccaguccaccugcuccgccgucuccaagggcuaccucuccgcccuccgcaccggcugguacaccuccgucaucaccaucgagcucuccaacaucaaggagaacaagugcaacggcaccgacgccaaggucaagcucaucaagcaggagcucgacaaguacaagaacgccgucaccgagcuccagcuccucaugcaguccacccccgccaccggcuccggcuccgccaucugcuccggcgucgccgucugcaagguccuccaccucgagggcgaggucaacaagaucaaguccgcccuccucuccaccaacaaggccgucgucucccucuccaacggcgucuccguccucaccuucaagguccucgaccucaagaacuacaucgacaagcagcuccuccccauccucaacaagcaguccugcuccaucuccaacaucgagaccgucaucgaguuccagcagaagaacaaccgccuccucgagaucacccgcgaguucuccgucaacgccggcgucaccacccccgucuccaccuacaugcucaccaacuccgagcuccucucccucaucaacgacaugcccaucaccaacgaccagaagaagcucauguccaacaacguccagaucguccgccagcaguccuacuccaucaugugcaucaucaaggaggagguccucgccuacgucguccagcucccccucuacggcgucaucgacacccccugcuggaagcuccacaccuccccccucugcaccaccaacaccaaggagggcuccaacaucugccucacccgcaccgaccgcggcugguacugcgacaacgccggcuccgucuccuucuucccccaggccgagaccugcaagguccaguccaaccgcgucuucugcgacaccaugaacucccgcacccuccccuccgaggucaaccucugcaacgucgacaucuucaaccccaaguacgacugcaagaucaugaccuccaagaccgacgucuccuccuccgucaucaccucccucggcgccaucgucuccugcuacggcaagaccaagugcaccgccuccaacaagaaccgcggcaucaucaagaccuucuccaacggcugcgacuacgucuccaacaagggcgucgacaccgucuccgucggcaacacccucuacugcgucaacaagcaggagggcaagucccucuacgucaagggcgagcccaucaucaacuucuacgacccccucgucuuccccuccgacgaguucgacgccuccaucucccaggucaacgagaagaucaaccagucccucgccuucauccgcaaguccgacgagcuccuccacaacgucaacgccggcaaguccaccaccaacaucaugaucaccaccaucaucaucgucaucaucgucauccuccucucccucaucgccgucggccuccuccucuacugcaaggcccgcugaggacuagugaagggaacacccaaauuuaauucagccuuaagcacaauuaauuaagagugaaacguaauuguacaagcaguuggucacccaccauagggcaugaucaacaccgcaaccuuuccuuuuucccccagugauucugaaaaaccccucuucccuucagcuugcuuagauguuccaaauuuaguaagcuuaaggcggccuacagaagaaaaagaaaaaaaaggccacaaaaguucccucucacuuucaguaaauaaaauaaaagcagcaacagaaauaaagaaauaaaugaaauucaaaaugaaauaaauauuguguugugcagcauuaaaaaaucaauaaaaauuaaaaaugagcaagaucuaaaaaaaaaaaaaaaaaaaaaaaaaaaaaaaaaaaaaaaaaaaaaaaaaaaaaaaaaaaaaaaaugcaucccccccccccccccccccccccccccccccaaaggcucuuuucagagccaccagaauu

SEQ ID NO: 5177 - RNA, 2130 nt, Artificial Sequence
  mRNA product Design f-1 comprising derived and/or modified sequence from HRSV(A2)__F-del_DSCav1_mut4 (opt3)
gggagagcggcucggccauuuugucccagucaguccggaggcugcggcugcagaaguaccgccugcggaguaacugcaaagaagcuuaccauggagcugcucauccuuaaggccaacgcuauuaccacaauacugacugcagugacguucugcuuugccagcggccagaauaucaccgaagaguucuaccaauccacauguucugcggucucaaaaggguauuugagugcuuuaagaacuggaugguacaccagcguuauuacaaucgaacuguccaacauuaaggagaauaaaugcaacgguaccgacgccaaggugaaacuaaucaagcaggaacucgauaaguauaaaaaugcaguaacugagcugcagcuucugaugcagucuacacccgccaccggcucggggucagcuauauguagcggaguggcagucugcaagguguugcaccucgagggcgaaguuaacaaaaucaagagugcccugcuguccacgaauaaagcuguggucucucucagcaacgguguguccguauuaacuuuuaagguucuggaccuuaagaauuacauugauaaacaauugcugccuauccuaaacaagcagucauguaguauuagcaauaucgagaccgugauagaguuccagcagaaaaacaauaggcuccuggaaauuacacgggaguuuucugucaacgccggggugacuaccccaguguccacauauaugcuuaccaauucagaacuguugagccucaucaacgacaugccgauuacgaacgaucaaaagaaacugaugaguaauaacguccagaucguucgccagcagucuuacuccaucaugugcauuauaaaggaggaaguguuagcguauguagugcaacugccccucuacggagucaucgacacuccuuguuggaaacuucauacaagcccacugugcaccacuaauacaaaggagggcucgaacauuuguuugacccgaacggaucguggcugguacugcgacaaugcagggucuguguccuucuuuccccaggccgaaaccuguaagguucagucaaacagaguguucugcgauacaaugaauaguagaacucugccuagcgaggucaaccucugcaauguggacaucuuuaacccaaaauaugauuguaagauaaugaccuccaaaacagacguaucuagcucaguuauuaccagucugggagcuaucguguccugcuacgguaagacuaaauguacagccagcaauaagaacaggggcaucauuaagaccuucucuaaugggugcgauuaugucucaaacaaaggaguggacacugucagugugggcaauacgcuuuacuguguuaacaagcaagaggguaaaagccuguaugugaagggggaacccaucauuaacuuuuacgacccuuugguauucccauccgaugaguuugacgcaucuauaucgcaggucaaugagaaaaucaaccagagccucgcuuucauucggaaguccgaugaacuguuacacaaugugaacgccggaaagucaacaaccaauaucaugaucacuaccauuauaaucguuauuaucgugauucugcuaagucucaucgcggucggccugcuuuuguauugcaaagcccgcugaggacuagugaagggaacacccaaauuuaauucagccuuaagcacaauuaauuaagagugaaacguaauuguacaagcaguuggucacccaccauagggcaugaucaacaccgcaaccuuuccuuuuucccccagugauucugaaaaaccccucuucccuucagcuugcuuagauguuccaaauuuaguaagcuuaaggcggccuacagaagaaaaagaaaaaaaaggccacaaaaguucccucucacuuucaguaaauaaaauaaaagcagcaacagaaauaaagaaauaaaugaaauucaaaaugaaauaaauauuguguugugcagcauuaaaaaaucaauaaaaauuaaaaaugagcaagaucuaaaaaaaaaaaaaaaaaaaaaaaaaaaaaaaaaaaaaaaaaaaaaaaaaaaaaaaaaaaaaaaaugcaucccccccccccccccccccccccccccccccaaaggcucuuuucagagccaccagaauu

SEQ ID NO: 5178 - RNA, 2130 nt, Artificial Sequence
  mRNA product Design f-1 comprising derived and/or modified sequence from HRSV(A2)__F-del_DSCav1_mut4 (opt4)
gggagagcggcucggccauuuugucccagucaguccggaggcugcggcugcagaaguaccgccugcggaguaacugcaaagaagcuuaccauggagcugcugauccugaaggccaacgccaucaccaccauccugaccgccgugaccuucugcuucgccagcggccagaacaucaccgaggaguucuaccagagcaccugcagcgccgugagcaagggcuaccugagcgcccugagaaccggcugguacaccagcgugaucaccaucgagcugagcaacaucaaggagaacaagugcaacggcaccgacgccaaggugaagcugaucaagcaggagcuggacaaguacaagaacgccgugaccgagcugcagcugcugaugcagagcacccccgccaccggcagcggcagcgccaucugcagcggcguggccgugugcaaggugcugcaccuggagggcgaggugaacaagaucaagagcgcccugcugagcaccaacaaggccguggugagccugagcaacggcgugagcgugcugaccuucaaggugcuggaccugaagaacuacaucgacaagcagcugcugcccauccugaacaagcagagcugcagcaucagcaacaucgagaccgugaucgaguuccagcagaagaacaacagacugcuggagaucaccagagaguucagcgugaacgccggcgugaccacccccgugagcaccuacaugcugaccaacagcgagcugcugagccugaucaacgacaugcccaucaccaacgaccagaagaagcugaugagcaacaacgugcagaucgugagacagcagagcuacagcaucaugugcaucaucaaggaggaggugcuggccuacguggugcagcugccccuguacggcgugaucgacacccccugcuggaagcugcacaccagcccccugugcaccaccaacaccaaggagggcagcaacaucugccugaccagaaccgacagaggcugguacugcgacaacgccggcagcgugagcuucuucccccaggccgagaccugcaaggugcagagcaacagaguguucugcgacaccaugaacagcagaacccugcccagcgaggugaaccugugcaacguggacaucuucaaccccaaguacgacugcaagaucaugaccagcaagaccgacgugagcagcagcgugaucaccagccugggcgccaucgugagcugcuacggcaagaccaagugcaccgccagcaacaagaacagaggcaucaucaagaccuucagcaacggcugcgacuacgugagcaacaagggcguggacaccgugagcgugggcaacacccuguacugcgugaacaagcaggagggcaagagccuguacgugaagggcgagcccaucaucaacuucuacgacccccugguguuccccagcgacgaguucgacgccagcaucagccaggugaacgagaagaucaaccagagccuggccuucaucagaaagagcgacgagcugcugcacaacgugaacgccggcaagagcaccaccaacaucaugaucaccaccaucaucaucgugaucaucgugauccugcugagccugaucgccgugggccugcugcuguacugcaaggccagaugaggacuagugaagggaacacccaaauuuaauucagccuuaagcacaauuaauuaagagugaaacguaauuguacaagcaguuggucacccaccauagggcaugaucaacaccgcaaccuuuccuuuuucccccagugauucugaaaaaccccucuucccuucagcuugcuuagauguuccaaauuuaguaagcuuaaggcggccuacagaagaaaaagaaaaaaaaggccacaaaaguucccucucacuuucaguaaauaaaauaaaagcagcaacagaaauaaagaaauaaaugaaauucaaaaugaaauaaauauuguguugugcagcauuaaaaaaucaauaaaaauuaaaaaugagcaagaucuaaaaaaaaaaaaaaaaaaaaaaaaaaaaaaaaaaaaaaaaaaaaaaaaaaaaaaaaaaaaaaaaugcaucccccccccccccccccccccccccccccccaaaggcucuuuucagagccaccagaauu

SEQ ID NO: 5179 - RNA, 2130 nt, Artificial Sequence
  mRNA product Design f-1 comprising derived and/or modified sequence from HRSV(A2)__F-del_DSCav1_mut4 (opt5)
gggagagcggcucggccauuuugucccagucaguccggaggcugcggcugcagaaguaccgccugcggaguaacugcaaagaagcuuaccauggagcugcucauccugaaggccaacgcuauuaccacaauccuuacggccgugaccuucugcuuugcgagcggccagaauauuacagaagaguucuaccaauccaccuguucugcugucagcaaaggguaucuguccgcccucagaacaggaugguacaccucuguuaucacaauugaacugagcaacaucaaggagaauaaaugcaacggcaccgacgccaaggugaaacuuaucaagcaggaacuggauaaguauaaaaaugcugugacggagcuccagcugcugaugcaguccacccccgccacagggucuggaagcgcuauuuguuccggcgucgccgugugcaagguucuccaccuggagggggaagugaacaaaaucaagagcgcgcuucugucuaccaauaaagccgucgugucccucagcaacggaguuucugugcugacauuuaagguccuugaccugaagaauuacauugauaaacaacuccugccuauccugaacaagcaguccuguagcauuucuaauaucgagaccgugauugaguuccagcagaaaaacaaucggcuccuggaaaucacgcgcgaguuuuccgugaacgcuggcgucacaaccccgguuagcacauauaugcuuaccaauuccgaacugcucucucugaucaacgacaugcccauuaccaacgaucaaaagaaacuuaugagcaauaacgugcagaucgugagacagcaguccuacagcauuaugugcaucauuaaggaggaaguccuggccuaugugguucaacucccucuguacggcgugaucgacacacccuguuggaaacugcauacgucuccucucugcaccacaaauaccaaggagggguccaacaucugucugacacggaccgaucgcggaugguacugcgacaaugcuggcagcgucucuuucuuuccccaggccgaaacguguaaggugcagagcaacagaguuuucugcgauacaaugaacuccagaacccugccuucugaggugaaucucugcaaugucgacauuuuuaacccgaaauaugauuguaagaucaugaccagcaaaacagacguguccagcucugucauuaccucccugggggcgaucgugagcugcuacggaaagacaaaauguacggccucuaauaagaaccggggcauuaucaagaccuucuccaaugggugcgauuauguuagcaacaaaggaguggacacagucuccgugggcaauacccuuuacuguguuaacaagcaagagggcaaaucucuguaugugaagggggaacccaucauuaacuuuuacgacccucucgucuuccccagcgaugaguuugacgcuuccaucucucaggugaaugagaaaauuaaccagagccuggccuucauccgcaaguccgaugaacugcuccacaaugugaacgcuggaaagagcacaaccaauauuaugaucacgaccauuaucaucguuauuaucgucauucugcuuucucugaucgccgugggccuccugcuguauugcaaagccagaugaggacuagugaagggaacacccaaauuuaauucagccuuaagcacaauuaauuaagagugaaacguaauuguacaagcaguuggucacccaccauagggcaugaucaacaccgcaaccuuuccuuuuucccccagugauucugaaaaaccccucuucccuucagcuugcuuagauguuccaaauuuaguaagcuuaaggcggccuacagaagaaaaagaaaaaaaaggccacaaaaguucccucucacuuucaguaaauaaaauaaaagcagcaacagaaauaaagaaauaaaugaaauucaaaaugaaauaaauauuguguugugcagcauuaaaaaaucaauaaaaauuaaaaaugagcaagaucuaaaaaaaaaaaaaaaaaaaaaaaaaaaaaaaaaaaaaaaaaaaaaaaaaaaaaaaaaaaaaaaaugcaucccccccccccccccccccccccccccccccaaaggcucuuuucagagccaccagaauu

SEQ ID NO: 5180 - RNA, 2130 nt, Artificial Sequence
  mRNA product Design f-1 comprising derived and/or modified sequence from HRSV(A2)__F-del_DSCav1_mut4 (opt6)
gggagagcggcucggccauuuugucccagucaguccggaggcugcggcugcagaaguaccgccugcggaguaacugcaaagaagcuuaccauggaacuuuuaauacuaaaagcuaacgccauaaccacuauacuaacagcagucacauucugcuucgcaucaggccaaaacauaaccgaagaauuuuaccaauccacuuguucagcagucuccaaaggauauuuauccgcacuucguacaggaugguauacaucaguaauaacaauagaacucuccaacauaaaagaaaauaaaugcaacggcaccgacgcaaaaguaaaacucaucaaacaagaauuagacaaauacaagaacgccguaacagaacuacaauuacuaaugcaaucaacacccgccacaggaucaggaucugcaauaugcucuggaguagcaguaugcaaaguauuacaccuagaaggagaaguaaacaaaaucaaaagcgcacuacuauccacaaacaaagcuguaguaucacuaucaaacggaguaucaguauuaacuuucaaaguacuugaucuaaaaaacuacauagacaaacaacuacuacccauauuaaacaaacaaucaugcucaauaagcaauauagaaacaguaauagaauuucaacaaaaaaacaacagacuacuagaaaucacaagggaauuuucaguaaaugccgguguuacaaccccaguaucaacauacaugcuaacuaacucagaacuacuauccuuaauaaacgauaugccaauaacaaacgaucaaaaaaaacuaauguccaacaacguacaaauaguaagacaacaaucauacucaaucaugugcauuauaaaagaagaagucuuagcauacguaguacaauuaccacuauacgguguaauagauacaccauguuggaaauuacacacaagcccacuaugcacaacuaacacaaaagaaggcucaaauauauguuuaacaagaacagaccgagguugguacugcgacaaugcaggaucaguaucauucuuuccacaagcagaaacauguaaaguucaauccaacagaguauucugcgacacaaugaacuccagaacacuaccuucagaaguaaaccucuguaacguagacauauuuaaucccaaguacgacugcaaaauaaugacaucgaaaacagacguaagcuccucagugauaacaucccucggcgccaucguauccuguuacgguaaaacuaaauguaccgccucaaacaaaaaccgcgguauuauaaaaacuuuuucuaauggcugcgauuacguaagcaacaaaggcgucgacacaguuuccguaggaaacacacuauacugcguaaacaaacaagaagguaaaucucuauacguaaaaggagaaccaauaauaaauuucuaugauccuuuaguauucccauccgaugaauuugacgccucuaucucacaagucaacgaaaaaauaaaucaaucauuagcauucauacgaaaaucagacgaacuacuacacaacguaaacgcaggaaaaucaacaaccaacauaaugauaaccacaauaauaauaguuauuauagugauacuauuauccuuaauugcagucggacuauuauuauacuguaaagcacgcuaaggacuagugaagggaacacccaaauuuaauucagccuuaagcacaauuaauuaagagugaaacguaauuguacaagcaguuggucacccaccauagggcaugaucaacaccgcaaccuuuccuuuuucccccagugauucugaaaaaccccucuucccuucagcuugcuuagauguuccaaauuuaguaagcuuaaggcggccuacagaagaaaaagaaaaaaaaggccacaaaaguucccucucacuuucaguaaauaaaauaaaagcagcaacagaaauaaagaaauaaaugaaauucaaaaugaaauaaauauuguguugugcagcauuaaaaaaucaauaaaaauuaaaaaugagcaagaucuaaaaaaaaaaaaaaaaaaaaaaaaaaaaaaaaaaaaaaaaaaaaaaaaaaaaaaaaaaaaaaaaugcaucccccccccccccccccccccccccccccccaaaggcucuuuucagagccaccagaauu

SEQ ID NO: 5181 - RNA, 2130 nt, Artificial Sequence
  mRNA product Design f-1 comprising derived and/or modified sequence from HRSV(A2)__F-del_DSCav1_mut4 (opt11)
gggagagcggcucggccauuuugucccagucaguccggaggcugcggcugcagaaguaccgccugcggaguaacugcaaagaagcuuaccauggaacuccucauccucaaagccaaugccaucaccacaauccugacagcaguaaccuucugcuucgcauccggacaaaacaucaccgaagaauuuuaccagucaaccugcuccgcugucucaaaaggcuaccucucagcccuucgcaccggcugguacaccucggucauaacaauagaacucuccaauaucaaagaaaacaaaugcaacggcacugacgccaagguaaaacucaucaaacaggaacucgauaaauacaagaacgccguaacagaacuacaacuacucaugcaaucaacaccggccaccggcuccgguuccgccauaugcuccggaguggccgugugcaagguccuccaccuugaaggggaaguuaacaaaaucaaaucagcccuccucuccacuaacaaagccguaguaucccuaagcaacgguguauccguccucaccuucaaaguacuagaccuaaagaauuauaucgacaaacaacuccuccccauacucaacaaacaauccugcuccauaagcaacaucgaaacagucaucgaguuccagcagaaaaacaaccgacuccucgaaauaacccgcgaguucucagucaacgccggagucaccacacccgucagcaccuacaugcugaccaacuccgaacuccucuccuuaaucaaugacaugcccaucaccaaugaccaaaagaaacucaugucaaacaacguccaaauaguacgccaacaauccuacuccaucaugugcaucauaaaagaagaaguacucgccuacgucguccaacucccccucuacggcguaaucgacacccccugcuggaaacuacacacaagcccccucugcaccacaaacacuaaagagggcuccaacaucugucuaacccgcaccgaucgaggcugguacugcgacaacgccggaucugucucauucuucccccaagccgaaaccugcaaaguccaauccaaccgcgucuucugcgacaccaugaacucgagaacccucccuuccgaagucaaccuaugcaacgucgacauuuucaaccccaaauacgacugcaaaaucaugaccucgaaaaccgacguaucauccagcgucaucaccagccuaggcgcaaucgugagcugcuacggcaaaaccaaaugcaccgcgagcaauaaaaaccgcgggaucaucaaaacuuucuccaacggcugcgacuacgucuccaacaagggagucgauaccgucuccguaggcaacacccucuacugcgucaacaaacaagaaggcaaaucacuauacguaaaaggcgagccaaucauaaacuucuacgacccucuaguuuucccauccgacgaguucgacgcuagcaucucccaagucaacgagaaaaucaaccaaucccucgcauucauccgcaaauccgacgaacuccuccacaacguaaacgcaggcaaaucaacuacuaauauaaugaucacaaccaucauaauagucauaaucguaauccuccuaucccucaucgccgucggacuacugcucuacugcaaagcccgcuaaggacuagugaagggaacacccaaauuuaauucagccuuaagcacaauuaauuaagagugaaacguaauuguacaagcaguuggucacccaccauagggcaugaucaacaccgcaaccuuuccuuuuucccccagugauucugaaaaaccccucuucccuucagcuugcuuagauguuccaaauuuaguaagcuuaaggcggccuacagaagaaaaagaaaaaaaaggccacaaaaguucccucucacuuucaguaaauaaaauaaaagcagcaacagaaauaaagaaauaaaugaaauucaaaaugaaauaaauauuguguugugcagcauuaaaaaaucaauaaaaauuaaaaaugagcaagaucuaaaaaaaaaaaaaaaaaaaaaaaaaaaaaaaaaaaaaaaaaaaaaaaaaaaaaaaaaaaaaaaaugcaucccccccccccccccccccccccccccccccaaaggcucuuuucagagccaccagaauu

SEQ ID NO: 5182 - RNA, 1910 nt, Artificial Sequence
  mRNA product Design f-2 comprising derived and/or modified sequence from HRSV(A2)__F-del_DSCav1_mut4 (opt1)
gggagagcggcucggccauuuugucccagucaguccggaggcugcggcugcagaaguaccgccugcggaguaacugcaaagaagcuuaccauggagcugcucauccugaaggccaacgccaucaccaccauccugacggcggugaccuucugcuucgccagcggccagaacaucaccgaggaguucuaccaguccacgugcagcgccgucuccaagggguaccucagcgcccugcggaccggcugguacaccuccgugaucaccaucgagcugagcaacaucaaggagaacaagugcaacgggaccgacgccaaggugaagcucaucaagcaggagcuggacaaguacaagaacgcggucacggagcugcagcuccugaugcaguccaccccggcaaccggcuccggcuccgccaucugcagcggcgucgccgugugcaaggugcugcaccucgagggggaggucaacaagaucaagagcgcccugcuguccaccaacaaggccguggugagccucuccaacggcgucagcgugcugaccuucaaggugcuggaccucaagaacuacaucgacaagcagcugcugcccauccugaacaagcagagcugcuccaucagcaacaucgagacggugaucgaguuccagcagaagaacaaccggcuccuggagaucacccgcgaguucagcgugaacgccggggucaccacccccguguccacguacaugcugaccaacagcgagcuccugucccugaucaacgacaugccgaucaccaacgaccagaagaagcucaugagcaacaacgugcagaucguccggcagcaguccuacagcaucaugugcaucaucaaggaggaggugcuggcguacgugguccagcugccccucuacggcgugaucgacacccccugcuggaagcugcacacgagcccccugugcaccaccaacaccaaggagggguccaacaucugccucacgcgcaccgaccggggcugguacugcgacaacgccggcagcgucuccuucuucccgcaggccgagaccugcaaggugcagagcaaccgcguguucugcgacaccaugaacucccggacgcugcccagcgagguaaaccucugcaacgucgacaucuucaaccccaaguacgacugcaagaucaugaccuccaagaccgacgugagcuccagcgugaucaccucccugggggccaucgucagcugcuacggcaagacgaagugcaccgccagcaacaagaaccgggggaucaucaagaccuucuccaacggcugcgacuacgugagcaacaagggcguggacaccguguccgucgggaacacccuguacugcgugaacaagcaggagggcaagagccucuacgugaagggggagcccaucaucaacuucuacgacccgcuggucuuccccuccgacgaguucgacgcgagcaucucccaggugaacgagaagaucaaccagagccuggccuucauccgcaaguccgacgagcugcuccacaacgugaacgccggcaagagcacgaccaacaucaugaucaccaccaucaucaucgucaucaucgugauccugcugucccucaucgccguggggcugcugcucuacugcaaggcccggugaggacuaguggaagcauuuuccuggcugauuaaaagaaauuacucagcuauggucaucuguuccuguuagaaggcuaugcagcauauuauauacuaugcgcauguuaugaaaugcauaauaaaaaauuuuaaaaaaucuaaaagaucuaaaaaaaaaaaaaaaaaaaaaaaaaaaaaaaaaaaaaaaaaaaaaaaaaaaaaaaaaaaaaaaaugcaucccccccccccccccccccccccccccccccaaaggcucuuuucagagccaccagaauu

SEQ ID NO: 5183 - RNA, 1910 nt, Artificial Sequence
  mRNA product Design f-2 comprising derived and/or modified sequence from HRSV(A2)__F-del_DSCav1_mut4 (opt1)
gggagagcggcucggccauuuugucccagucaguccggaggcugcggcugcagaaguaccgccugcggaguaacugcaaagaagcuuaccauggagcugcucauccugaaggccaacgccaucaccaccauccugacggcggugaccuucugcuucgccagcggccagaacaucaccgaggaguucuaccaguccacgugcagcgccgucuccaagggguaccucagcgcccugcgcaccggcugguacaccuccgugaucaccaucgagcugagcaacaucaaggagaacaagugcaacgggaccgacgccaaggugaagcucaucaagcaggagcuggacaaguacaagaacgcggucacggagcugcagcuccugaugcaguccacccccgccaccggcagcggguccgccaucugcagcggcguggccgugugcaagguccugcaccucgagggcgaggugaacaagaucaaguccgcgcugcugagcaccaacaaggccguggucucccucagcaacgggguguccgugcugacguucaagguccuggaccucaagaacuacaucgacaagcagcugcugccgauccucaacaagcagagcugcuccaucagcaacaucgagaccgugaucgaguuccagcagaagaacaaccggcugcuggagaucacccgcgaguucuccgugaacgccggcgucaccacgcccgugagcaccuacaugcucaccaacagcgagcugcugucccucaucaacgacaugcccaucaccaacgaccagaagaagcugaugagcaacaacgugcagaucguccggcagcaguccuacagcaucaugugcaucaucaaggaggaggugcuggccuacgugguccagcucccccuguacggggugaucgacacgccgugcuggaagcugcacaccagcccccucugcaccaccaacacgaaggagggcuccaacaucugccugacccgcaccgaccgggggugguacugcgacaacgccggcuccgugagcuucuucccccaggcggagaccugcaagguccaguccaaccgcguguucugcgacacgaugaacagccggacccuccccuccgaggucaaccugugcaacguggacaucuucaacccgaaguacgacugcaagaucaugaccagcaagaccgacguguccagcuccgucaucacgagccugggcgccaucguguccugcuacgggaagaccaagugcaccgccagcaacaagaaccggggcaucaucaagaccuucuccaacgggugcgacuacgugagcaacaagggcgucgacacggugagcgugggcaacacccucuacugcgucaacaagcaggaggggaagucccuguacgugaagggcgagcccaucaucaacuucuacgacccccugguguuccccagcgacgaguucgacgccuccaucagccaggucaacgagaagaucaaccagucccucgccuucauccgcaagagcgacgagcugcugcacaacgugaacgcggggaaguccaccaccaacaucaugaucaccacgaucaucaucgugaucaucgucauccuccugagccugaucgccgugggccuccugcuguacugcaaggcccggugaggacuaguggaagcauuuuccuggcugauuaaaagaaauuacucagcuauggucaucuguuccuguuagaaggcuaugcagcauauuauauacuaugcgcauguuaugaaaugcauaauaaaaaauuuuaaaaaaucuaaaagaucuaaaaaaaaaaaaaaaaaaaaaaaaaaaaaaaaaaaaaaaaaaaaaaaaaaaaaaaaaaaaaaaaugcaucccccccccccccccccccccccccccccccaaaggcucuuuucagagccaccagaauu

SEQ ID NO: 5184 - RNA, 1910 nt, Artificial Sequence
  mRNA product Design f-2 comprising derived and/or modified sequence from HRSV(A2)__F-del_DSCav1_mut4 (opt2)
gggagagcggcucggccauuuugucccagucaguccggaggcugcggcugcagaaguaccgccugcggaguaacugcaaagaagcuuaccauggagcuccucauccucaaggccaacgccaucaccaccauccucaccgccgucaccuucugcuucgccuccggccagaacaucaccgaggaguucuaccaguccaccugcuccgccgucuccaagggcuaccucuccgcccuccgcaccggcugguacaccuccgucaucaccaucgagcucuccaacaucaaggagaacaagugcaacggcaccgacgccaaggucaagcucaucaagcaggagcucgacaaguacaagaacgccgucaccgagcuccagcuccucaugcaguccacccccgccaccggcuccggcuccgccaucugcuccggcgucgccgucugcaagguccuccaccucgagggcgaggucaacaagaucaaguccgcccuccucuccaccaacaaggccgucgucucccucuccaacggcgucuccguccucaccuucaagguccucgaccucaagaacuacaucgacaagcagcuccuccccauccucaacaagcaguccugcuccaucuccaacaucgagaccgucaucgaguuccagcagaagaacaaccgccuccucgagaucacccgcgaguucuccgucaacgccggcgucaccacccccgucuccaccuacaugcucaccaacuccgagcuccucucccucaucaacgacaugcccaucaccaacgaccagaagaagcucauguccaacaacguccagaucguccgccagcaguccuacuccaucaugugcaucaucaaggaggagguccucgccuacgucguccagcucccccucuacggcgucaucgacacccccugcuggaagcuccacaccuccccccucugcaccaccaacaccaaggagggcuccaacaucugccucacccgcaccgaccgcggcugguacugcgacaacgccggcuccgucuccuucuucccccaggccgagaccugcaagguccaguccaaccgcgucuucugcgacaccaugaacucccgcacccuccccuccgaggucaaccucugcaacgucgacaucuucaaccccaaguacgacugcaagaucaugaccuccaagaccgacgucuccuccuccgucaucaccucccucggcgccaucgucuccugcuacggcaagaccaagugcaccgccuccaacaagaaccgcggcaucaucaagaccuucuccaacggcugcgacuacgucuccaacaagggcgucgacaccgucuccgucggcaacacccucuacugcgucaacaagcaggagggcaagucccucuacgucaagggcgagcccaucaucaacuucuacgacccccucgucuuccccuccgacgaguucgacgccuccaucucccaggucaacgagaagaucaaccagucccucgccuucauccgcaaguccgacgagcuccuccacaacgucaacgccggcaaguccaccaccaacaucaugaucaccaccaucaucaucgucaucaucgucauccuccucucccucaucgccgucggccuccuccucuacugcaaggcccgcugaggacuaguggaagcauuuuccuggcugauuaaaagaaauuacucagcuauggucaucuguuccuguuagaaggcuaugcagcauauuauauacuaugcgcauguuaugaaaugcauaauaaaaaauuuuaaaaaaucuaaaagaucuaaaaaaaaaaaaaaaaaaaaaaaaaaaaaaaaaaaaaaaaaaaaaaaaaaaaaaaaaaaaaaaaugcaucccccccccccccccccccccccccccccccaaaggcucuuuucagagccaccagaauu

SEQ ID NO: 5185 - RNA, 1910 nt, Artificial Sequence
  mRNA product Design f-2 comprising derived and/or modified sequence from HRSV(A2)__F-del_DSCav1_mut4 (opt3)
gggagagcggcucggccauuuugucccagucaguccggaggcugcggcugcagaaguaccgccugcggaguaacugcaaagaagcuuaccauggagcugcucauccuuaaggccaacgcuauuaccacaauacugacugcagugacguucugcuuugccagcggccagaauaucaccgaagaguucuaccaauccacauguucugcggucucaaaaggguauuugagugcuuuaagaacuggaugguacaccagcguuauuacaaucgaacuguccaacauuaaggagaauaaaugcaacgguaccgacgccaaggugaaacuaaucaagcaggaacucgauaaguauaaaaaugcaguaacugagcugcagcuucugaugcagucuacacccgccaccggcucggggucagcuauauguagcggaguggcagucugcaagguguugcaccucgagggcgaaguuaacaaaaucaagagugcccugcuguccacgaauaaagcuguggucucucucagcaacgguguguccguauuaacuuuuaagguucuggaccuuaagaauuacauugauaaacaauugcugccuauccuaaacaagcagucauguaguauuagcaauaucgagaccgugauagaguuccagcagaaaaacaauaggcuccuggaaauuacacgggaguuuucugucaacgccggggugacuaccccaguguccacauauaugcuuaccaauucagaacuguugagccucaucaacgacaugccgauuacgaacgaucaaaagaaacugaugaguaauaacguccagaucguucgccagcagucuuacuccaucaugugcauuauaaaggaggaaguguuagcguauguagugcaacugccccucuacggagucaucgacacuccuuguuggaaacuucauacaagcccacugugcaccacuaauacaaaggagggcucgaacauuuguuugacccgaacggaucguggcugguacugcgacaaugcagggucuguguccuucuuuccccaggccgaaaccuguaagguucagucaaacagaguguucugcgauacaaugaauaguagaacucugccuagcgaggucaaccucugcaauguggacaucuuuaacccaaaauaugauuguaagauaaugaccuccaaaacagacguaucuagcucaguuauuaccagucugggagcuaucguguccugcuacgguaagacuaaauguacagccagcaauaagaacaggggcaucauuaagaccuucucuaaugggugcgauuaugucucaaacaaaggaguggacacugucagugugggcaauacgcuuuacuguguuaacaagcaagaggguaaaagccuguaugugaagggggaacccaucauuaacuuuuacgacccuuugguauucccauccgaugaguuugacgcaucuauaucgcaggucaaugagaaaaucaaccagagccucgcuuucauucggaaguccgaugaacuguuacacaaugugaacgccggaaagucaacaaccaauaucaugaucacuaccauuauaaucguuauuaucgugauucugcuaagucucaucgcggucggccugcuuuuguauugcaaagcccgcugaggacuaguggaagcauuuuccuggcugauuaaaagaaauuacucagcuauggucaucuguuccuguuagaaggcuaugcagcauauuauauacuaugcgcauguuaugaaaugcauaauaaaaaauuuuaaaaaaucuaaaagaucuaaaaaaaaaaaaaaaaaaaaaaaaaaaaaaaaaaaaaaaaaaaaaaaaaaaaaaaaaaaaaaaaugcaucccccccccccccccccccccccccccccccaaaggcucuuuucagagccaccagaauu

SEQ ID NO: 5186 - RNA, 1910 nt, Artificial Sequence
  mRNA product Design f-2 comprising derived and/or modified sequence from HRSV(A2)__F-del_DSCav1_mut4 (opt4)
gggagagcggcucggccauuuugucccagucaguccggaggcugcggcugcagaaguaccgccugcggaguaacugcaaagaagcuuaccauggagcugcugauccugaaggccaacgccaucaccaccauccugaccgccgugaccuucugcuucgccagcggccagaacaucaccgaggaguucuaccagagcaccugcagcgccgugagcaagggcuaccugagcgcccugagaaccggcugguacaccagcgugaucaccaucgagcugagcaacaucaaggagaacaagugcaacggcaccgacgccaaggugaagcugaucaagcaggagcuggacaaguacaagaacgccgugaccgagcugcagcugcugaugcagagcacccccgccaccggcagcggcagcgccaucugcagcggcguggccgugugcaaggugcugcaccuggagggcgaggugaacaagaucaagagcgcccugcugagcaccaacaaggccguggugagccugagcaacggcgugagcgugcugaccuucaaggugcuggaccugaagaacuacaucgacaagcagcugcugcccauccugaacaagcagagcugcagcaucagcaacaucgagaccgugaucgaguuccagcagaagaacaacagacugcuggagaucaccagagaguucagcgugaacgccggcgugaccacccccgugagcaccuacaugcugaccaacagcgagcugcugagccugaucaacgacaugcccaucaccaacgaccagaagaagcugaugagcaacaacgugcagaucgugagacagcagagcuacagcaucaugugcaucaucaaggaggaggugcuggccuacguggugcagcugccccuguacggcgugaucgacacccccugcuggaagcugcacaccagcccccugugcaccaccaacaccaaggagggcagcaacaucugccugaccagaaccgacagaggcugguacugcgacaacgccggcagcgugagcuucuucccccaggccgagaccugcaaggugcagagcaacagaguguucugcgacaccaugaacagcagaacccugcccagcgaggugaaccugugcaacguggacaucuucaaccccaaguacgacugcaagaucaugaccagcaagaccgacgugagcagcagcgugaucaccagccugggcgccaucgugagcugcuacggcaagaccaagugcaccgccagcaacaagaacagaggcaucaucaagaccuucagcaacggcugcgacuacgugagcaacaagggcguggacaccgugagcgugggcaacacccuguacugcgugaacaagcaggagggcaagagccuguacgugaagggcgagcccaucaucaacuucuacgacccccugguguuccccagcgacgaguucgacgccagcaucagccaggugaacgagaagaucaaccagagccuggccuucaucagaaagagcgacgagcugcugcacaacgugaacgccggcaagagcaccaccaacaucaugaucaccaccaucaucaucgugaucaucgugauccugcugagccugaucgccgugggccugcugcuguacugcaaggccagaugaggacuaguggaagcauuuuccuggcugauuaaaagaaauuacucagcuauggucaucuguuccuguuagaaggcuaugcagcauauuauauacuaugcgcauguuaugaaaugcauaauaaaaaauuuuaaaaaaucuaaaagaucuaaaaaaaaaaaaaaaaaaaaaaaaaaaaaaaaaaaaaaaaaaaaaaaaaaaaaaaaaaaaaaaaugcaucccccccccccccccccccccccccccccccaaaggcucuuuucagagccaccagaauu

SEQ ID NO: 5187 - RNA, 1910 nt, Artificial Sequence
  mRNA product Design f-2 comprising derived and/or modified sequence from HRSV(A2)__F-del_DSCav1_mut4 (opt5)
gggagagcggcucggccauuuugucccagucaguccggaggcugcggcugcagaaguaccgccugcggaguaacugcaaagaagcuuaccauggagcugcucauccugaaggccaacgcuauuaccacaauccuuacggccgugaccuucugcuuugcgagcggccagaauauuacagaagaguucuaccaauccaccuguucugcugucagcaaaggguaucuguccgcccucagaacaggaugguacaccucuguuaucacaauugaacugagcaacaucaaggagaauaaaugcaacggcaccgacgccaaggugaaacuuaucaagcaggaacuggauaaguauaaaaaugcugugacggagcuccagcugcugaugcaguccacccccgccacagggucuggaagcgcuauuuguuccggcgucgccgugugcaagguucuccaccuggagggggaagugaacaaaaucaagagcgcgcuucugucuaccaauaaagccgucgugucccucagcaacggaguuucugugcugacauuuaagguccuugaccugaagaauuacauugauaaacaacuccugccuauccugaacaagcaguccuguagcauuucuaauaucgagaccgugauugaguuccagcagaaaaacaaucggcuccuggaaaucacgcgcgaguuuuccgugaacgcuggcgucacaaccccgguuagcacauauaugcuuaccaauuccgaacugcucucucugaucaacgacaugcccauuaccaacgaucaaaagaaacuuaugagcaauaacgugcagaucgugagacagcaguccuacagcauuaugugcaucauuaaggaggaaguccuggccuaugugguucaacucccucuguacggcgugaucgacacacccuguuggaaacugcauacgucuccucucugcaccacaaauaccaaggagggguccaacaucugucugacacggaccgaucgcggaugguacugcgacaaugcuggcagcgucucuuucuuuccccaggccgaaacguguaaggugcagagcaacagaguuuucugcgauacaaugaacuccagaacccugccuucugaggugaaucucugcaaugucgacauuuuuaacccgaaauaugauuguaagaucaugaccagcaaaacagacguguccagcucugucauuaccucccugggggcgaucgugagcugcuacggaaagacaaaauguacggccucuaauaagaaccggggcauuaucaagaccuucuccaaugggugcgauuauguuagcaacaaaggaguggacacagucuccgugggcaauacccuuuacuguguuaacaagcaagagggcaaaucucuguaugugaagggggaacccaucauuaacuuuuacgacccucucgucuuccccagcgaugaguuugacgcuuccaucucucaggugaaugagaaaauuaaccagagccuggccuucauccgcaaguccgaugaacugcuccacaaugugaacgcuggaaagagcacaaccaauauuaugaucacgaccauuaucaucguuauuaucgucauucugcuuucucugaucgccgugggccuccugcuguauugcaaagccagaugaggacuaguggaagcauuuuccuggcugauuaaaagaaauuacucagcuauggucaucuguuccuguuagaaggcuaugcagcauauuauauacuaugcgcauguuaugaaaugcauaauaaaaaauuuuaaaaaaucuaaaagaucuaaaaaaaaaaaaaaaaaaaaaaaaaaaaaaaaaaaaaaaaaaaaaaaaaaaaaaaaaaaaaaaaugcaucccccccccccccccccccccccccccccccaaaggcucuuuucagagccaccagaauu

SEQ ID NO: 5188 - RNA, 1910 nt, Artificial Sequence
  mRNA product Design f-2 comprising derived and/or modified sequence from HRSV(A2)__F-del_DSCav1_mut4 (opt6)
gggagagcggcucggccauuuugucccagucaguccggaggcugcggcugcagaaguaccgccugcggaguaacugcaaagaagcuuaccauggaacuuuuaauacuaaaagcuaacgccauaaccacuauacuaacagcagucacauucugcuucgcaucaggccaaaacauaaccgaagaauuuuaccaauccacuuguucagcagucuccaaaggauauuuauccgcacuucguacaggaugguauacaucaguaauaacaauagaacucuccaacauaaaagaaaauaaaugcaacggcaccgacgcaaaaguaaaacucaucaaacaagaauuagacaaauacaagaacgccguaacagaacuacaauuacuaaugcaaucaacacccgccacaggaucaggaucugcaauaugcucuggaguagcaguaugcaaaguauuacaccuagaaggagaaguaaacaaaaucaaaagcgcacuacuauccacaaacaaagcuguaguaucacuaucaaacggaguaucaguauuaacuuucaaaguacuugaucuaaaaaacuacauagacaaacaacuacuacccauauuaaacaaacaaucaugcucaauaagcaauauagaaacaguaauagaauuucaacaaaaaaacaacagacuacuagaaaucacaagggaauuuucaguaaaugccgguguuacaaccccaguaucaacauacaugcuaacuaacucagaacuacuauccuuaauaaacgauaugccaauaacaaacgaucaaaaaaaacuaauguccaacaacguacaaauaguaagacaacaaucauacucaaucaugugcauuauaaaagaagaagucuuagcauacguaguacaauuaccacuauacgguguaauagauacaccauguuggaaauuacacacaagcccacuaugcacaacuaacacaaaagaaggcucaaauauauguuuaacaagaacagaccgagguugguacugcgacaaugcaggaucaguaucauucuuuccacaagcagaaacauguaaaguucaauccaacagaguauucugcgacacaaugaacuccagaacacuaccuucagaaguaaaccucuguaacguagacauauuuaaucccaaguacgacugcaaaauaaugacaucgaaaacagacguaagcuccucagugauaacaucccucggcgccaucguauccuguuacgguaaaacuaaauguaccgccucaaacaaaaaccgcgguauuauaaaaacuuuuucuaauggcugcgauuacguaagcaacaaaggcgucgacacaguuuccguaggaaacacacuauacugcguaaacaaacaagaagguaaaucucuauacguaaaaggagaaccaauaauaaauuucuaugauccuuuaguauucccauccgaugaauuugacgccucuaucucacaagucaacgaaaaaauaaaucaaucauuagcauucauacgaaaaucagacgaacuacuacacaacguaaacgcaggaaaaucaacaaccaacauaaugauaaccacaauaauaauaguuauuauagugauacuauuauccuuaauugcagucggacuauuauuauacuguaaagcacgcuaaggacuaguggaagcauuuuccuggcugauuaaaagaaauuacucagcuauggucaucuguuccuguuagaaggcuaugcagcauauuauauacuaugcgcauguuaugaaaugcauaauaaaaaauuuuaaaaaaucuaaaagaucuaaaaaaaaaaaaaaaaaaaaaaaaaaaaaaaaaaaaaaaaaaaaaaaaaaaaaaaaaaaaaaaaugcaucccccccccccccccccccccccccccccccaaaggcucuuuucagagccaccagaauu

SEQ ID NO: 5189 - RNA, 1910 nt, Artificial Sequence
  mRNA product Design f-2 comprising derived and/or modified sequence from HRSV(A2)__F-del_DSCav1_mut4 (opt11)
gggagagcggcucggccauuuugucccagucaguccggaggcugcggcugcagaaguaccgccugcggaguaacugcaaagaagcuuaccauggaacuccucauccucaaagccaaugccaucaccacaauccugacagcaguaaccuucugcuucgcauccggacaaaacaucaccgaagaauuuuaccagucaaccugcuccgcugucucaaaaggcuaccucucagcccuucgcaccggcugguacaccucggucauaacaauagaacucuccaauaucaaagaaaacaaaugcaacggcacugacgccaagguaaaacucaucaaacaggaacucgauaaauacaagaacgccguaacagaacuacaacuacucaugcaaucaacaccggccaccggcuccgguuccgccauaugcuccggaguggccgugugcaagguccuccaccuugaaggggaaguuaacaaaaucaaaucagcccuccucuccacuaacaaagccguaguaucccuaagcaacgguguauccguccucaccuucaaaguacuagaccuaaagaauuauaucgacaaacaacuccuccccauacucaacaaacaauccugcuccauaagcaacaucgaaacagucaucgaguuccagcagaaaaacaaccgacuccucgaaauaacccgcgaguucucagucaacgccggagucaccacacccgucagcaccuacaugcugaccaacuccgaacuccucuccuuaaucaaugacaugcccaucaccaaugaccaaaagaaacucaugucaaacaacguccaaauaguacgccaacaauccuacuccaucaugugcaucauaaaagaagaaguacucgccuacgucguccaacucccccucuacggcguaaucgacacccccugcuggaaacuacacacaagcccccucugcaccacaaacacuaaagagggcuccaacaucugucuaacccgcaccgaucgaggcugguacugcgacaacgccggaucugucucauucuucccccaagccgaaaccugcaaaguccaauccaaccgcgucuucugcgacaccaugaacucgagaacccucccuuccgaagucaaccuaugcaacgucgacauuuucaaccccaaauacgacugcaaaaucaugaccucgaaaaccgacguaucauccagcgucaucaccagccuaggcgcaaucgugagcugcuacggcaaaaccaaaugcaccgcgagcaauaaaaaccgcgggaucaucaaaacuuucuccaacggcugcgacuacgucuccaacaagggagucgauaccgucuccguaggcaacacccucuacugcgucaacaaacaagaaggcaaaucacuauacguaaaaggcgagccaaucauaaacuucuacgacccucuaguuuucccauccgacgaguucgacgcuagcaucucccaagucaacgagaaaaucaaccaaucccucgcauucauccgcaaauccgacgaacuccuccacaacguaaacgcaggcaaaucaacuacuaauauaaugaucacaaccaucauaauagucauaaucguaauccuccuaucccucaucgccgucggacuacugcucuacugcaaagcccgcuaaggacuaguggaagcauuuuccuggcugauuaaaagaaauuacucagcuauggucaucuguuccuguuagaaggcuaugcagcauauuauauacuaugcgcauguuaugaaaugcauaauaaaaaauuuuaaaaaaucuaaaagaucuaaaaaaaaaaaaaaaaaaaaaaaaaaaaaaaaaaaaaaaaaaaaaaaaaaaaaaaaaaaaaaaaugcaucccccccccccccccccccccccccccccccaaaggcucuuuucagagccaccagaauu

SEQ ID NO: 5190 - RNA, 1901 nt, Artificial Sequence
  mRNA product Design f-3 comprising derived and/or modified sequence from HRSV(A2)__F-del_DSCav1_mut4 (opt1)
gggagagucccgcagucggcguccagcggcucugcuuguucgugugugugucguugcaggccuuauucaagcuuaccauggagcugcucauccugaaggccaacgccaucaccaccauccugacggcggugaccuucugcuucgccagcggccagaacaucaccgaggaguucuaccaguccacgugcagcgccgucuccaagggguaccucagcgcccugcggaccggcugguacaccuccgugaucaccaucgagcugagcaacaucaaggagaacaagugcaacgggaccgacgccaaggugaagcucaucaagcaggagcuggacaaguacaagaacgcggucacggagcugcagcuccugaugcaguccaccccggcaaccggcuccggcuccgccaucugcagcggcgucgccgugugcaaggugcugcaccucgagggggaggucaacaagaucaagagcgcccugcuguccaccaacaaggccguggugagccucuccaacggcgucagcgugcugaccuucaaggugcuggaccucaagaacuacaucgacaagcagcugcugcccauccugaacaagcagagcugcuccaucagcaacaucgagacggugaucgaguuccagcagaagaacaaccggcuccuggagaucacccgcgaguucagcgugaacgccggggucaccacccccguguccacguacaugcugaccaacagcgagcuccugucccugaucaacgacaugccgaucaccaacgaccagaagaagcucaugagcaacaacgugcagaucguccggcagcaguccuacagcaucaugugcaucaucaaggaggaggugcuggcguacgugguccagcugccccucuacggcgugaucgacacccccugcuggaagcugcacacgagcccccugugcaccaccaacaccaaggagggguccaacaucugccucacgcgcaccgaccggggcugguacugcgacaacgccggcagcgucuccuucuucccgcaggccgagaccugcaaggugcagagcaaccgcguguucugcgacaccaugaacucccggacgcugcccagcgagguaaaccucugcaacgucgacaucuucaaccccaaguacgacugcaagaucaugaccuccaagaccgacgugagcuccagcgugaucaccucccugggggccaucgucagcugcuacggcaagacgaagugcaccgccagcaacaagaaccgggggaucaucaagaccuucuccaacggcugcgacuacgugagcaacaagggcguggacaccguguccgucgggaacacccuguacugcgugaacaagcaggagggcaagagccucuacgugaagggggagcccaucaucaacuucuacgacccgcuggucuuccccuccgacgaguucgacgcgagcaucucccaggugaacgagaagaucaaccagagccuggccuucauccgcaaguccgacgagcugcuccacaacgugaacgccggcaagagcacgaccaacaucaugaucaccaccaucaucaucgucaucaucgugauccugcugucccucaucgccguggggcugcugcucuacugcaaggcccggugaggacuaguacuggcugcaucucccuuuccucuguccuccauccuucucccaggauggugaagggggaccugguacccagugauccccaccccaggauccuaaaucaugacuuaccugcuaauaaaaacucauuggaaaagugagaagaucuaaaaaaaaaaaaaaaaaaaaaaaaaaaaaaaaaaaaaaaaaaaaaaaaaaaaaaaaaaaaaaaaugcaucccccccccccccccccccccccccccccccaaaggcucuuuucagagccaccagaauu

SEQ ID NO: 5191 - RNA, 1901 nt, Artificial Sequence
  mRNA product Design f-3 comprising derived and/or modified sequence from HRSV(A2)__F-del_DSCav1_mut4 (opt1)
gggagagucccgcagucggcguccagcggcucugcuuguucgugugugugucguugcaggccuuauucaagcuuaccauggagcugcucauccugaaggccaacgccaucaccaccauccugacggcggugaccuucugcuucgccagcggccagaacaucaccgaggaguucuaccaguccacgugcagcgccgucuccaagggguaccucagcgcccugcgcaccggcugguacaccuccgugaucaccaucgagcugagcaacaucaaggagaacaagugcaacgggaccgacgccaaggugaagcucaucaagcaggagcuggacaaguacaagaacgcggucacggagcugcagcuccugaugcaguccacccccgccaccggcagcggguccgccaucugcagcggcguggccgugugcaagguccugcaccucgagggcgaggugaacaagaucaaguccgcgcugcugagcaccaacaaggccguggucucccucagcaacgggguguccgugcugacguucaagguccuggaccucaagaacuacaucgacaagcagcugcugccgauccucaacaagcagagcugcuccaucagcaacaucgagaccgugaucgaguuccagcagaagaacaaccggcugcuggagaucacccgcgaguucuccgugaacgccggcgucaccacgcccgugagcaccuacaugcucaccaacagcgagcugcugucccucaucaacgacaugcccaucaccaacgaccagaagaagcugaugagcaacaacgugcagaucguccggcagcaguccuacagcaucaugugcaucaucaaggaggaggugcuggccuacgugguccagcucccccuguacggggugaucgacacgccgugcuggaagcugcacaccagcccccucugcaccaccaacacgaaggagggcuccaacaucugccugacccgcaccgaccgggggugguacugcgacaacgccggcuccgugagcuucuucccccaggcggagaccugcaagguccaguccaaccgcguguucugcgacacgaugaacagccggacccuccccuccgaggucaaccugugcaacguggacaucuucaacccgaaguacgacugcaagaucaugaccagcaagaccgacguguccagcuccgucaucacgagccugggcgccaucguguccugcuacgggaagaccaagugcaccgccagcaacaagaaccggggcaucaucaagaccuucuccaacgggugcgacuacgugagcaacaagggcgucgacacggugagcgugggcaacacccucuacugcgucaacaagcaggaggggaagucccuguacgugaagggcgagcccaucaucaacuucuacgacccccugguguuccccagcgacgaguucgacgccuccaucagccaggucaacgagaagaucaaccagucccucgccuucauccgcaagagcgacgagcugcugcacaacgugaacgcggggaaguccaccaccaacaucaugaucaccacgaucaucaucgugaucaucgucauccuccugagccugaucgccgugggccuccugcuguacugcaaggcccggugaggacuaguacuggcugcaucucccuuuccucuguccuccauccuucucccaggauggugaagggggaccugguacccagugauccccaccccaggauccuaaaucaugacuuaccugcuaauaaaaacucauuggaaaagugagaagaucuaaaaaaaaaaaaaaaaaaaaaaaaaaaaaaaaaaaaaaaaaaaaaaaaaaaaaaaaaaaaaaaaugcaucccccccccccccccccccccccccccccccaaaggcucuuuucagagccaccagaauu

SEQ ID NO: 5192 - RNA, 1901 nt, Artificial Sequence
  mRNA product Design f-3 comprising derived and/or modified sequence from HRSV(A2)__F-del_DSCav1_mut4 (opt2)
gggagagucccgcagucggcguccagcggcucugcuuguucgugugugugucguugcaggccuuauucaagcuuaccauggagcuccucauccucaaggccaacgccaucaccaccauccucaccgccgucaccuucugcuucgccuccggccagaacaucaccgaggaguucuaccaguccaccugcuccgccgucuccaagggcuaccucuccgcccuccgcaccggcugguacaccuccgucaucaccaucgagcucuccaacaucaaggagaacaagugcaacggcaccgacgccaaggucaagcucaucaagcaggagcucgacaaguacaagaacgccgucaccgagcuccagcuccucaugcaguccacccccgccaccggcuccggcuccgccaucugcuccggcgucgccgucugcaagguccuccaccucgagggcgaggucaacaagaucaaguccgcccuccucuccaccaacaaggccgucgucucccucuccaacggcgucuccguccucaccuucaagguccucgaccucaagaacuacaucgacaagcagcuccuccccauccucaacaagcaguccugcuccaucuccaacaucgagaccgucaucgaguuccagcagaagaacaaccgccuccucgagaucacccgcgaguucuccgucaacgccggcgucaccacccccgucuccaccuacaugcucaccaacuccgagcuccucucccucaucaacgacaugcccaucaccaacgaccagaagaagcucauguccaacaacguccagaucguccgccagcaguccuacuccaucaugugcaucaucaaggaggagguccucgccuacgucguccagcucccccucuacggcgucaucgacacccccugcuggaagcuccacaccuccccccucugcaccaccaacaccaaggagggcuccaacaucugccucacccgcaccgaccgcggcugguacugcgacaacgccggcuccgucuccuucuucccccaggccgagaccugcaagguccaguccaaccgcgucuucugcgacaccaugaacucccgcacccuccccuccgaggucaaccucugcaacgucgacaucuucaaccccaaguacgacugcaagaucaugaccuccaagaccgacgucuccuccuccgucaucaccucccucggcgccaucgucuccugcuacggcaagaccaagugcaccgccuccaacaagaaccgcggcaucaucaagaccuucuccaacggcugcgacuacgucuccaacaagggcgucgacaccgucuccgucggcaacacccucuacugcgucaacaagcaggagggcaagucccucuacgucaagggcgagcccaucaucaacuucuacgacccccucgucuuccccuccgacgaguucgacgccuccaucucccaggucaacgagaagaucaaccagucccucgccuucauccgcaaguccgacgagcuccuccacaacgucaacgccggcaaguccaccaccaacaucaugaucaccaccaucaucaucgucaucaucgucauccuccucucccucaucgccgucggccuccuccucuacugcaaggcccgcugaggacuaguacuggcugcaucucccuuuccucuguccuccauccuucucccaggauggugaagggggaccugguacccagugauccccaccccaggauccuaaaucaugacuuaccugcuaauaaaaacucauuggaaaagugagaagaucuaaaaaaaaaaaaaaaaaaaaaaaaaaaaaaaaaaaaaaaaaaaaaaaaaaaaaaaaaaaaaaaaugcaucccccccccccccccccccccccccccccccaaaggcucuuuucagagccaccagaauu

SEQ ID NO: 5193 - RNA, 1901 nt, Artificial Sequence
  mRNA product Design f-3 comprising derived and/or modified sequence from HRSV(A2)__F-del_DSCav1_mut4 (opt3)
gggagagucccgcagucggcguccagcggcucugcuuguucgugugugugucguugcaggccuuauucaagcuuaccauggagcugcucauccuuaaggccaacgcuauuaccacaauacugacugcagugacguucugcuuugccagcggccagaauaucaccgaagaguucuaccaauccacauguucugcggucucaaaaggguauuugagugcuuuaagaacuggaugguacaccagcguuauuacaaucgaacuguccaacauuaaggagaauaaaugcaacgguaccgacgccaaggugaaacuaaucaagcaggaacucgauaaguauaaaaaugcaguaacugagcugcagcuucugaugcagucuacacccgccaccggcucggggucagcuauauguagcggaguggcagucugcaagguguugcaccucgagggcgaaguuaacaaaaucaagagugcccugcuguccacgaauaaagcuguggucucucucagcaacgguguguccguauuaacuuuuaagguucuggaccuuaagaauuacauugauaaacaauugcugccuauccuaaacaagcagucauguaguauuagcaauaucgagaccgugauagaguuccagcagaaaaacaauaggcuccuggaaauuacacgggaguuuucugucaacgccggggugacuaccccaguguccacauauaugcuuaccaauucagaacuguugagccucaucaacgacaugccgauuacgaacgaucaaaagaaacugaugaguaauaacguccagaucguucgccagcagucuuacuccaucaugugcauuauaaaggaggaaguguuagcguauguagugcaacugccccucuacggagucaucgacacuccuuguuggaaacuucauacaagcccacugugcaccacuaauacaaaggagggcucgaacauuuguuugacccgaacggaucguggcugguacugcgacaaugcagggucuguguccuucuuuccccaggccgaaaccuguaagguucagucaaacagaguguucugcgauacaaugaauaguagaacucugccuagcgaggucaaccucugcaauguggacaucuuuaacccaaaauaugauuguaagauaaugaccuccaaaacagacguaucuagcucaguuauuaccagucugggagcuaucguguccugcuacgguaagacuaaauguacagccagcaauaagaacaggggcaucauuaagaccuucucuaaugggugcgauuaugucucaaacaaaggaguggacacugucagugugggcaauacgcuuuacuguguuaacaagcaagaggguaaaagccuguaugugaagggggaacccaucauuaacuuuuacgacccuuugguauucccauccgaugaguuugacgcaucuauaucgcaggucaaugagaaaaucaaccagagccucgcuuucauucggaaguccgaugaacuguuacacaaugugaacgccggaaagucaacaaccaauaucaugaucacuaccauuauaaucguuauuaucgugauucugcuaagucucaucgcggucggccugcuuuuguauugcaaagcccgcugaggacuaguacuggcugcaucucccuuuccucuguccuccauccuucucccaggauggugaagggggaccugguacccagugauccccaccccaggauccuaaaucaugacuuaccugcuaauaaaaacucauuggaaaagugagaagaucuaaaaaaaaaaaaaaaaaaaaaaaaaaaaaaaaaaaaaaaaaaaaaaaaaaaaaaaaaaaaaaaaugcaucccccccccccccccccccccccccccccccaaaggcucuuuucagagccaccagaauu

SEQ ID NO: 5194 - RNA, 1901 nt, Artificial Sequence
  mRNA product Design f-3 comprising derived and/or modified sequence from HRSV(A2)__F-del_DSCav1_mut4 (opt4)
gggagagucccgcagucggcguccagcggcucugcuuguucgugugugugucguugcaggccuuauucaagcuuaccauggagcugcugauccugaaggccaacgccaucaccaccauccugaccgccgugaccuucugcuucgccagcggccagaacaucaccgaggaguucuaccagagcaccugcagcgccgugagcaagggcuaccugagcgcccugagaaccggcugguacaccagcgugaucaccaucgagcugagcaacaucaaggagaacaagugcaacggcaccgacgccaaggugaagcugaucaagcaggagcuggacaaguacaagaacgccgugaccgagcugcagcugcugaugcagagcacccccgccaccggcagcggcagcgccaucugcagcggcguggccgugugcaaggugcugcaccuggagggcgaggugaacaagaucaagagcgcccugcugagcaccaacaaggccguggugagccugagcaacggcgugagcgugcugaccuucaaggugcuggaccugaagaacuacaucgacaagcagcugcugcccauccugaacaagcagagcugcagcaucagcaacaucgagaccgugaucgaguuccagcagaagaacaacagacugcuggagaucaccagagaguucagcgugaacgccggcgugaccacccccgugagcaccuacaugcugaccaacagcgagcugcugagccugaucaacgacaugcccaucaccaacgaccagaagaagcugaugagcaacaacgugcagaucgugagacagcagagcuacagcaucaugugcaucaucaaggaggaggugcuggccuacguggugcagcugccccuguacggcgugaucgacacccccugcuggaagcugcacaccagcccccugugcaccaccaacaccaaggagggcagcaacaucugccugaccagaaccgacagaggcugguacugcgacaacgccggcagcgugagcuucuucccccaggccgagaccugcaaggugcagagcaacagaguguucugcgacaccaugaacagcagaacccugcccagcgaggugaaccugugcaacguggacaucuucaaccccaaguacgacugcaagaucaugaccagcaagaccgacgugagcagcagcgugaucaccagccugggcgccaucgugagcugcuacggcaagaccaagugcaccgccagcaacaagaacagaggcaucaucaagaccuucagcaacggcugcgacuacgugagcaacaagggcguggacaccgugagcgugggcaacacccuguacugcgugaacaagcaggagggcaagagccuguacgugaagggcgagcccaucaucaacuucuacgacccccugguguuccccagcgacgaguucgacgccagcaucagccaggugaacgagaagaucaaccagagccuggccuucaucagaaagagcgacgagcugcugcacaacgugaacgccggcaagagcaccaccaacaucaugaucaccaccaucaucaucgugaucaucgugauccugcugagccugaucgccgugggccugcugcuguacugcaaggccagaugaggacuaguacuggcugcaucucccuuuccucuguccuccauccuucucccaggauggugaagggggaccugguacccagugauccccaccccaggauccuaaaucaugacuuaccugcuaauaaaaacucauuggaaaagugagaagaucuaaaaaaaaaaaaaaaaaaaaaaaaaaaaaaaaaaaaaaaaaaaaaaaaaaaaaaaaaaaaaaaaugcaucccccccccccccccccccccccccccccccaaaggcucuuuucagagccaccagaauu

SEQ ID NO: 5195 - RNA, 1901 nt, Artificial Sequence
  mRNA product Design f-3 comprising derived and/or modified sequence from HRSV(A2)__F-del_DSCav1_mut4 (opt5)
gggagagucccgcagucggcguccagcggcucugcuuguucgugugugugucguugcaggccuuauucaagcuuaccauggagcugcucauccugaaggccaacgcuauuaccacaauccuuacggccgugaccuucugcuuugcgagcggccagaauauuacagaagaguucuaccaauccaccuguucugcugucagcaaaggguaucuguccgcccucagaacaggaugguacaccucuguuaucacaauugaacugagcaacaucaaggagaauaaaugcaacggcaccgacgccaaggugaaacuuaucaagcaggaacuggauaaguauaaaaaugcugugacggagcuccagcugcugaugcaguccacccccgccacagggucuggaagcgcuauuuguuccggcgucgccgugugcaagguucuccaccuggagggggaagugaacaaaaucaagagcgcgcuucugucuaccaauaaagccgucgugucccucagcaacggaguuucugugcugacauuuaagguccuugaccugaagaauuacauugauaaacaacuccugccuauccugaacaagcaguccuguagcauuucuaauaucgagaccgugauugaguuccagcagaaaaacaaucggcuccuggaaaucacgcgcgaguuuuccgugaacgcuggcgucacaaccccgguuagcacauauaugcuuaccaauuccgaacugcucucucugaucaacgacaugcccauuaccaacgaucaaaagaaacuuaugagcaauaacgugcagaucgugagacagcaguccuacagcauuaugugcaucauuaaggaggaaguccuggccuaugugguucaacucccucuguacggcgugaucgacacacccuguuggaaacugcauacgucuccucucugcaccacaaauaccaaggagggguccaacaucugucugacacggaccgaucgcggaugguacugcgacaaugcuggcagcgucucuuucuuuccccaggccgaaacguguaaggugcagagcaacagaguuuucugcgauacaaugaacuccagaacccugccuucugaggugaaucucugcaaugucgacauuuuuaacccgaaauaugauuguaagaucaugaccagcaaaacagacguguccagcucugucauuaccucccugggggcgaucgugagcugcuacggaaagacaaaauguacggccucuaauaagaaccggggcauuaucaagaccuucuccaaugggugcgauuauguuagcaacaaaggaguggacacagucuccgugggcaauacccuuuacuguguuaacaagcaagagggcaaaucucuguaugugaagggggaacccaucauuaacuuuuacgacccucucgucuuccccagcgaugaguuugacgcuuccaucucucaggugaaugagaaaauuaaccagagccuggccuucauccgcaaguccgaugaacugcuccacaaugugaacgcuggaaagagcacaaccaauauuaugaucacgaccauuaucaucguuauuaucgucauucugcuuucucugaucgccgugggccuccugcuguauugcaaagccagaugaggacuaguacuggcugcaucucccuuuccucuguccuccauccuucucccaggauggugaagggggaccugguacccagugauccccaccccaggauccuaaaucaugacuuaccugcuaauaaaaacucauuggaaaagugagaagaucuaaaaaaaaaaaaaaaaaaaaaaaaaaaaaaaaaaaaaaaaaaaaaaaaaaaaaaaaaaaaaaaaugcaucccccccccccccccccccccccccccccccaaaggcucuuuucagagccaccagaauu

SEQ ID NO: 5196 - RNA, 1901 nt, Artificial Sequence
  mRNA product Design f-3 comprising derived and/or modified sequence from HRSV(A2)__F-del_DSCav1_mut4 (opt6)
gggagagucccgcagucggcguccagcggcucugcuuguucgugugugugucguugcaggccuuauucaagcuuaccauggaacuuuuaauacuaaaagcuaacgccauaaccacuauacuaacagcagucacauucugcuucgcaucaggccaaaacauaaccgaagaauuuuaccaauccacuuguucagcagucuccaaaggauauuuauccgcacuucguacaggaugguauacaucaguaauaacaauagaacucuccaacauaaaagaaaauaaaugcaacggcaccgacgcaaaaguaaaacucaucaaacaagaauuagacaaauacaagaacgccguaacagaacuacaauuacuaaugcaaucaacacccgccacaggaucaggaucugcaauaugcucuggaguagcaguaugcaaaguauuacaccuagaaggagaaguaaacaaaaucaaaagcgcacuacuauccacaaacaaagcuguaguaucacuaucaaacggaguaucaguauuaacuuucaaaguacuugaucuaaaaaacuacauagacaaacaacuacuacccauauuaaacaaacaaucaugcucaauaagcaauauagaaacaguaauagaauuucaacaaaaaaacaacagacuacuagaaaucacaagggaauuuucaguaaaugccgguguuacaaccccaguaucaacauacaugcuaacuaacucagaacuacuauccuuaauaaacgauaugccaauaacaaacgaucaaaaaaaacuaauguccaacaacguacaaauaguaagacaacaaucauacucaaucaugugcauuauaaaagaagaagucuuagcauacguaguacaauuaccacuauacgguguaauagauacaccauguuggaaauuacacacaagcccacuaugcacaacuaacacaaaagaaggcucaaauauauguuuaacaagaacagaccgagguugguacugcgacaaugcaggaucaguaucauucuuuccacaagcagaaacauguaaaguucaauccaacagaguauucugcgacacaaugaacuccagaacacuaccuucagaaguaaaccucuguaacguagacauauuuaaucccaaguacgacugcaaaauaaugacaucgaaaacagacguaagcuccucagugauaacaucccucggcgccaucguauccuguuacgguaaaacuaaauguaccgccucaaacaaaaaccgcgguauuauaaaaacuuuuucuaauggcugcgauuacguaagcaacaaaggcgucgacacaguuuccguaggaaacacacuauacugcguaaacaaacaagaagguaaaucucuauacguaaaaggagaaccaauaauaaauuucuaugauccuuuaguauucccauccgaugaauuugacgccucuaucucacaagucaacgaaaaaauaaaucaaucauuagcauucauacgaaaaucagacgaacuacuacacaacguaaacgcaggaaaaucaacaaccaacauaaugauaaccacaauaauaauaguuauuauagugauacuauuauccuuaauugcagucggacuauuauuauacuguaaagcacgcuaaggacuaguacuggcugcaucucccuuuccucuguccuccauccuucucccaggauggugaagggggaccugguacccagugauccccaccccaggauccuaaaucaugacuuaccugcuaauaaaaacucauuggaaaagugagaagaucuaaaaaaaaaaaaaaaaaaaaaaaaaaaaaaaaaaaaaaaaaaaaaaaaaaaaaaaaaaaaaaaaugcaucccccccccccccccccccccccccccccccaaaggcucuuuucagagccaccagaauu

SEQ ID NO: 5197 - RNA, 1901 nt, Artificial Sequence
  mRNA product Design f-3 comprising derived and/or modified sequence from HRSV(A2)__F-del_DSCav1_mut4 (opt11)
gggagagucccgcagucggcguccagcggcucugcuuguucgugugugugucguugcaggccuuauucaagcuuaccauggaacuccucauccucaaagccaaugccaucaccacaauccugacagcaguaaccuucugcuucgcauccggacaaaacaucaccgaagaauuuuaccagucaaccugcuccgcugucucaaaaggcuaccucucagcccuucgcaccggcugguacaccucggucauaacaauagaacucuccaauaucaaagaaaacaaaugcaacggcacugacgccaagguaaaacucaucaaacaggaacucgauaaauacaagaacgccguaacagaacuacaacuacucaugcaaucaacaccggccaccggcuccgguuccgccauaugcuccggaguggccgugugcaagguccuccaccuugaaggggaaguuaacaaaaucaaaucagcccuccucuccacuaacaaagccguaguaucccuaagcaacgguguauccguccucaccuucaaaguacuagaccuaaagaauuauaucgacaaacaacuccuccccauacucaacaaacaauccugcuccauaagcaacaucgaaacagucaucgaguuccagcagaaaaacaaccgacuccucgaaauaacccgcgaguucucagucaacgccggagucaccacacccgucagcaccuacaugcugaccaacuccgaacuccucuccuuaaucaaugacaugcccaucaccaaugaccaaaagaaacucaugucaaacaacguccaaauaguacgccaacaauccuacuccaucaugugcaucauaaaagaagaaguacucgccuacgucguccaacucccccucuacggcguaaucgacacccccugcuggaaacuacacacaagcccccucugcaccacaaacacuaaagagggcuccaacaucugucuaacccgcaccgaucgaggcugguacugcgacaacgccggaucugucucauucuucccccaagccgaaaccugcaaaguccaauccaaccgcgucuucugcgacaccaugaacucgagaacccucccuuccgaagucaaccuaugcaacgucgacauuuucaaccccaaauacgacugcaaaaucaugaccucgaaaaccgacguaucauccagcgucaucaccagccuaggcgcaaucgugagcugcuacggcaaaaccaaaugcaccgcgagcaauaaaaaccgcgggaucaucaaaacuuucuccaacggcugcgacuacgucuccaacaagggagucgauaccgucuccguaggcaacacccucuacugcgucaacaaacaagaaggcaaaucacuauacguaaaaggcgagccaaucauaaacuucuacgacccucuaguuuucccauccgacgaguucgacgcuagcaucucccaagucaacgagaaaaucaaccaaucccucgcauucauccgcaaauccgacgaacuccuccacaacguaaacgcaggcaaaucaacuacuaauauaaugaucacaaccaucauaauagucauaaucguaauccuccuaucccucaucgccgucggacuacugcucuacugcaaagcccgcuaaggacuaguacuggcugcaucucccuuuccucuguccuccauccuucucccaggauggugaagggggaccugguacccagugauccccaccccaggauccuaaaucaugacuuaccugcuaauaaaaacucauuggaaaagugagaagaucuaaaaaaaaaaaaaaaaaaaaaaaaaaaaaaaaaaaaaaaaaaaaaaaaaaaaaaaaaaaaaaaaugcaucccccccccccccccccccccccccccccccaaaggcucuuuucagagccaccagaauu

SEQ ID NO: 5198 - RNA, 2117 nt, Artificial Sequence
  mRNA product Design f-4 comprising derived and/or modified sequence from HRSV(A2)__F-del_DSCav1_mut4 (opt1)
gggagagucccgcagucggcguccagcggcucugcuuguucgugugugugucguugcaggccuuauucaagcuuaccauggagcugcucauccugaaggccaacgccaucaccaccauccugacggcggugaccuucugcuucgccagcggccagaacaucaccgaggaguucuaccaguccacgugcagcgccgucuccaagggguaccucagcgcccugcggaccggcugguacaccuccgugaucaccaucgagcugagcaacaucaaggagaacaagugcaacgggaccgacgccaaggugaagcucaucaagcaggagcuggacaaguacaagaacgcggucacggagcugcagcuccugaugcaguccaccccggcaaccggcuccggcuccgccaucugcagcggcgucgccgugugcaaggugcugcaccucgagggggaggucaacaagaucaagagcgcccugcuguccaccaacaaggccguggugagccucuccaacggcgucagcgugcugaccuucaaggugcuggaccucaagaacuacaucgacaagcagcugcugcccauccugaacaagcagagcugcuccaucagcaacaucgagacggugaucgaguuccagcagaagaacaaccggcuccuggagaucacccgcgaguucagcgugaacgccggggucaccacccccguguccacguacaugcugaccaacagcgagcuccugucccugaucaacgacaugccgaucaccaacgaccagaagaagcucaugagcaacaacgugcagaucguccggcagcaguccuacagcaucaugugcaucaucaaggaggaggugcuggcguacgugguccagcugccccucuacggcgugaucgacacccccugcuggaagcugcacacgagcccccugugcaccaccaacaccaaggagggguccaacaucugccucacgcgcaccgaccggggcugguacugcgacaacgccggcagcgucuccuucuucccgcaggccgagaccugcaaggugcagagcaaccgcguguucugcgacaccaugaacucccggacgcugcccagcgagguaaaccucugcaacgucgacaucuucaaccccaaguacgacugcaagaucaugaccuccaagaccgacgugagcuccagcgugaucaccucccugggggccaucgucagcugcuacggcaagacgaagugcaccgccagcaacaagaaccgggggaucaucaagaccuucuccaacggcugcgacuacgugagcaacaagggcguggacaccguguccgucgggaacacccuguacugcgugaacaagcaggagggcaagagccucuacgugaagggggagcccaucaucaacuucuacgacccgcuggucuuccccuccgacgaguucgacgcgagcaucucccaggugaacgagaagaucaaccagagccuggccuucauccgcaaguccgacgagcugcuccacaacgugaacgccggcaagagcacgaccaacaucaugaucaccaccaucaucaucgucaucaucgugauccugcugucccucaucgccguggggcugcugcucuacugcaaggcccggugaggacuagugaagggaacacccaaauuuaauucagccuuaagcacaauuaauuaagagugaaacguaauuguacaagcaguuggucacccaccauagggcaugaucaacaccgcaaccuuuccuuuuucccccagugauucugaaaaaccccucuucccuucagcuugcuuagauguuccaaauuuaguaagcuuaaggcggccuacagaagaaaaagaaaaaaaaggccacaaaaguucccucucacuuucaguaaauaaaauaaaagcagcaacagaaauaaagaaauaaaugaaauucaaaaugaaauaaauauuguguugugcagcauuaaaaaaucaauaaaaauuaaaaaugagcaagaucuaaaaaaaaaaaaaaaaaaaaaaaaaaaaaaaaaaaaaaaaaaaaaaaaaaaaaaaaaaaaaaaaugcaucccccccccccccccccccccccccccccccaaaggcucuuuucagagccaccagaauu

SEQ ID NO: 5199 - RNA, 2117 nt, Artificial Sequence
  mRNA product Design f-4 comprising derived and/or modified sequence from HRSV(A2)__F-del_DSCav1_mut4 (opt1)
gggagagucccgcagucggcguccagcggcucugcuuguucgugugugugucguugcaggccuuauucaagcuuaccauggagcugcucauccugaaggccaacgccaucaccaccauccugacggcggugaccuucugcuucgccagcggccagaacaucaccgaggaguucuaccaguccacgugcagcgccgucuccaagggguaccucagcgcccugcgcaccggcugguacaccuccgugaucaccaucgagcugagcaacaucaaggagaacaagugcaacgggaccgacgccaaggugaagcucaucaagcaggagcuggacaaguacaagaacgcggucacggagcugcagcuccugaugcaguccacccccgccaccggcagcggguccgccaucugcagcggcguggccgugugcaagguccugcaccucgagggcgaggugaacaagaucaaguccgcgcugcugagcaccaacaaggccguggucucccucagcaacgggguguccgugcugacguucaagguccuggaccucaagaacuacaucgacaagcagcugcugccgauccucaacaagcagagcugcuccaucagcaacaucgagaccgugaucgaguuccagcagaagaacaaccggcugcuggagaucacccgcgaguucuccgugaacgccggcgucaccacgcccgugagcaccuacaugcucaccaacagcgagcugcugucccucaucaacgacaugcccaucaccaacgaccagaagaagcugaugagcaacaacgugcagaucguccggcagcaguccuacagcaucaugugcaucaucaaggaggaggugcuggccuacgugguccagcucccccuguacggggugaucgacacgccgugcuggaagcugcacaccagcccccucugcaccaccaacacgaaggagggcuccaacaucugccugacccgcaccgaccgggggugguacugcgacaacgccggcuccgugagcuucuucccccaggcggagaccugcaagguccaguccaaccgcguguucugcgacacgaugaacagccggacccuccccuccgaggucaaccugugcaacguggacaucuucaacccgaaguacgacugcaagaucaugaccagcaagaccgacguguccagcuccgucaucacgagccugggcgccaucguguccugcuacgggaagaccaagugcaccgccagcaacaagaaccggggcaucaucaagaccuucuccaacgggugcgacuacgugagcaacaagggcgucgacacggugagcgugggcaacacccucuacugcgucaacaagcaggaggggaagucccuguacgugaagggcgagcccaucaucaacuucuacgacccccugguguuccccagcgacgaguucgacgccuccaucagccaggucaacgagaagaucaaccagucccucgccuucauccgcaagagcgacgagcugcugcacaacgugaacgcggggaaguccaccaccaacaucaugaucaccacgaucaucaucgugaucaucgucauccuccugagccugaucgccgugggccuccugcuguacugcaaggcccggugaggacuagugaagggaacacccaaauuuaauucagccuuaagcacaauuaauuaagagugaaacguaauuguacaagcaguuggucacccaccauagggcaugaucaacaccgcaaccuuuccuuuuucccccagugauucugaaaaaccccucuucccuucagcuugcuuagauguuccaaauuuaguaagcuuaaggcggccuacagaagaaaaagaaaaaaaaggccacaaaaguucccucucacuuucaguaaauaaaauaaaagcagcaacagaaauaaagaaauaaaugaaauucaaaaugaaauaaauauuguguugugcagcauuaaaaaaucaauaaaaauuaaaaaugagcaagaucuaaaaaaaaaaaaaaaaaaaaaaaaaaaaaaaaaaaaaaaaaaaaaaaaaaaaaaaaaaaaaaaaugcaucccccccccccccccccccccccccccccccaaaggcucuuuucagagccaccagaauu

SEQ ID NO: 5200 - RNA, 2117 nt, Artificial Sequence
  mRNA product Design f-4 comprising derived and/or modified sequence from HRSV(A2)__F-del_DSCav1_mut4 (opt2)
gggagagucccgcagucggcguccagcggcucugcuuguucgugugugugucguugcaggccuuauucaagcuuaccauggagcuccucauccucaaggccaacgccaucaccaccauccucaccgccgucaccuucugcuucgccuccggccagaacaucaccgaggaguucuaccaguccaccugcuccgccgucuccaagggcuaccucuccgcccuccgcaccggcugguacaccuccgucaucaccaucgagcucuccaacaucaaggagaacaagugcaacggcaccgacgccaaggucaagcucaucaagcaggagcucgacaaguacaagaacgccgucaccgagcuccagcuccucaugcaguccacccccgccaccggcuccggcuccgccaucugcuccggcgucgccgucugcaagguccuccaccucgagggcgaggucaacaagaucaaguccgcccuccucuccaccaacaaggccgucgucucccucuccaacggcgucuccguccucaccuucaagguccucgaccucaagaacuacaucgacaagcagcuccuccccauccucaacaagcaguccugcuccaucuccaacaucgagaccgucaucgaguuccagcagaagaacaaccgccuccucgagaucacccgcgaguucuccgucaacgccggcgucaccacccccgucuccaccuacaugcucaccaacuccgagcuccucucccucaucaacgacaugcccaucaccaacgaccagaagaagcucauguccaacaacguccagaucguccgccagcaguccuacuccaucaugugcaucaucaaggaggagguccucgccuacgucguccagcucccccucuacggcgucaucgacacccccugcuggaagcuccacaccuccccccucugcaccaccaacaccaaggagggcuccaacaucugccucacccgcaccgaccgcggcugguacugcgacaacgccggcuccgucuccuucuucccccaggccgagaccugcaagguccaguccaaccgcgucuucugcgacaccaugaacucccgcacccuccccuccgaggucaaccucugcaacgucgacaucuucaaccccaaguacgacugcaagaucaugaccuccaagaccgacgucuccuccuccgucaucaccucccucggcgccaucgucuccugcuacggcaagaccaagugcaccgccuccaacaagaaccgcggcaucaucaagaccuucuccaacggcugcgacuacgucuccaacaagggcgucgacaccgucuccgucggcaacacccucuacugcgucaacaagcaggagggcaagucccucuacgucaagggcgagcccaucaucaacuucuacgacccccucgucuuccccuccgacgaguucgacgccuccaucucccaggucaacgagaagaucaaccagucccucgccuucauccgcaaguccgacgagcuccuccacaacgucaacgccggcaaguccaccaccaacaucaugaucaccaccaucaucaucgucaucaucgucauccuccucucccucaucgccgucggccuccuccucuacugcaaggcccgcugaggacuagugaagggaacacccaaauuuaauucagccuuaagcacaauuaauuaagagugaaacguaauuguacaagcaguuggucacccaccauagggcaugaucaacaccgcaaccuuuccuuuuucccccagugauucugaaaaaccccucuucccuucagcuugcuuagauguuccaaauuuaguaagcuuaaggcggccuacagaagaaaaagaaaaaaaaggccacaaaaguucccucucacuuucaguaaauaaaauaaaagcagcaacagaaauaaagaaauaaaugaaauucaaaaugaaauaaauauuguguugugcagcauuaaaaaaucaauaaaaauuaaaaaugagcaagaucuaaaaaaaaaaaaaaaaaaaaaaaaaaaaaaaaaaaaaaaaaaaaaaaaaaaaaaaaaaaaaaaaugcaucccccccccccccccccccccccccccccccaaaggcucuuuucagagccaccagaauu

SEQ ID NO: 5201 - RNA, 2117 nt, Artificial Sequence
  mRNA product Design f-4 comprising derived and/or modified sequence from HRSV(A2)__F-del_DSCav1_mut4 (opt3)
gggagagucccgcagucggcguccagcggcucugcuuguucgugugugugucguugcaggccuuauucaagcuuaccauggagcugcucauccuuaaggccaacgcuauuaccacaauacugacugcagugacguucugcuuugccagcggccagaauaucaccgaagaguucuaccaauccacauguucugcggucucaaaaggguauuugagugcuuuaagaacuggaugguacaccagcguuauuacaaucgaacuguccaacauuaaggagaauaaaugcaacgguaccgacgccaaggugaaacuaaucaagcaggaacucgauaaguauaaaaaugcaguaacugagcugcagcuucugaugcagucuacacccgccaccggcucggggucagcuauauguagcggaguggcagucugcaagguguugcaccucgagggcgaaguuaacaaaaucaagagugcccugcuguccacgaauaaagcuguggucucucucagcaacgguguguccguauuaacuuuuaagguucuggaccuuaagaauuacauugauaaacaauugcugccuauccuaaacaagcagucauguaguauuagcaauaucgagaccgugauagaguuccagcagaaaaacaauaggcuccuggaaauuacacgggaguuuucugucaacgccggggugacuaccccaguguccacauauaugcuuaccaauucagaacuguugagccucaucaacgacaugccgauuacgaacgaucaaaagaaacugaugaguaauaacguccagaucguucgccagcagucuuacuccaucaugugcauuauaaaggaggaaguguuagcguauguagugcaacugccccucuacggagucaucgacacuccuuguuggaaacuucauacaagcccacugugcaccacuaauacaaaggagggcucgaacauuuguuugacccgaacggaucguggcugguacugcgacaaugcagggucuguguccuucuuuccccaggccgaaaccuguaagguucagucaaacagaguguucugcgauacaaugaauaguagaacucugccuagcgaggucaaccucugcaauguggacaucuuuaacccaaaauaugauuguaagauaaugaccuccaaaacagacguaucuagcucaguuauuaccagucugggagcuaucguguccugcuacgguaagacuaaauguacagccagcaauaagaacaggggcaucauuaagaccuucucuaaugggugcgauuaugucucaaacaaaggaguggacacugucagugugggcaauacgcuuuacuguguuaacaagcaagaggguaaaagccuguaugugaagggggaacccaucauuaacuuuuacgacccuuugguauucccauccgaugaguuugacgcaucuauaucgcaggucaaugagaaaaucaaccagagccucgcuuucauucggaaguccgaugaacuguuacacaaugugaacgccggaaagucaacaaccaauaucaugaucacuaccauuauaaucguuauuaucgugauucugcuaagucucaucgcggucggccugcuuuuguauugcaaagcccgcugaggacuagugaagggaacacccaaauuuaauucagccuuaagcacaauuaauuaagagugaaacguaauuguacaagcaguuggucacccaccauagggcaugaucaacaccgcaaccuuuccuuuuucccccagugauucugaaaaaccccucuucccuucagcuugcuuagauguuccaaauuuaguaagcuuaaggcggccuacagaagaaaaagaaaaaaaaggccacaaaaguucccucucacuuucaguaaauaaaauaaaagcagcaacagaaauaaagaaauaaaugaaauucaaaaugaaauaaauauuguguugugcagcauuaaaaaaucaauaaaaauuaaaaaugagcaagaucuaaaaaaaaaaaaaaaaaaaaaaaaaaaaaaaaaaaaaaaaaaaaaaaaaaaaaaaaaaaaaaaaugcaucccccccccccccccccccccccccccccccaaaggcucuuuucagagccaccagaauu

SEQ ID NO: 5202 - RNA, 2117 nt, Artificial Sequence
  mRNA product Design f-4 comprising derived and/or modified sequence from HRSV(A2)__F-del_DSCav1_mut4 (opt4)
gggagagucccgcagucggcguccagcggcucugcuuguucgugugugugucguugcaggccuuauucaagcuuaccauggagcugcugauccugaaggccaacgccaucaccaccauccugaccgccgugaccuucugcuucgccagcggccagaacaucaccgaggaguucuaccagagcaccugcagcgccgugagcaagggcuaccugagcgcccugagaaccggcugguacaccagcgugaucaccaucgagcugagcaacaucaaggagaacaagugcaacggcaccgacgccaaggugaagcugaucaagcaggagcuggacaaguacaagaacgccgugaccgagcugcagcugcugaugcagagcacccccgccaccggcagcggcagcgccaucugcagcggcguggccgugugcaaggugcugcaccuggagggcgaggugaacaagaucaagagcgcccugcugagcaccaacaaggccguggugagccugagcaacggcgugagcgugcugaccuucaaggugcuggaccugaagaacuacaucgacaagcagcugcugcccauccugaacaagcagagcugcagcaucagcaacaucgagaccgugaucgaguuccagcagaagaacaacagacugcuggagaucaccagagaguucagcgugaacgccggcgugaccacccccgugagcaccuacaugcugaccaacagcgagcugcugagccugaucaacgacaugcccaucaccaacgaccagaagaagcugaugagcaacaacgugcagaucgugagacagcagagcuacagcaucaugugcaucaucaaggaggaggugcuggccuacguggugcagcugccccuguacggcgugaucgacacccccugcuggaagcugcacaccagcccccugugcaccaccaacaccaaggagggcagcaacaucugccugaccagaaccgacagaggcugguacugcgacaacgccggcagcgugagcuucuucccccaggccgagaccugcaaggugcagagcaacagaguguucugcgacaccaugaacagcagaacccugcccagcgaggugaaccugugcaacguggacaucuucaaccccaaguacgacugcaagaucaugaccagcaagaccgacgugagcagcagcgugaucaccagccugggcgccaucgugagcugcuacggcaagaccaagugcaccgccagcaacaagaacagaggcaucaucaagaccuucagcaacggcugcgacuacgugagcaacaagggcguggacaccgugagcgugggcaacacccuguacugcgugaacaagcaggagggcaagagccuguacgugaagggcgagcccaucaucaacuucuacgacccccugguguuccccagcgacgaguucgacgccagcaucagccaggugaacgagaagaucaaccagagccuggccuucaucagaaagagcgacgagcugcugcacaacgugaacgccggcaagagcaccaccaacaucaugaucaccaccaucaucaucgugaucaucgugauccugcugagccugaucgccgugggccugcugcuguacugcaaggccagaugaggacuagugaagggaacacccaaauuuaauucagccuuaagcacaauuaauuaagagugaaacguaauuguacaagcaguuggucacccaccauagggcaugaucaacaccgcaaccuuuccuuuuucccccagugauucugaaaaaccccucuucccuucagcuugcuuagauguuccaaauuuaguaagcuuaaggcggccuacagaagaaaaagaaaaaaaaggccacaaaaguucccucucacuuucaguaaauaaaauaaaagcagcaacagaaauaaagaaauaaaugaaauucaaaaugaaauaaauauuguguugugcagcauuaaaaaaucaauaaaaauuaaaaaugagcaagaucuaaaaaaaaaaaaaaaaaaaaaaaaaaaaaaaaaaaaaaaaaaaaaaaaaaaaaaaaaaaaaaaaugcaucccccccccccccccccccccccccccccccaaaggcucuuuucagagccaccagaauu

SEQ ID NO: 5203 - RNA, 2117 nt, Artificial Sequence
  mRNA product Design f-4 comprising derived and/or modified sequence from HRSV(A2)__F-del_DSCav1_mut4 (opt5)
gggagagucccgcagucggcguccagcggcucugcuuguucgugugugugucguugcaggccuuauucaagcuuaccauggagcugcucauccugaaggccaacgcuauuaccacaauccuuacggccgugaccuucugcuuugcgagcggccagaauauuacagaagaguucuaccaauccaccuguucugcugucagcaaaggguaucuguccgcccucagaacaggaugguacaccucuguuaucacaauugaacugagcaacaucaaggagaauaaaugcaacggcaccgacgccaaggugaaacuuaucaagcaggaacuggauaaguauaaaaaugcugugacggagcuccagcugcugaugcaguccacccccgccacagggucuggaagcgcuauuuguuccggcgucgccgugugcaagguucuccaccuggagggggaagugaacaaaaucaagagcgcgcuucugucuaccaauaaagccgucgugucccucagcaacggaguuucugugcugacauuuaagguccuugaccugaagaauuacauugauaaacaacuccugccuauccugaacaagcaguccuguagcauuucuaauaucgagaccgugauugaguuccagcagaaaaacaaucggcuccuggaaaucacgcgcgaguuuuccgugaacgcuggcgucacaaccccgguuagcacauauaugcuuaccaauuccgaacugcucucucugaucaacgacaugcccauuaccaacgaucaaaagaaacuuaugagcaauaacgugcagaucgugagacagcaguccuacagcauuaugugcaucauuaaggaggaaguccuggccuaugugguucaacucccucuguacggcgugaucgacacacccuguuggaaacugcauacgucuccucucugcaccacaaauaccaaggagggguccaacaucugucugacacggaccgaucgcggaugguacugcgacaaugcuggcagcgucucuuucuuuccccaggccgaaacguguaaggugcagagcaacagaguuuucugcgauacaaugaacuccagaacccugccuucugaggugaaucucugcaaugucgacauuuuuaacccgaaauaugauuguaagaucaugaccagcaaaacagacguguccagcucugucauuaccucccugggggcgaucgugagcugcuacggaaagacaaaauguacggccucuaauaagaaccggggcauuaucaagaccuucuccaaugggugcgauuauguuagcaacaaaggaguggacacagucuccgugggcaauacccuuuacuguguuaacaagcaagagggcaaaucucuguaugugaagggggaacccaucauuaacuuuuacgacccucucgucuuccccagcgaugaguuugacgcuuccaucucucaggugaaugagaaaauuaaccagagccuggccuucauccgcaaguccgaugaacugcuccacaaugugaacgcuggaaagagcacaaccaauauuaugaucacgaccauuaucaucguuauuaucgucauucugcuuucucugaucgccgugggccuccugcuguauugcaaagccagaugaggacuagugaagggaacacccaaauuuaauucagccuuaagcacaauuaauuaagagugaaacguaauuguacaagcaguuggucacccaccauagggcaugaucaacaccgcaaccuuuccuuuuucccccagugauucugaaaaaccccucuucccuucagcuugcuuagauguuccaaauuuaguaagcuuaaggcggccuacagaagaaaaagaaaaaaaaggccacaaaaguucccucucacuuucaguaaauaaaauaaaagcagcaacagaaauaaagaaauaaaugaaauucaaaaugaaauaaauauuguguugugcagcauuaaaaaaucaauaaaaauuaaaaaugagcaagaucuaaaaaaaaaaaaaaaaaaaaaaaaaaaaaaaaaaaaaaaaaaaaaaaaaaaaaaaaaaaaaaaaugcaucccccccccccccccccccccccccccccccaaaggcucuuuucagagccaccagaauu

SEQ ID NO: 5204 - RNA, 2117 nt, Artificial Sequence
  mRNA product Design f-4 comprising derived and/or modified sequence from HRSV(A2)__F-del_DSCav1_mut4 (opt6)
gggagagucccgcagucggcguccagcggcucugcuuguucgugugugugucguugcaggccuuauucaagcuuaccauggaacuuuuaauacuaaaagcuaacgccauaaccacuauacuaacagcagucacauucugcuucgcaucaggccaaaacauaaccgaagaauuuuaccaauccacuuguucagcagucuccaaaggauauuuauccgcacuucguacaggaugguauacaucaguaauaacaauagaacucuccaacauaaaagaaaauaaaugcaacggcaccgacgcaaaaguaaaacucaucaaacaagaauuagacaaauacaagaacgccguaacagaacuacaauuacuaaugcaaucaacacccgccacaggaucaggaucugcaauaugcucuggaguagcaguaugcaaaguauuacaccuagaaggagaaguaaacaaaaucaaaagcgcacuacuauccacaaacaaagcuguaguaucacuaucaaacggaguaucaguauuaacuuucaaaguacuugaucuaaaaaacuacauagacaaacaacuacuacccauauuaaacaaacaaucaugcucaauaagcaauauagaaacaguaauagaauuucaacaaaaaaacaacagacuacuagaaaucacaagggaauuuucaguaaaugccgguguuacaaccccaguaucaacauacaugcuaacuaacucagaacuacuauccuuaauaaacgauaugccaauaacaaacgaucaaaaaaaacuaauguccaacaacguacaaauaguaagacaacaaucauacucaaucaugugcauuauaaaagaagaagucuuagcauacguaguacaauuaccacuauacgguguaauagauacaccauguuggaaauuacacacaagcccacuaugcacaacuaacacaaaagaaggcucaaauauauguuuaacaagaacagaccgagguugguacugcgacaaugcaggaucaguaucauucuuuccacaagcagaaacauguaaaguucaauccaacagaguauucugcgacacaaugaacuccagaacacuaccuucagaaguaaaccucuguaacguagacauauuuaaucccaaguacgacugcaaaauaaugacaucgaaaacagacguaagcuccucagugauaacaucccucggcgccaucguauccuguuacgguaaaacuaaauguaccgccucaaacaaaaaccgcgguauuauaaaaacuuuuucuaauggcugcgauuacguaagcaacaaaggcgucgacacaguuuccguaggaaacacacuauacugcguaaacaaacaagaagguaaaucucuauacguaaaaggagaaccaauaauaaauuucuaugauccuuuaguauucccauccgaugaauuugacgccucuaucucacaagucaacgaaaaaauaaaucaaucauuagcauucauacgaaaaucagacgaacuacuacacaacguaaacgcaggaaaaucaacaaccaacauaaugauaaccacaauaauaauaguuauuauagugauacuauuauccuuaauugcagucggacuauuauuauacuguaaagcacgcuaaggacuagugaagggaacacccaaauuuaauucagccuuaagcacaauuaauuaagagugaaacguaauuguacaagcaguuggucacccaccauagggcaugaucaacaccgcaaccuuuccuuuuucccccagugauucugaaaaaccccucuucccuucagcuugcuuagauguuccaaauuuaguaagcuuaaggcggccuacagaagaaaaagaaaaaaaaggccacaaaaguucccucucacuuucaguaaauaaaauaaaagcagcaacagaaauaaagaaauaaaugaaauucaaaaugaaauaaauauuguguugugcagcauuaaaaaaucaauaaaaauuaaaaaugagcaagaucuaaaaaaaaaaaaaaaaaaaaaaaaaaaaaaaaaaaaaaaaaaaaaaaaaaaaaaaaaaaaaaaaugcaucccccccccccccccccccccccccccccccaaaggcucuuuucagagccaccagaauu

SEQ ID NO: 5205 - RNA, 2117 nt, Artificial Sequence
  mRNA product Design f-4 comprising derived and/or modified sequence from HRSV(A2)__F-del_DSCav1_mut4 (opt11)
gggagagucccgcagucggcguccagcggcucugcuuguucgugugugugucguugcaggccuuauucaagcuuaccauggaacuccucauccucaaagccaaugccaucaccacaauccugacagcaguaaccuucugcuucgcauccggacaaaacaucaccgaagaauuuuaccagucaaccugcuccgcugucucaaaaggcuaccucucagcccuucgcaccggcugguacaccucggucauaacaauagaacucuccaauaucaaagaaaacaaaugcaacggcacugacgccaagguaaaacucaucaaacaggaacucgauaaauacaagaacgccguaacagaacuacaacuacucaugcaaucaacaccggccaccggcuccgguuccgccauaugcuccggaguggccgugugcaagguccuccaccuugaaggggaaguuaacaaaaucaaaucagcccuccucuccacuaacaaagccguaguaucccuaagcaacgguguauccguccucaccuucaaaguacuagaccuaaagaauuauaucgacaaacaacuccuccccauacucaacaaacaauccugcuccauaagcaacaucgaaacagucaucgaguuccagcagaaaaacaaccgacuccucgaaauaacccgcgaguucucagucaacgccggagucaccacacccgucagcaccuacaugcugaccaacuccgaacuccucuccuuaaucaaugacaugcccaucaccaaugaccaaaagaaacucaugucaaacaacguccaaauaguacgccaacaauccuacuccaucaugugcaucauaaaagaagaaguacucgccuacgucguccaacucccccucuacggcguaaucgacacccccugcuggaaacuacacacaagcccccucugcaccacaaacacuaaagagggcuccaacaucugucuaacccgcaccgaucgaggcugguacugcgacaacgccggaucugucucauucuucccccaagccgaaaccugcaaaguccaauccaaccgcgucuucugcgacaccaugaacucgagaacccucccuuccgaagucaaccuaugcaacgucgacauuuucaaccccaaauacgacugcaaaaucaugaccucgaaaaccgacguaucauccagcgucaucaccagccuaggcgcaaucgugagcugcuacggcaaaaccaaaugcaccgcgagcaauaaaaaccgcgggaucaucaaaacuuucuccaacggcugcgacuacgucuccaacaagggagucgauaccgucuccguaggcaacacccucuacugcgucaacaaacaagaaggcaaaucacuauacguaaaaggcgagccaaucauaaacuucuacgacccucuaguuuucccauccgacgaguucgacgcuagcaucucccaagucaacgagaaaaucaaccaaucccucgcauucauccgcaaauccgacgaacuccuccacaacguaaacgcaggcaaaucaacuacuaauauaaugaucacaaccaucauaauagucauaaucguaauccuccuaucccucaucgccgucggacuacugcucuacugcaaagcccgcuaaggacuagugaagggaacacccaaauuuaauucagccuuaagcacaauuaauuaagagugaaacguaauuguacaagcaguuggucacccaccauagggcaugaucaacaccgcaaccuuuccuuuuucccccagugauucugaaaaaccccucuucccuucagcuugcuuagauguuccaaauuuaguaagcuuaaggcggccuacagaagaaaaagaaaaaaaaggccacaaaaguucccucucacuuucaguaaauaaaauaaaagcagcaacagaaauaaagaaauaaaugaaauucaaaaugaaauaaauauuguguugugcagcauuaaaaaaucaauaaaaauuaaaaaugagcaagaucuaaaaaaaaaaaaaaaaaaaaaaaaaaaaaaaaaaaaaaaaaaaaaaaaaaaaaaaaaaaaaaaaugcaucccccccccccccccccccccccccccccccaaaggcucuuuucagagccaccagaauu

SEQ ID NO: 5206 - RNA, 1893 nt, Artificial Sequence
  mRNA product Design f-5 comprising derived and/or modified sequence from HRSV(A2)__F-del_DSCav1_mut4 (opt1)
gggagacuuucccauucuguagcagaauuugguguugccuguggucuuggucccgcggagaagcuuaccauggagcugcucauccugaaggccaacgccaucaccaccauccugacggcggugaccuucugcuucgccagcggccagaacaucaccgaggaguucuaccaguccacgugcagcgccgucuccaagggguaccucagcgcccugcggaccggcugguacaccuccgugaucaccaucgagcugagcaacaucaaggagaacaagugcaacgggaccgacgccaaggugaagcucaucaagcaggagcuggacaaguacaagaacgcggucacggagcugcagcuccugaugcaguccaccccggcaaccggcuccggcuccgccaucugcagcggcgucgccgugugcaaggugcugcaccucgagggggaggucaacaagaucaagagcgcccugcuguccaccaacaaggccguggugagccucuccaacggcgucagcgugcugaccuucaaggugcuggaccucaagaacuacaucgacaagcagcugcugcccauccugaacaagcagagcugcuccaucagcaacaucgagacggugaucgaguuccagcagaagaacaaccggcuccuggagaucacccgcgaguucagcgugaacgccggggucaccacccccguguccacguacaugcugaccaacagcgagcuccugucccugaucaacgacaugccgaucaccaacgaccagaagaagcucaugagcaacaacgugcagaucguccggcagcaguccuacagcaucaugugcaucaucaaggaggaggugcuggcguacgugguccagcugccccucuacggcgugaucgacacccccugcuggaagcugcacacgagcccccugugcaccaccaacaccaaggagggguccaacaucugccucacgcgcaccgaccggggcugguacugcgacaacgccggcagcgucuccuucuucccgcaggccgagaccugcaaggugcagagcaaccgcguguucugcgacaccaugaacucccggacgcugcccagcgagguaaaccucugcaacgucgacaucuucaaccccaaguacgacugcaagaucaugaccuccaagaccgacgugagcuccagcgugaucaccucccugggggccaucgucagcugcuacggcaagacgaagugcaccgccagcaacaagaaccgggggaucaucaagaccuucuccaacggcugcgacuacgugagcaacaagggcguggacaccguguccgucgggaacacccuguacugcgugaacaagcaggagggcaagagccucuacgugaagggggagcccaucaucaacuucuacgacccgcuggucuuccccuccgacgaguucgacgcgagcaucucccaggugaacgagaagaucaaccagagccuggccuucauccgcaaguccgacgagcugcuccacaacgugaacgccggcaagagcacgaccaacaucaugaucaccaccaucaucaucgucaucaucgugauccugcugucccucaucgccguggggcugcugcucuacugcaaggcccggugaggacuaguacuggcugcaucucccuuuccucuguccuccauccuucucccaggauggugaagggggaccugguacccagugauccccaccccaggauccuaaaucaugacuuaccugcuaauaaaaacucauuggaaaagugagaagaucuaaaaaaaaaaaaaaaaaaaaaaaaaaaaaaaaaaaaaaaaaaaaaaaaaaaaaaaaaaaaaaaaugcaucccccccccccccccccccccccccccccccaaaggcucuuuucagagccaccagaauu

SEQ ID NO: 5207 - RNA, 1893 nt, Artificial Sequence
  mRNA product Design f-5 comprising derived and/or modified sequence from HRSV(A2)__F-del_DSCav1_mut4 (opt1)
gggagacuuucccauucuguagcagaauuugguguugccuguggucuuggucccgcggagaagcuuaccauggagcugcucauccugaaggccaacgccaucaccaccauccugacggcggugaccuucugcuucgccagcggccagaacaucaccgaggaguucuaccaguccacgugcagcgccgucuccaagggguaccucagcgcccugcgcaccggcugguacaccuccgugaucaccaucgagcugagcaacaucaaggagaacaagugcaacgggaccgacgccaaggugaagcucaucaagcaggagcuggacaaguacaagaacgcggucacggagcugcagcuccugaugcaguccacccccgccaccggcagcggguccgccaucugcagcggcguggccgugugcaagguccugcaccucgagggcgaggugaacaagaucaaguccgcgcugcugagcaccaacaaggccguggucucccucagcaacgggguguccgugcugacguucaagguccuggaccucaagaacuacaucgacaagcagcugcugccgauccucaacaagcagagcugcuccaucagcaacaucgagaccgugaucgaguuccagcagaagaacaaccggcugcuggagaucacccgcgaguucuccgugaacgccggcgucaccacgcccgugagcaccuacaugcucaccaacagcgagcugcugucccucaucaacgacaugcccaucaccaacgaccagaagaagcugaugagcaacaacgugcagaucguccggcagcaguccuacagcaucaugugcaucaucaaggaggaggugcuggccuacgugguccagcucccccuguacggggugaucgacacgccgugcuggaagcugcacaccagcccccucugcaccaccaacacgaaggagggcuccaacaucugccugacccgcaccgaccgggggugguacugcgacaacgccggcuccgugagcuucuucccccaggcggagaccugcaagguccaguccaaccgcguguucugcgacacgaugaacagccggacccuccccuccgaggucaaccugugcaacguggacaucuucaacccgaaguacgacugcaagaucaugaccagcaagaccgacguguccagcuccgucaucacgagccugggcgccaucguguccugcuacgggaagaccaagugcaccgccagcaacaagaaccggggcaucaucaagaccuucuccaacgggugcgacuacgugagcaacaagggcgucgacacggugagcgugggcaacacccucuacugcgucaacaagcaggaggggaagucccuguacgugaagggcgagcccaucaucaacuucuacgacccccugguguuccccagcgacgaguucgacgccuccaucagccaggucaacgagaagaucaaccagucccucgccuucauccgcaagagcgacgagcugcugcacaacgugaacgcggggaaguccaccaccaacaucaugaucaccacgaucaucaucgugaucaucgucauccuccugagccugaucgccgugggccuccugcuguacugcaaggcccggugaggacuaguacuggcugcaucucccuuuccucuguccuccauccuucucccaggauggugaagggggaccugguacccagugauccccaccccaggauccuaaaucaugacuuaccugcuaauaaaaacucauuggaaaagugagaagaucuaaaaaaaaaaaaaaaaaaaaaaaaaaaaaaaaaaaaaaaaaaaaaaaaaaaaaaaaaaaaaaaaugcaucccccccccccccccccccccccccccccccaaaggcucuuuucagagccaccagaauu

SEQ ID NO: 5208 - RNA, 1893 nt, Artificial Sequence
  mRNA product Design f-5 comprising derived and/or modified sequence from HRSV(A2)__F-del_DSCav1_mut4 (opt2)
gggagacuuucccauucuguagcagaauuugguguugccuguggucuuggucccgcggagaagcuuaccauggagcuccucauccucaaggccaacgccaucaccaccauccucaccgccgucaccuucugcuucgccuccggccagaacaucaccgaggaguucuaccaguccaccugcuccgccgucuccaagggcuaccucuccgcccuccgcaccggcugguacaccuccgucaucaccaucgagcucuccaacaucaaggagaacaagugcaacggcaccgacgccaaggucaagcucaucaagcaggagcucgacaaguacaagaacgccgucaccgagcuccagcuccucaugcaguccacccccgccaccggcuccggcuccgccaucugcuccggcgucgccgucugcaagguccuccaccucgagggcgaggucaacaagaucaaguccgcccuccucuccaccaacaaggccgucgucucccucuccaacggcgucuccguccucaccuucaagguccucgaccucaagaacuacaucgacaagcagcuccuccccauccucaacaagcaguccugcuccaucuccaacaucgagaccgucaucgaguuccagcagaagaacaaccgccuccucgagaucacccgcgaguucuccgucaacgccggcgucaccacccccgucuccaccuacaugcucaccaacuccgagcuccucucccucaucaacgacaugcccaucaccaacgaccagaagaagcucauguccaacaacguccagaucguccgccagcaguccuacuccaucaugugcaucaucaaggaggagguccucgccuacgucguccagcucccccucuacggcgucaucgacacccccugcuggaagcuccacaccuccccccucugcaccaccaacaccaaggagggcuccaacaucugccucacccgcaccgaccgcggcugguacugcgacaacgccggcuccgucuccuucuucccccaggccgagaccugcaagguccaguccaaccgcgucuucugcgacaccaugaacucccgcacccuccccuccgaggucaaccucugcaacgucgacaucuucaaccccaaguacgacugcaagaucaugaccuccaagaccgacgucuccuccuccgucaucaccucccucggcgccaucgucuccugcuacggcaagaccaagugcaccgccuccaacaagaaccgcggcaucaucaagaccuucuccaacggcugcgacuacgucuccaacaagggcgucgacaccgucuccgucggcaacacccucuacugcgucaacaagcaggagggcaagucccucuacgucaagggcgagcccaucaucaacuucuacgacccccucgucuuccccuccgacgaguucgacgccuccaucucccaggucaacgagaagaucaaccagucccucgccuucauccgcaaguccgacgagcuccuccacaacgucaacgccggcaaguccaccaccaacaucaugaucaccaccaucaucaucgucaucaucgucauccuccucucccucaucgccgucggccuccuccucuacugcaaggcccgcugaggacuaguacuggcugcaucucccuuuccucuguccuccauccuucucccaggauggugaagggggaccugguacccagugauccccaccccaggauccuaaaucaugacuuaccugcuaauaaaaacucauuggaaaagugagaagaucuaaaaaaaaaaaaaaaaaaaaaaaaaaaaaaaaaaaaaaaaaaaaaaaaaaaaaaaaaaaaaaaaugcaucccccccccccccccccccccccccccccccaaaggcucuuuucagagccaccagaauu

SEQ ID NO: 5209 - RNA, 1893 nt, Artificial Sequence
  mRNA product Design f-5 comprising derived and/or modified sequence from HRSV(A2)__F-del_DSCav1_mut4 (opt3)
gggagacuuucccauucuguagcagaauuugguguugccuguggucuuggucccgcggagaagcuuaccauggagcugcucauccuuaaggccaacgcuauuaccacaauacugacugcagugacguucugcuuugccagcggccagaauaucaccgaagaguucuaccaauccacauguucugcggucucaaaaggguauuugagugcuuuaagaacuggaugguacaccagcguuauuacaaucgaacuguccaacauuaaggagaauaaaugcaacgguaccgacgccaaggugaaacuaaucaagcaggaacucgauaaguauaaaaaugcaguaacugagcugcagcuucugaugcagucuacacccgccaccggcucggggucagcuauauguagcggaguggcagucugcaagguguugcaccucgagggcgaaguuaacaaaaucaagagugcccugcuguccacgaauaaagcuguggucucucucagcaacgguguguccguauuaacuuuuaagguucuggaccuuaagaauuacauugauaaacaauugcugccuauccuaaacaagcagucauguaguauuagcaauaucgagaccgugauagaguuccagcagaaaaacaauaggcuccuggaaauuacacgggaguuuucugucaacgccggggugacuaccccaguguccacauauaugcuuaccaauucagaacuguugagccucaucaacgacaugccgauuacgaacgaucaaaagaaacugaugaguaauaacguccagaucguucgccagcagucuuacuccaucaugugcauuauaaaggaggaaguguuagcguauguagugcaacugccccucuacggagucaucgacacuccuuguuggaaacuucauacaagcccacugugcaccacuaauacaaaggagggcucgaacauuuguuugacccgaacggaucguggcugguacugcgacaaugcagggucuguguccuucuuuccccaggccgaaaccuguaagguucagucaaacagaguguucugcgauacaaugaauaguagaacucugccuagcgaggucaaccucugcaauguggacaucuuuaacccaaaauaugauuguaagauaaugaccuccaaaacagacguaucuagcucaguuauuaccagucugggagcuaucguguccugcuacgguaagacuaaauguacagccagcaauaagaacaggggcaucauuaagaccuucucuaaugggugcgauuaugucucaaacaaaggaguggacacugucagugugggcaauacgcuuuacuguguuaacaagcaagaggguaaaagccuguaugugaagggggaacccaucauuaacuuuuacgacccuuugguauucccauccgaugaguuugacgcaucuauaucgcaggucaaugagaaaaucaaccagagccucgcuuucauucggaaguccgaugaacuguuacacaaugugaacgccggaaagucaacaaccaauaucaugaucacuaccauuauaaucguuauuaucgugauucugcuaagucucaucgcggucggccugcuuuuguauugcaaagcccgcugaggacuaguacuggcugcaucucccuuuccucuguccuccauccuucucccaggauggugaagggggaccugguacccagugauccccaccccaggauccuaaaucaugacuuaccugcuaauaaaaacucauuggaaaagugagaagaucuaaaaaaaaaaaaaaaaaaaaaaaaaaaaaaaaaaaaaaaaaaaaaaaaaaaaaaaaaaaaaaaaugcaucccccccccccccccccccccccccccccccaaaggcucuuuucagagccaccagaauu

SEQ ID NO: 5210 - RNA, 1893 nt, Artificial Sequence
  mRNA product Design f-5 comprising derived and/or modified sequence from HRSV(A2)__F-del_DSCav1_mut4 (opt4)
gggagacuuucccauucuguagcagaauuugguguugccuguggucuuggucccgcggagaagcuuaccauggagcugcugauccugaaggccaacgccaucaccaccauccugaccgccgugaccuucugcuucgccagcggccagaacaucaccgaggaguucuaccagagcaccugcagcgccgugagcaagggcuaccugagcgcccugagaaccggcugguacaccagcgugaucaccaucgagcugagcaacaucaaggagaacaagugcaacggcaccgacgccaaggugaagcugaucaagcaggagcuggacaaguacaagaacgccgugaccgagcugcagcugcugaugcagagcacccccgccaccggcagcggcagcgccaucugcagcggcguggccgugugcaaggugcugcaccuggagggcgaggugaacaagaucaagagcgcccugcugagcaccaacaaggccguggugagccugagcaacggcgugagcgugcugaccuucaaggugcuggaccugaagaacuacaucgacaagcagcugcugcccauccugaacaagcagagcugcagcaucagcaacaucgagaccgugaucgaguuccagcagaagaacaacagacugcuggagaucaccagagaguucagcgugaacgccggcgugaccacccccgugagcaccuacaugcugaccaacagcgagcugcugagccugaucaacgacaugcccaucaccaacgaccagaagaagcugaugagcaacaacgugcagaucgugagacagcagagcuacagcaucaugugcaucaucaaggaggaggugcuggccuacguggugcagcugccccuguacggcgugaucgacacccccugcuggaagcugcacaccagcccccugugcaccaccaacaccaaggagggcagcaacaucugccugaccagaaccgacagaggcugguacugcgacaacgccggcagcgugagcuucuucccccaggccgagaccugcaaggugcagagcaacagaguguucugcgacaccaugaacagcagaacccugcccagcgaggugaaccugugcaacguggacaucuucaaccccaaguacgacugcaagaucaugaccagcaagaccgacgugagcagcagcgugaucaccagccugggcgccaucgugagcugcuacggcaagaccaagugcaccgccagcaacaagaacagaggcaucaucaagaccuucagcaacggcugcgacuacgugagcaacaagggcguggacaccgugagcgugggcaacacccuguacugcgugaacaagcaggagggcaagagccuguacgugaagggcgagcccaucaucaacuucuacgacccccugguguuccccagcgacgaguucgacgccagcaucagccaggugaacgagaagaucaaccagagccuggccuucaucagaaagagcgacgagcugcugcacaacgugaacgccggcaagagcaccaccaacaucaugaucaccaccaucaucaucgugaucaucgugauccugcugagccugaucgccgugggccugcugcuguacugcaaggccagaugaggacuaguacuggcugcaucucccuuuccucuguccuccauccuucucccaggauggugaagggggaccugguacccagugauccccaccccaggauccuaaaucaugacuuaccugcuaauaaaaacucauuggaaaagugagaagaucuaaaaaaaaaaaaaaaaaaaaaaaaaaaaaaaaaaaaaaaaaaaaaaaaaaaaaaaaaaaaaaaaugcaucccccccccccccccccccccccccccccccaaaggcucuuuucagagccaccagaauu

SEQ ID NO: 5211 - RNA, 1893 nt, Artificial Sequence
  mRNA product Design f-5 comprising derived and/or modified sequence from HRSV(A2)__F-del_DSCav1_mut4 (opt5)
gggagacuuucccauucuguagcagaauuugguguugccuguggucuuggucccgcggagaagcuuaccauggagcugcucauccugaaggccaacgcuauuaccacaauccuuacggccgugaccuucugcuuugcgagcggccagaauauuacagaagaguucuaccaauccaccuguucugcugucagcaaaggguaucuguccgcccucagaacaggaugguacaccucuguuaucacaauugaacugagcaacaucaaggagaauaaaugcaacggcaccgacgccaaggugaaacuuaucaagcaggaacuggauaaguauaaaaaugcugugacggagcuccagcugcugaugcaguccacccccgccacagggucuggaagcgcuauuuguuccggcgucgccgugugcaagguucuccaccuggagggggaagugaacaaaaucaagagcgcgcuucugucuaccaauaaagccgucgugucccucagcaacggaguuucugugcugacauuuaagguccuugaccugaagaauuacauugauaaacaacuccugccuauccugaacaagcaguccuguagcauuucuaauaucgagaccgugauugaguuccagcagaaaaacaaucggcuccuggaaaucacgcgcgaguuuuccgugaacgcuggcgucacaaccccgguuagcacauauaugcuuaccaauuccgaacugcucucucugaucaacgacaugcccauuaccaacgaucaaaagaaacuuaugagcaauaacgugcagaucgugagacagcaguccuacagcauuaugugcaucauuaaggaggaaguccuggccuaugugguucaacucccucuguacggcgugaucgacacacccuguuggaaacugcauacgucuccucucugcaccacaaauaccaaggagggguccaacaucugucugacacggaccgaucgcggaugguacugcgacaaugcuggcagcgucucuuucuuuccccaggccgaaacguguaaggugcagagcaacagaguuuucugcgauacaaugaacuccagaacccugccuucugaggugaaucucugcaaugucgacauuuuuaacccgaaauaugauuguaagaucaugaccagcaaaacagacguguccagcucugucauuaccucccugggggcgaucgugagcugcuacggaaagacaaaauguacggccucuaauaagaaccggggcauuaucaagaccuucuccaaugggugcgauuauguuagcaacaaaggaguggacacagucuccgugggcaauacccuuuacuguguuaacaagcaagagggcaaaucucuguaugugaagggggaacccaucauuaacuuuuacgacccucucgucuuccccagcgaugaguuugacgcuuccaucucucaggugaaugagaaaauuaaccagagccuggccuucauccgcaaguccgaugaacugcuccacaaugugaacgcuggaaagagcacaaccaauauuaugaucacgaccauuaucaucguuauuaucgucauucugcuuucucugaucgccgugggccuccugcuguauugcaaagccagaugaggacuaguacuggcugcaucucccuuuccucuguccuccauccuucucccaggauggugaagggggaccugguacccagugauccccaccccaggauccuaaaucaugacuuaccugcuaauaaaaacucauuggaaaagugagaagaucuaaaaaaaaaaaaaaaaaaaaaaaaaaaaaaaaaaaaaaaaaaaaaaaaaaaaaaaaaaaaaaaaugcaucccccccccccccccccccccccccccccccaaaggcucuuuucagagccaccagaauu

SEQ ID NO: 5212 - RNA, 1893 nt, Artificial Sequence
  mRNA product Design f-5 comprising derived and/or modified sequence from HRSV(A2)__F-del_DSCav1_mut4 (opt6)
gggagacuuucccauucuguagcagaauuugguguugccuguggucuuggucccgcggagaagcuuaccauggaacuuuuaauacuaaaagcuaacgccauaaccacuauacuaacagcagucacauucugcuucgcaucaggccaaaacauaaccgaagaauuuuaccaauccacuuguucagcagucuccaaaggauauuuauccgcacuucguacaggaugguauacaucaguaauaacaauagaacucuccaacauaaaagaaaauaaaugcaacggcaccgacgcaaaaguaaaacucaucaaacaagaauuagacaaauacaagaacgccguaacagaacuacaauuacuaaugcaaucaacacccgccacaggaucaggaucugcaauaugcucuggaguagcaguaugcaaaguauuacaccuagaaggagaaguaaacaaaaucaaaagcgcacuacuauccacaaacaaagcuguaguaucacuaucaaacggaguaucaguauuaacuuucaaaguacuugaucuaaaaaacuacauagacaaacaacuacuacccauauuaaacaaacaaucaugcucaauaagcaauauagaaacaguaauagaauuucaacaaaaaaacaacagacuacuagaaaucacaagggaauuuucaguaaaugccgguguuacaaccccaguaucaacauacaugcuaacuaacucagaacuacuauccuuaauaaacgauaugccaauaacaaacgaucaaaaaaaacuaauguccaacaacguacaaauaguaagacaacaaucauacucaaucaugugcauuauaaaagaagaagucuuagcauacguaguacaauuaccacuauacgguguaauagauacaccauguuggaaauuacacacaagcccacuaugcacaacuaacacaaaagaaggcucaaauauauguuuaacaagaacagaccgagguugguacugcgacaaugcaggaucaguaucauucuuuccacaagcagaaacauguaaaguucaauccaacagaguauucugcgacacaaugaacuccagaacacuaccuucagaaguaaaccucuguaacguagacauauuuaaucccaaguacgacugcaaaauaaugacaucgaaaacagacguaagcuccucagugauaacaucccucggcgccaucguauccuguuacgguaaaacuaaauguaccgccucaaacaaaaaccgcgguauuauaaaaacuuuuucuaauggcugcgauuacguaagcaacaaaggcgucgacacaguuuccguaggaaacacacuauacugcguaaacaaacaagaagguaaaucucuauacguaaaaggagaaccaauaauaaauuucuaugauccuuuaguauucccauccgaugaauuugacgccucuaucucacaagucaacgaaaaaauaaaucaaucauuagcauucauacgaaaaucagacgaacuacuacacaacguaaacgcaggaaaaucaacaaccaacauaaugauaaccacaauaauaauaguuauuauagugauacuauuauccuuaauugcagucggacuauuauuauacuguaaagcacgcuaaggacuaguacuggcugcaucucccuuuccucuguccuccauccuucucccaggauggugaagggggaccugguacccagugauccccaccccaggauccuaaaucaugacuuaccugcuaauaaaaacucauuggaaaagugagaagaucuaaaaaaaaaaaaaaaaaaaaaaaaaaaaaaaaaaaaaaaaaaaaaaaaaaaaaaaaaaaaaaaaugcaucccccccccccccccccccccccccccccccaaaggcucuuuucagagccaccagaauu

SEQ ID NO: 5213 - RNA, 1893 nt, Artificial Sequence
  mRNA product Design f-5 comprising derived and/or modified sequence from HRSV(A2)__F-del_DSCav1_mut4 (opt11)
gggagacuuucccauucuguagcagaauuugguguugccuguggucuuggucccgcggagaagcuuaccauggaacuccucauccucaaagccaaugccaucaccacaauccugacagcaguaaccuucugcuucgcauccggacaaaacaucaccgaagaauuuuaccagucaaccugcuccgcugucucaaaaggcuaccucucagcccuucgcaccggcugguacaccucggucauaacaauagaacucuccaauaucaaagaaaacaaaugcaacggcacugacgccaagguaaaacucaucaaacaggaacucgauaaauacaagaacgccguaacagaacuacaacuacucaugcaaucaacaccggccaccggcuccgguuccgccauaugcuccggaguggccgugugcaagguccuccaccuugaaggggaaguuaacaaaaucaaaucagcccuccucuccacuaacaaagccguaguaucccuaagcaacgguguauccguccucaccuucaaaguacuagaccuaaagaauuauaucgacaaacaacuccuccccauacucaacaaacaauccugcuccauaagcaacaucgaaacagucaucgaguuccagcagaaaaacaaccgacuccucgaaauaacccgcgaguucucagucaacgccggagucaccacacccgucagcaccuacaugcugaccaacuccgaacuccucuccuuaaucaaugacaugcccaucaccaaugaccaaaagaaacucaugucaaacaacguccaaauaguacgccaacaauccuacuccaucaugugcaucauaaaagaagaaguacucgccuacgucguccaacucccccucuacggcguaaucgacacccccugcuggaaacuacacacaagcccccucugcaccacaaacacuaaagagggcuccaacaucugucuaacccgcaccgaucgaggcugguacugcgacaacgccggaucugucucauucuucccccaagccgaaaccugcaaaguccaauccaaccgcgucuucugcgacaccaugaacucgagaacccucccuuccgaagucaaccuaugcaacgucgacauuuucaaccccaaauacgacugcaaaaucaugaccucgaaaaccgacguaucauccagcgucaucaccagccuaggcgcaaucgugagcugcuacggcaaaaccaaaugcaccgcgagcaauaaaaaccgcgggaucaucaaaacuuucuccaacggcugcgacuacgucuccaacaagggagucgauaccgucuccguaggcaacacccucuacugcgucaacaaacaagaaggcaaaucacuauacguaaaaggcgagccaaucauaaacuucuacgacccucuaguuuucccauccgacgaguucgacgcuagcaucucccaagucaacgagaaaaucaaccaaucccucgcauucauccgcaaauccgacgaacuccuccacaacguaaacgcaggcaaaucaacuacuaauauaaugaucacaaccaucauaauagucauaaucguaauccuccuaucccucaucgccgucggacuacugcucuacugcaaagcccgcuaaggacuaguacuggcugcaucucccuuuccucuguccuccauccuucucccaggauggugaagggggaccugguacccagugauccccaccccaggauccuaaaucaugacuuaccugcuaauaaaaacucauuggaaaagugagaagaucuaaaaaaaaaaaaaaaaaaaaaaaaaaaaaaaaaaaaaaaaaaaaaaaaaaaaaaaaaaaaaaaaugcaucccccccccccccccccccccccccccccccaaaggcucuuuucagagccaccagaauu

SEQ ID NO: 5214 - RNA, 1889 nt, Artificial Sequence
  mRNA product Design g-1 comprising derived and/or modified sequence from HRSV(A2)__F-del_DSCav1_mut4 (opt1)
gggagacuuucccauucuguagcagaauuugguguugccuguggucuuggucccgcggagaagcuuaccauggagcugcucauccugaaggccaacgccaucaccaccauccugacggcggugaccuucugcuucgccagcggccagaacaucaccgaggaguucuaccaguccacgugcagcgccgucuccaagggguaccucagcgcccugcggaccggcugguacaccuccgugaucaccaucgagcugagcaacaucaaggagaacaagugcaacgggaccgacgccaaggugaagcucaucaagcaggagcuggacaaguacaagaacgcggucacggagcugcagcuccugaugcaguccaccccggcaaccggcuccggcuccgccaucugcagcggcgucgccgugugcaaggugcugcaccucgagggggaggucaacaagaucaagagcgcccugcuguccaccaacaaggccguggugagccucuccaacggcgucagcgugcugaccuucaaggugcuggaccucaagaacuacaucgacaagcagcugcugcccauccugaacaagcagagcugcuccaucagcaacaucgagacggugaucgaguuccagcagaagaacaaccggcuccuggagaucacccgcgaguucagcgugaacgccggggucaccacccccguguccacguacaugcugaccaacagcgagcuccugucccugaucaacgacaugccgaucaccaacgaccagaagaagcucaugagcaacaacgugcagaucguccggcagcaguccuacagcaucaugugcaucaucaaggaggaggugcuggcguacgugguccagcugccccucuacggcgugaucgacacccccugcuggaagcugcacacgagcccccugugcaccaccaacaccaaggagggguccaacaucugccucacgcgcaccgaccggggcugguacugcgacaacgccggcagcgucuccuucuucccgcaggccgagaccugcaaggugcagagcaaccgcguguucugcgacaccaugaacucccggacgcugcccagcgagguaaaccucugcaacgucgacaucuucaaccccaaguacgacugcaagaucaugaccuccaagaccgacgugagcuccagcgugaucaccucccugggggccaucgucagcugcuacggcaagacgaagugcaccgccagcaacaagaaccgggggaucaucaagaccuucuccaacggcugcgacuacgugagcaacaagggcguggacaccguguccgucgggaacacccuguacugcgugaacaagcaggagggcaagagccucuacgugaagggggagcccaucaucaacuucuacgacccgcuggucuuccccuccgacgaguucgacgcgagcaucucccaggugaacgagaagaucaaccagagccuggccuucauccgcaaguccgacgagcugcuccacaacgugaacgccggcaagagcacgaccaacaucaugaucaccaccaucaucaucgucaucaucgugauccugcugucccucaucgccguggggcugcugcucuacugcaaggcccggugaggacuaguggaagcauuuuccuggcugauuaaaagaaauuacucagcuauggucaucuguuccuguuagaaggcuaugcagcauauuauauacuaugcgcauguuaugaaaugcauaauaaaaaauuuuaaaaaaucuaaaagaucuaaaaaaaaaaaaaaaaaaaaaaaaaaaaaaaaaaaaaaaaaaaaaaaaaaaaaaaaaaaaaaaaugcaucccccccccccccccccccccccccccccccaaaggcucuuuucagagccaccagaauu

SEQ ID NO: 5215 - RNA, 1889 nt, Artificial Sequence
  mRNA product Design g-1 comprising derived and/or modified sequence from HRSV(A2)__F-del_DSCav1_mut4 (opt1)
gggagacuuucccauucuguagcagaauuugguguugccuguggucuuggucccgcggagaagcuuaccauggagcugcucauccugaaggccaacgccaucaccaccauccugacggcggugaccuucugcuucgccagcggccagaacaucaccgaggaguucuaccaguccacgugcagcgccgucuccaagggguaccucagcgcccugcgcaccggcugguacaccuccgugaucaccaucgagcugagcaacaucaaggagaacaagugcaacgggaccgacgccaaggugaagcucaucaagcaggagcuggacaaguacaagaacgcggucacggagcugcagcuccugaugcaguccacccccgccaccggcagcggguccgccaucugcagcggcguggccgugugcaagguccugcaccucgagggcgaggugaacaagaucaaguccgcgcugcugagcaccaacaaggccguggucucccucagcaacgggguguccgugcugacguucaagguccuggaccucaagaacuacaucgacaagcagcugcugccgauccucaacaagcagagcugcuccaucagcaacaucgagaccgugaucgaguuccagcagaagaacaaccggcugcuggagaucacccgcgaguucuccgugaacgccggcgucaccacgcccgugagcaccuacaugcucaccaacagcgagcugcugucccucaucaacgacaugcccaucaccaacgaccagaagaagcugaugagcaacaacgugcagaucguccggcagcaguccuacagcaucaugugcaucaucaaggaggaggugcuggccuacgugguccagcucccccuguacggggugaucgacacgccgugcuggaagcugcacaccagcccccucugcaccaccaacacgaaggagggcuccaacaucugccugacccgcaccgaccgggggugguacugcgacaacgccggcuccgugagcuucuucccccaggcggagaccugcaagguccaguccaaccgcguguucugcgacacgaugaacagccggacccuccccuccgaggucaaccugugcaacguggacaucuucaacccgaaguacgacugcaagaucaugaccagcaagaccgacguguccagcuccgucaucacgagccugggcgccaucguguccugcuacgggaagaccaagugcaccgccagcaacaagaaccggggcaucaucaagaccuucuccaacgggugcgacuacgugagcaacaagggcgucgacacggugagcgugggcaacacccucuacugcgucaacaagcaggaggggaagucccuguacgugaagggcgagcccaucaucaacuucuacgacccccugguguuccccagcgacgaguucgacgccuccaucagccaggucaacgagaagaucaaccagucccucgccuucauccgcaagagcgacgagcugcugcacaacgugaacgcggggaaguccaccaccaacaucaugaucaccacgaucaucaucgugaucaucgucauccuccugagccugaucgccgugggccuccugcuguacugcaaggcccggugaggacuaguggaagcauuuuccuggcugauuaaaagaaauuacucagcuauggucaucuguuccuguuagaaggcuaugcagcauauuauauacuaugcgcauguuaugaaaugcauaauaaaaaauuuuaaaaaaucuaaaagaucuaaaaaaaaaaaaaaaaaaaaaaaaaaaaaaaaaaaaaaaaaaaaaaaaaaaaaaaaaaaaaaaaugcaucccccccccccccccccccccccccccccccaaaggcucuuuucagagccaccagaauu

SEQ ID NO: 5216 - RNA, 1889 nt, Artificial Sequence
  mRNA product Design g-1 comprising derived and/or modified sequence from HRSV(A2)__F-del_DSCav1_mut4 (opt2)
gggagacuuucccauucuguagcagaauuugguguugccuguggucuuggucccgcggagaagcuuaccauggagcuccucauccucaaggccaacgccaucaccaccauccucaccgccgucaccuucugcuucgccuccggccagaacaucaccgaggaguucuaccaguccaccugcuccgccgucuccaagggcuaccucuccgcccuccgcaccggcugguacaccuccgucaucaccaucgagcucuccaacaucaaggagaacaagugcaacggcaccgacgccaaggucaagcucaucaagcaggagcucgacaaguacaagaacgccgucaccgagcuccagcuccucaugcaguccacccccgccaccggcuccggcuccgccaucugcuccggcgucgccgucugcaagguccuccaccucgagggcgaggucaacaagaucaaguccgcccuccucuccaccaacaaggccgucgucucccucuccaacggcgucuccguccucaccuucaagguccucgaccucaagaacuacaucgacaagcagcuccuccccauccucaacaagcaguccugcuccaucuccaacaucgagaccgucaucgaguuccagcagaagaacaaccgccuccucgagaucacccgcgaguucuccgucaacgccggcgucaccacccccgucuccaccuacaugcucaccaacuccgagcuccucucccucaucaacgacaugcccaucaccaacgaccagaagaagcucauguccaacaacguccagaucguccgccagcaguccuacuccaucaugugcaucaucaaggaggagguccucgccuacgucguccagcucccccucuacggcgucaucgacacccccugcuggaagcuccacaccuccccccucugcaccaccaacaccaaggagggcuccaacaucugccucacccgcaccgaccgcggcugguacugcgacaacgccggcuccgucuccuucuucccccaggccgagaccugcaagguccaguccaaccgcgucuucugcgacaccaugaacucccgcacccuccccuccgaggucaaccucugcaacgucgacaucuucaaccccaaguacgacugcaagaucaugaccuccaagaccgacgucuccuccuccgucaucaccucccucggcgccaucgucuccugcuacggcaagaccaagugcaccgccuccaacaagaaccgcggcaucaucaagaccuucuccaacggcugcgacuacgucuccaacaagggcgucgacaccgucuccgucggcaacacccucuacugcgucaacaagcaggagggcaagucccucuacgucaagggcgagcccaucaucaacuucuacgacccccucgucuuccccuccgacgaguucgacgccuccaucucccaggucaacgagaagaucaaccagucccucgccuucauccgcaaguccgacgagcuccuccacaacgucaacgccggcaaguccaccaccaacaucaugaucaccaccaucaucaucgucaucaucgucauccuccucucccucaucgccgucggccuccuccucuacugcaaggcccgcugaggacuaguggaagcauuuuccuggcugauuaaaagaaauuacucagcuauggucaucuguuccuguuagaaggcuaugcagcauauuauauacuaugcgcauguuaugaaaugcauaauaaaaaauuuuaaaaaaucuaaaagaucuaaaaaaaaaaaaaaaaaaaaaaaaaaaaaaaaaaaaaaaaaaaaaaaaaaaaaaaaaaaaaaaaugcaucccccccccccccccccccccccccccccccaaaggcucuuuucagagccaccagaauu

SEQ ID NO: 5217 - RNA, 1889 nt, Artificial Sequence
  mRNA product Design g-1 comprising derived and/or modified sequence from HRSV(A2)__F-del_DSCav1_mut4 (opt3)
gggagacuuucccauucuguagcagaauuugguguugccuguggucuuggucccgcggagaagcuuaccauggagcugcucauccuuaaggccaacgcuauuaccacaauacugacugcagugacguucugcuuugccagcggccagaauaucaccgaagaguucuaccaauccacauguucugcggucucaaaaggguauuugagugcuuuaagaacuggaugguacaccagcguuauuacaaucgaacuguccaacauuaaggagaauaaaugcaacgguaccgacgccaaggugaaacuaaucaagcaggaacucgauaaguauaaaaaugcaguaacugagcugcagcuucugaugcagucuacacccgccaccggcucggggucagcuauauguagcggaguggcagucugcaagguguugcaccucgagggcgaaguuaacaaaaucaagagugcccugcuguccacgaauaaagcuguggucucucucagcaacgguguguccguauuaacuuuuaagguucuggaccuuaagaauuacauugauaaacaauugcugccuauccuaaacaagcagucauguaguauuagcaauaucgagaccgugauagaguuccagcagaaaaacaauaggcuccuggaaauuacacgggaguuuucugucaacgccggggugacuaccccaguguccacauauaugcuuaccaauucagaacuguugagccucaucaacgacaugccgauuacgaacgaucaaaagaaacugaugaguaauaacguccagaucguucgccagcagucuuacuccaucaugugcauuauaaaggaggaaguguuagcguauguagugcaacugccccucuacggagucaucgacacuccuuguuggaaacuucauacaagcccacugugcaccacuaauacaaaggagggcucgaacauuuguuugacccgaacggaucguggcugguacugcgacaaugcagggucuguguccuucuuuccccaggccgaaaccuguaagguucagucaaacagaguguucugcgauacaaugaauaguagaacucugccuagcgaggucaaccucugcaauguggacaucuuuaacccaaaauaugauuguaagauaaugaccuccaaaacagacguaucuagcucaguuauuaccagucugggagcuaucguguccugcuacgguaagacuaaauguacagccagcaauaagaacaggggcaucauuaagaccuucucuaaugggugcgauuaugucucaaacaaaggaguggacacugucagugugggcaauacgcuuuacuguguuaacaagcaagaggguaaaagccuguaugugaagggggaacccaucauuaacuuuuacgacccuuugguauucccauccgaugaguuugacgcaucuauaucgcaggucaaugagaaaaucaaccagagccucgcuuucauucggaaguccgaugaacuguuacacaaugugaacgccggaaagucaacaaccaauaucaugaucacuaccauuauaaucguuauuaucgugauucugcuaagucucaucgcggucggccugcuuuuguauugcaaagcccgcugaggacuaguggaagcauuuuccuggcugauuaaaagaaauuacucagcuauggucaucuguuccuguuagaaggcuaugcagcauauuauauacuaugcgcauguuaugaaaugcauaauaaaaaauuuuaaaaaaucuaaaagaucuaaaaaaaaaaaaaaaaaaaaaaaaaaaaaaaaaaaaaaaaaaaaaaaaaaaaaaaaaaaaaaaaugcaucccccccccccccccccccccccccccccccaaaggcucuuuucagagccaccagaauu

SEQ ID NO: 5218 - RNA, 1889 nt, Artificial Sequence
  mRNA product Design g-1 comprising derived and/or modified sequence from HRSV(A2)__F-del_DSCav1_mut4 (opt4)
gggagacuuucccauucuguagcagaauuugguguugccuguggucuuggucccgcggagaagcuuaccauggagcugcugauccugaaggccaacgccaucaccaccauccugaccgccgugaccuucugcuucgccagcggccagaacaucaccgaggaguucuaccagagcaccugcagcgccgugagcaagggcuaccugagcgcccugagaaccggcugguacaccagcgugaucaccaucgagcugagcaacaucaaggagaacaagugcaacggcaccgacgccaaggugaagcugaucaagcaggagcuggacaaguacaagaacgccgugaccgagcugcagcugcugaugcagagcacccccgccaccggcagcggcagcgccaucugcagcggcguggccgugugcaaggugcugcaccuggagggcgaggugaacaagaucaagagcgcccugcugagcaccaacaaggccguggugagccugagcaacggcgugagcgugcugaccuucaaggugcuggaccugaagaacuacaucgacaagcagcugcugcccauccugaacaagcagagcugcagcaucagcaacaucgagaccgugaucgaguuccagcagaagaacaacagacugcuggagaucaccagagaguucagcgugaacgccggcgugaccacccccgugagcaccuacaugcugaccaacagcgagcugcugagccugaucaacgacaugcccaucaccaacgaccagaagaagcugaugagcaacaacgugcagaucgugagacagcagagcuacagcaucaugugcaucaucaaggaggaggugcuggccuacguggugcagcugccccuguacggcgugaucgacacccccugcuggaagcugcacaccagcccccugugcaccaccaacaccaaggagggcagcaacaucugccugaccagaaccgacagaggcugguacugcgacaacgccggcagcgugagcuucuucccccaggccgagaccugcaaggugcagagcaacagaguguucugcgacaccaugaacagcagaacccugcccagcgaggugaaccugugcaacguggacaucuucaaccccaaguacgacugcaagaucaugaccagcaagaccgacgugagcagcagcgugaucaccagccugggcgccaucgugagcugcuacggcaagaccaagugcaccgccagcaacaagaacagaggcaucaucaagaccuucagcaacggcugcgacuacgugagcaacaagggcguggacaccgugagcgugggcaacacccuguacugcgugaacaagcaggagggcaagagccuguacgugaagggcgagcccaucaucaacuucuacgacccccugguguuccccagcgacgaguucgacgccagcaucagccaggugaacgagaagaucaaccagagccuggccuucaucagaaagagcgacgagcugcugcacaacgugaacgccggcaagagcaccaccaacaucaugaucaccaccaucaucaucgugaucaucgugauccugcugagccugaucgccgugggccugcugcuguacugcaaggccagaugaggacuaguggaagcauuuuccuggcugauuaaaagaaauuacucagcuauggucaucuguuccuguuagaaggcuaugcagcauauuauauacuaugcgcauguuaugaaaugcauaauaaaaaauuuuaaaaaaucuaaaagaucuaaaaaaaaaaaaaaaaaaaaaaaaaaaaaaaaaaaaaaaaaaaaaaaaaaaaaaaaaaaaaaaaugcaucccccccccccccccccccccccccccccccaaaggcucuuuucagagccaccagaauu

SEQ ID NO: 5219 - RNA, 1889 nt, Artificial Sequence
  mRNA product Design g-1 comprising derived and/or modified sequence from HRSV(A2)__F-del_DSCav1_mut4 (opt5)
gggagacuuucccauucuguagcagaauuugguguugccuguggucuuggucccgcggagaagcuuaccauggagcugcucauccugaaggccaacgcuauuaccacaauccuuacggccgugaccuucugcuuugcgagcggccagaauauuacagaagaguucuaccaauccaccuguucugcugucagcaaaggguaucuguccgcccucagaacaggaugguacaccucuguuaucacaauugaacugagcaacaucaaggagaauaaaugcaacggcaccgacgccaaggugaaacuuaucaagcaggaacuggauaaguauaaaaaugcugugacggagcuccagcugcugaugcaguccacccccgccacagggucuggaagcgcuauuuguuccggcgucgccgugugcaagguucuccaccuggagggggaagugaacaaaaucaagagcgcgcuucugucuaccaauaaagccgucgugucccucagcaacggaguuucugugcugacauuuaagguccuugaccugaagaauuacauugauaaacaacuccugccuauccugaacaagcaguccuguagcauuucuaauaucgagaccgugauugaguuccagcagaaaaacaaucggcuccuggaaaucacgcgcgaguuuuccgugaacgcuggcgucacaaccccgguuagcacauauaugcuuaccaauuccgaacugcucucucugaucaacgacaugcccauuaccaacgaucaaaagaaacuuaugagcaauaacgugcagaucgugagacagcaguccuacagcauuaugugcaucauuaaggaggaaguccuggccuaugugguucaacucccucuguacggcgugaucgacacacccuguuggaaacugcauacgucuccucucugcaccacaaauaccaaggagggguccaacaucugucugacacggaccgaucgcggaugguacugcgacaaugcuggcagcgucucuuucuuuccccaggccgaaacguguaaggugcagagcaacagaguuuucugcgauacaaugaacuccagaacccugccuucugaggugaaucucugcaaugucgacauuuuuaacccgaaauaugauuguaagaucaugaccagcaaaacagacguguccagcucugucauuaccucccugggggcgaucgugagcugcuacggaaagacaaaauguacggccucuaauaagaaccggggcauuaucaagaccuucuccaaugggugcgauuauguuagcaacaaaggaguggacacagucuccgugggcaauacccuuuacuguguuaacaagcaagagggcaaaucucuguaugugaagggggaacccaucauuaacuuuuacgacccucucgucuuccccagcgaugaguuugacgcuuccaucucucaggugaaugagaaaauuaaccagagccuggccuucauccgcaaguccgaugaacugcuccacaaugugaacgcuggaaagagcacaaccaauauuaugaucacgaccauuaucaucguuauuaucgucauucugcuuucucugaucgccgugggccuccugcuguauugcaaagccagaugaggacuaguggaagcauuuuccuggcugauuaaaagaaauuacucagcuauggucaucuguuccuguuagaaggcuaugcagcauauuauauacuaugcgcauguuaugaaaugcauaauaaaaaauuuuaaaaaaucuaaaagaucuaaaaaaaaaaaaaaaaaaaaaaaaaaaaaaaaaaaaaaaaaaaaaaaaaaaaaaaaaaaaaaaaugcaucccccccccccccccccccccccccccccccaaaggcucuuuucagagccaccagaauu

SEQ ID NO: 5220 - RNA, 1889 nt, Artificial Sequence
  mRNA product Design g-1 comprising derived and/or modified sequence from HRSV(A2)__F-del_DSCav1_mut4 (opt6)
gggagacuuucccauucuguagcagaauuugguguugccuguggucuuggucccgcggagaagcuuaccauggaacuuuuaauacuaaaagcuaacgccauaaccacuauacuaacagcagucacauucugcuucgcaucaggccaaaacauaaccgaagaauuuuaccaauccacuuguucagcagucuccaaaggauauuuauccgcacuucguacaggaugguauacaucaguaauaacaauagaacucuccaacauaaaagaaaauaaaugcaacggcaccgacgcaaaaguaaaacucaucaaacaagaauuagacaaauacaagaacgccguaacagaacuacaauuacuaaugcaaucaacacccgccacaggaucaggaucugcaauaugcucuggaguagcaguaugcaaaguauuacaccuagaaggagaaguaaacaaaaucaaaagcgcacuacuauccacaaacaaagcuguaguaucacuaucaaacggaguaucaguauuaacuuucaaaguacuugaucuaaaaaacuacauagacaaacaacuacuacccauauuaaacaaacaaucaugcucaauaagcaauauagaaacaguaauagaauuucaacaaaaaaacaacagacuacuagaaaucacaagggaauuuucaguaaaugccgguguuacaaccccaguaucaacauacaugcuaacuaacucagaacuacuauccuuaauaaacgauaugccaauaacaaacgaucaaaaaaaacuaauguccaacaacguacaaauaguaagacaacaaucauacucaaucaugugcauuauaaaagaagaagucuuagcauacguaguacaauuaccacuauacgguguaauagauacaccauguuggaaauuacacacaagcccacuaugcacaacuaacacaaaagaaggcucaaauauauguuuaacaagaacagaccgagguugguacugcgacaaugcaggaucaguaucauucuuuccacaagcagaaacauguaaaguucaauccaacagaguauucugcgacacaaugaacuccagaacacuaccuucagaaguaaaccucuguaacguagacauauuuaaucccaaguacgacugcaaaauaaugacaucgaaaacagacguaagcuccucagugauaacaucccucggcgccaucguauccuguuacgguaaaacuaaauguaccgccucaaacaaaaaccgcgguauuauaaaaacuuuuucuaauggcugcgauuacguaagcaacaaaggcgucgacacaguuuccguaggaaacacacuauacugcguaaacaaacaagaagguaaaucucuauacguaaaaggagaaccaauaauaaauuucuaugauccuuuaguauucccauccgaugaauuugacgccucuaucucacaagucaacgaaaaaauaaaucaaucauuagcauucauacgaaaaucagacgaacuacuacacaacguaaacgcaggaaaaucaacaaccaacauaaugauaaccacaauaauaauaguuauuauagugauacuauuauccuuaauugcagucggacuauuauuauacuguaaagcacgcuaaggacuaguggaagcauuuuccuggcugauuaaaagaaauuacucagcuauggucaucuguuccuguuagaaggcuaugcagcauauuauauacuaugcgcauguuaugaaaugcauaauaaaaaauuuuaaaaaaucuaaaagaucuaaaaaaaaaaaaaaaaaaaaaaaaaaaaaaaaaaaaaaaaaaaaaaaaaaaaaaaaaaaaaaaaugcaucccccccccccccccccccccccccccccccaaaggcucuuuucagagccaccagaauu

SEQ ID NO: 5221 - RNA, 1889 nt, Artificial Sequence
  mRNA product Design g-1 comprising derived and/or modified sequence from HRSV(A2)__F-del_DSCav1_mut4 (opt11)
gggagacuuucccauucuguagcagaauuugguguugccuguggucuuggucccgcggagaagcuuaccauggaacuccucauccucaaagccaaugccaucaccacaauccugacagcaguaaccuucugcuucgcauccggacaaaacaucaccgaagaauuuuaccagucaaccugcuccgcugucucaaaaggcuaccucucagcccuucgcaccggcugguacaccucggucauaacaauagaacucuccaauaucaaagaaaacaaaugcaacggcacugacgccaagguaaaacucaucaaacaggaacucgauaaauacaagaacgccguaacagaacuacaacuacucaugcaaucaacaccggccaccggcuccgguuccgccauaugcuccggaguggccgugugcaagguccuccaccuugaaggggaaguuaacaaaaucaaaucagcccuccucuccacuaacaaagccguaguaucccuaagcaacgguguauccguccucaccuucaaaguacuagaccuaaagaauuauaucgacaaacaacuccuccccauacucaacaaacaauccugcuccauaagcaacaucgaaacagucaucgaguuccagcagaaaaacaaccgacuccucgaaauaacccgcgaguucucagucaacgccggagucaccacacccgucagcaccuacaugcugaccaacuccgaacuccucuccuuaaucaaugacaugcccaucaccaaugaccaaaagaaacucaugucaaacaacguccaaauaguacgccaacaauccuacuccaucaugugcaucauaaaagaagaaguacucgccuacgucguccaacucccccucuacggcguaaucgacacccccugcuggaaacuacacacaagcccccucugcaccacaaacacuaaagagggcuccaacaucugucuaacccgcaccgaucgaggcugguacugcgacaacgccggaucugucucauucuucccccaagccgaaaccugcaaaguccaauccaaccgcgucuucugcgacaccaugaacucgagaacccucccuuccgaagucaaccuaugcaacgucgacauuuucaaccccaaauacgacugcaaaaucaugaccucgaaaaccgacguaucauccagcgucaucaccagccuaggcgcaaucgugagcugcuacggcaaaaccaaaugcaccgcgagcaauaaaaaccgcgggaucaucaaaacuuucuccaacggcugcgacuacgucuccaacaagggagucgauaccgucuccguaggcaacacccucuacugcgucaacaaacaagaaggcaaaucacuauacguaaaaggcgagccaaucauaaacuucuacgacccucuaguuuucccauccgacgaguucgacgcuagcaucucccaagucaacgagaaaaucaaccaaucccucgcauucauccgcaaauccgacgaacuccuccacaacguaaacgcaggcaaaucaacuacuaauauaaugaucacaaccaucauaauagucauaaucguaauccuccuaucccucaucgccgucggacuacugcucuacugcaaagcccgcuaaggacuaguggaagcauuuuccuggcugauuaaaagaaauuacucagcuauggucaucuguuccuguuagaaggcuaugcagcauauuauauacuaugcgcauguuaugaaaugcauaauaaaaaauuuuaaaaaaucuaaaagaucuaaaaaaaaaaaaaaaaaaaaaaaaaaaaaaaaaaaaaaaaaaaaaaaaaaaaaaaaaaaaaaaaugcaucccccccccccccccccccccccccccccccaaaggcucuuuucagagccaccagaauu

SEQ ID NO: 5222 - RNA, 1904 nt, Artificial Sequence
  mRNA product Design g-2 comprising derived and/or modified sequence from HRSV(A2)__F-del_DSCav1_mut4 (opt1)
gggagaguccgcucagccagguugcagaagcggcuuagcguguguccuaaucuucucucugcguguagguaggccugugccgcaaacaagcuuaccauggagcugcucauccugaaggccaacgccaucaccaccauccugacggcggugaccuucugcuucgccagcggccagaacaucaccgaggaguucuaccaguccacgugcagcgccgucuccaagggguaccucagcgcccugcggaccggcugguacaccuccgugaucaccaucgagcugagcaacaucaaggagaacaagugcaacgggaccgacgccaaggugaagcucaucaagcaggagcuggacaaguacaagaacgcggucacggagcugcagcuccugaugcaguccaccccggcaaccggcuccggcuccgccaucugcagcggcgucgccgugugcaaggugcugcaccucgagggggaggucaacaagaucaagagcgcccugcuguccaccaacaaggccguggugagccucuccaacggcgucagcgugcugaccuucaaggugcuggaccucaagaacuacaucgacaagcagcugcugcccauccugaacaagcagagcugcuccaucagcaacaucgagacggugaucgaguuccagcagaagaacaaccggcuccuggagaucacccgcgaguucagcgugaacgccggggucaccacccccguguccacguacaugcugaccaacagcgagcuccugucccugaucaacgacaugccgaucaccaacgaccagaagaagcucaugagcaacaacgugcagaucguccggcagcaguccuacagcaucaugugcaucaucaaggaggaggugcuggcguacgugguccagcugccccucuacggcgugaucgacacccccugcuggaagcugcacacgagcccccugugcaccaccaacaccaaggagggguccaacaucugccucacgcgcaccgaccggggcugguacugcgacaacgccggcagcgucuccuucuucccgcaggccgagaccugcaaggugcagagcaaccgcguguucugcgacaccaugaacucccggacgcugcccagcgagguaaaccucugcaacgucgacaucuucaaccccaaguacgacugcaagaucaugaccuccaagaccgacgugagcuccagcgugaucaccucccugggggccaucgucagcugcuacggcaagacgaagugcaccgccagcaacaagaaccgggggaucaucaagaccuucuccaacggcugcgacuacgugagcaacaagggcguggacaccguguccgucgggaacacccuguacugcgugaacaagcaggagggcaagagccucuacgugaagggggagcccaucaucaacuucuacgacccgcuggucuuccccuccgacgaguucgacgcgagcaucucccaggugaacgagaagaucaaccagagccuggccuucauccgcaaguccgacgagcugcuccacaacgugaacgccggcaagagcacgaccaacaucaugaucaccaccaucaucaucgucaucaucgugauccugcugucccucaucgccguggggcugcugcucuacugcaaggcccggugaggacuaguaauaaggaaacuguaugaaugucugugggcaggaagugaagagauccuucuguaaagguuuuuggaauuaugucugcugaauaauaaacuuuuuugaaauaauaaaucugguagaaaaaugagaucuaaaaaaaaaaaaaaaaaaaaaaaaaaaaaaaaaaaaaaaaaaaaaaaaaaaaaaaaaaaaaaaaugcaucccccccccccccccccccccccccccccccaaaggcucuuuucagagccaccagaauu

SEQ ID NO: 5223 - RNA, 1904 nt, Artificial Sequence
  mRNA product Design g-2 comprising derived and/or modified sequence from HRSV(A2)__F-del_DSCav1_mut4 (opt1)
gggagaguccgcucagccagguugcagaagcggcuuagcguguguccuaaucuucucucugcguguagguaggccugugccgcaaacaagcuuaccauggagcugcucauccugaaggccaacgccaucaccaccauccugacggcggugaccuucugcuucgccagcggccagaacaucaccgaggaguucuaccaguccacgugcagcgccgucuccaagggguaccucagcgcccugcgcaccggcugguacaccuccgugaucaccaucgagcugagcaacaucaaggagaacaagugcaacgggaccgacgccaaggugaagcucaucaagcaggagcuggacaaguacaagaacgcggucacggagcugcagcuccugaugcaguccacccccgccaccggcagcggguccgccaucugcagcggcguggccgugugcaagguccugcaccucgagggcgaggugaacaagaucaaguccgcgcugcugagcaccaacaaggccguggucucccucagcaacgggguguccgugcugacguucaagguccuggaccucaagaacuacaucgacaagcagcugcugccgauccucaacaagcagagcugcuccaucagcaacaucgagaccgugaucgaguuccagcagaagaacaaccggcugcuggagaucacccgcgaguucuccgugaacgccggcgucaccacgcccgugagcaccuacaugcucaccaacagcgagcugcugucccucaucaacgacaugcccaucaccaacgaccagaagaagcugaugagcaacaacgugcagaucguccggcagcaguccuacagcaucaugugcaucaucaaggaggaggugcuggccuacgugguccagcucccccuguacggggugaucgacacgccgugcuggaagcugcacaccagcccccucugcaccaccaacacgaaggagggcuccaacaucugccugacccgcaccgaccgggggugguacugcgacaacgccggcuccgugagcuucuucccccaggcggagaccugcaagguccaguccaaccgcguguucugcgacacgaugaacagccggacccuccccuccgaggucaaccugugcaacguggacaucuucaacccgaaguacgacugcaagaucaugaccagcaagaccgacguguccagcuccgucaucacgagccugggcgccaucguguccugcuacgggaagaccaagugcaccgccagcaacaagaaccggggcaucaucaagaccuucuccaacgggugcgacuacgugagcaacaagggcgucgacacggugagcgugggcaacacccucuacugcgucaacaagcaggaggggaagucccuguacgugaagggcgagcccaucaucaacuucuacgacccccugguguuccccagcgacgaguucgacgccuccaucagccaggucaacgagaagaucaaccagucccucgccuucauccgcaagagcgacgagcugcugcacaacgugaacgcggggaaguccaccaccaacaucaugaucaccacgaucaucaucgugaucaucgucauccuccugagccugaucgccgugggccuccugcuguacugcaaggcccggugaggacuaguaauaaggaaacuguaugaaugucugugggcaggaagugaagagauccuucuguaaagguuuuuggaauuaugucugcugaauaauaaacuuuuuugaaauaauaaaucugguagaaaaaugagaucuaaaaaaaaaaaaaaaaaaaaaaaaaaaaaaaaaaaaaaaaaaaaaaaaaaaaaaaaaaaaaaaaugcaucccccccccccccccccccccccccccccccaaaggcucuuuucagagccaccagaauu

SEQ ID NO: 5224 - RNA, 1904 nt, Artificial Sequence
  mRNA product Design g-2 comprising derived and/or modified sequence from HRSV(A2)__F-del_DSCav1_mut4 (opt2)
gggagaguccgcucagccagguugcagaagcggcuuagcguguguccuaaucuucucucugcguguagguaggccugugccgcaaacaagcuuaccauggagcuccucauccucaaggccaacgccaucaccaccauccucaccgccgucaccuucugcuucgccuccggccagaacaucaccgaggaguucuaccaguccaccugcuccgccgucuccaagggcuaccucuccgcccuccgcaccggcugguacaccuccgucaucaccaucgagcucuccaacaucaaggagaacaagugcaacggcaccgacgccaaggucaagcucaucaagcaggagcucgacaaguacaagaacgccgucaccgagcuccagcuccucaugcaguccacccccgccaccggcuccggcuccgccaucugcuccggcgucgccgucugcaagguccuccaccucgagggcgaggucaacaagaucaaguccgcccuccucuccaccaacaaggccgucgucucccucuccaacggcgucuccguccucaccuucaagguccucgaccucaagaacuacaucgacaagcagcuccuccccauccucaacaagcaguccugcuccaucuccaacaucgagaccgucaucgaguuccagcagaagaacaaccgccuccucgagaucacccgcgaguucuccgucaacgccggcgucaccacccccgucuccaccuacaugcucaccaacuccgagcuccucucccucaucaacgacaugcccaucaccaacgaccagaagaagcucauguccaacaacguccagaucguccgccagcaguccuacuccaucaugugcaucaucaaggaggagguccucgccuacgucguccagcucccccucuacggcgucaucgacacccccugcuggaagcuccacaccuccccccucugcaccaccaacaccaaggagggcuccaacaucugccucacccgcaccgaccgcggcugguacugcgacaacgccggcuccgucuccuucuucccccaggccgagaccugcaagguccaguccaaccgcgucuucugcgacaccaugaacucccgcacccuccccuccgaggucaaccucugcaacgucgacaucuucaaccccaaguacgacugcaagaucaugaccuccaagaccgacgucuccuccuccgucaucaccucccucggcgccaucgucuccugcuacggcaagaccaagugcaccgccuccaacaagaaccgcggcaucaucaagaccuucuccaacggcugcgacuacgucuccaacaagggcgucgacaccgucuccgucggcaacacccucuacugcgucaacaagcaggagggcaagucccucuacgucaagggcgagcccaucaucaacuucuacgacccccucgucuuccccuccgacgaguucgacgccuccaucucccaggucaacgagaagaucaaccagucccucgccuucauccgcaaguccgacgagcuccuccacaacgucaacgccggcaaguccaccaccaacaucaugaucaccaccaucaucaucgucaucaucgucauccuccucucccucaucgccgucggccuccuccucuacugcaaggcccgcugaggacuaguaauaaggaaacuguaugaaugucugugggcaggaagugaagagauccuucuguaaagguuuuuggaauuaugucugcugaauaauaaacuuuuuugaaauaauaaaucugguagaaaaaugagaucuaaaaaaaaaaaaaaaaaaaaaaaaaaaaaaaaaaaaaaaaaaaaaaaaaaaaaaaaaaaaaaaaugcaucccccccccccccccccccccccccccccccaaaggcucuuuucagagccaccagaauu

SEQ ID NO: 5225 - RNA, 1904 nt, Artificial Sequence
  mRNA product Design g-2 comprising derived and/or modified sequence from HRSV(A2)__F-del_DSCav1_mut4 (opt3)
gggagaguccgcucagccagguugcagaagcggcuuagcguguguccuaaucuucucucugcguguagguaggccugugccgcaaacaagcuuaccauggagcugcucauccuuaaggccaacgcuauuaccacaauacugacugcagugacguucugcuuugccagcggccagaauaucaccgaagaguucuaccaauccacauguucugcggucucaaaaggguauuugagugcuuuaagaacuggaugguacaccagcguuauuacaaucgaacuguccaacauuaaggagaauaaaugcaacgguaccgacgccaaggugaaacuaaucaagcaggaacucgauaaguauaaaaaugcaguaacugagcugcagcuucugaugcagucuacacccgccaccggcucggggucagcuauauguagcggaguggcagucugcaagguguugcaccucgagggcgaaguuaacaaaaucaagagugcccugcuguccacgaauaaagcuguggucucucucagcaacgguguguccguauuaacuuuuaagguucuggaccuuaagaauuacauugauaaacaauugcugccuauccuaaacaagcagucauguaguauuagcaauaucgagaccgugauagaguuccagcagaaaaacaauaggcuccuggaaauuacacgggaguuuucugucaacgccggggugacuaccccaguguccacauauaugcuuaccaauucagaacuguugagccucaucaacgacaugccgauuacgaacgaucaaaagaaacugaugaguaauaacguccagaucguucgccagcagucuuacuccaucaugugcauuauaaaggaggaaguguuagcguauguagugcaacugccccucuacggagucaucgacacuccuuguuggaaacuucauacaagcccacugugcaccacuaauacaaaggagggcucgaacauuuguuugacccgaacggaucguggcugguacugcgacaaugcagggucuguguccuucuuuccccaggccgaaaccuguaagguucagucaaacagaguguucugcgauacaaugaauaguagaacucugccuagcgaggucaaccucugcaauguggacaucuuuaacccaaaauaugauuguaagauaaugaccuccaaaacagacguaucuagcucaguuauuaccagucugggagcuaucguguccugcuacgguaagacuaaauguacagccagcaauaagaacaggggcaucauuaagaccuucucuaaugggugcgauuaugucucaaacaaaggaguggacacugucagugugggcaauacgcuuuacuguguuaacaagcaagaggguaaaagccuguaugugaagggggaacccaucauuaacuuuuacgacccuuugguauucccauccgaugaguuugacgcaucuauaucgcaggucaaugagaaaaucaaccagagccucgcuuucauucggaaguccgaugaacuguuacacaaugugaacgccggaaagucaacaaccaauaucaugaucacuaccauuauaaucguuauuaucgugauucugcuaagucucaucgcggucggccugcuuuuguauugcaaagcccgcugaggacuaguaauaaggaaacuguaugaaugucugugggcaggaagugaagagauccuucuguaaagguuuuuggaauuaugucugcugaauaauaaacuuuuuugaaauaauaaaucugguagaaaaaugagaucuaaaaaaaaaaaaaaaaaaaaaaaaaaaaaaaaaaaaaaaaaaaaaaaaaaaaaaaaaaaaaaaaugcaucccccccccccccccccccccccccccccccaaaggcucuuuucagagccaccagaauu

SEQ ID NO: 5226 - RNA, 1904 nt, Artificial Sequence
  mRNA product Design g-2 comprising derived and/or modified sequence from HRSV(A2)__F-del_DSCav1_mut4 (opt4)
gggagaguccgcucagccagguugcagaagcggcuuagcguguguccuaaucuucucucugcguguagguaggccugugccgcaaacaagcuuaccauggagcugcugauccugaaggccaacgccaucaccaccauccugaccgccgugaccuucugcuucgccagcggccagaacaucaccgaggaguucuaccagagcaccugcagcgccgugagcaagggcuaccugagcgcccugagaaccggcugguacaccagcgugaucaccaucgagcugagcaacaucaaggagaacaagugcaacggcaccgacgccaaggugaagcugaucaagcaggagcuggacaaguacaagaacgccgugaccgagcugcagcugcugaugcagagcacccccgccaccggcagcggcagcgccaucugcagcggcguggccgugugcaaggugcugcaccuggagggcgaggugaacaagaucaagagcgcccugcugagcaccaacaaggccguggugagccugagcaacggcgugagcgugcugaccuucaaggugcuggaccugaagaacuacaucgacaagcagcugcugcccauccugaacaagcagagcugcagcaucagcaacaucgagaccgugaucgaguuccagcagaagaacaacagacugcuggagaucaccagagaguucagcgugaacgccggcgugaccacccccgugagcaccuacaugcugaccaacagcgagcugcugagccugaucaacgacaugcccaucaccaacgaccagaagaagcugaugagcaacaacgugcagaucgugagacagcagagcuacagcaucaugugcaucaucaaggaggaggugcuggccuacguggugcagcugccccuguacggcgugaucgacacccccugcuggaagcugcacaccagcccccugugcaccaccaacaccaaggagggcagcaacaucugccugaccagaaccgacagaggcugguacugcgacaacgccggcagcgugagcuucuucccccaggccgagaccugcaaggugcagagcaacagaguguucugcgacaccaugaacagcagaacccugcccagcgaggugaaccugugcaacguggacaucuucaaccccaaguacgacugcaagaucaugaccagcaagaccgacgugagcagcagcgugaucaccagccugggcgccaucgugagcugcuacggcaagaccaagugcaccgccagcaacaagaacagaggcaucaucaagaccuucagcaacggcugcgacuacgugagcaacaagggcguggacaccgugagcgugggcaacacccuguacugcgugaacaagcaggagggcaagagccuguacgugaagggcgagcccaucaucaacuucuacgacccccugguguuccccagcgacgaguucgacgccagcaucagccaggugaacgagaagaucaaccagagccuggccuucaucagaaagagcgacgagcugcugcacaacgugaacgccggcaagagcaccaccaacaucaugaucaccaccaucaucaucgugaucaucgugauccugcugagccugaucgccgugggccugcugcuguacugcaaggccagaugaggacuaguaauaaggaaacuguaugaaugucugugggcaggaagugaagagauccuucuguaaagguuuuuggaauuaugucugcugaauaauaaacuuuuuugaaauaauaaaucugguagaaaaaugagaucuaaaaaaaaaaaaaaaaaaaaaaaaaaaaaaaaaaaaaaaaaaaaaaaaaaaaaaaaaaaaaaaaugcaucccccccccccccccccccccccccccccccaaaggcucuuuucagagccaccagaauu

SEQ ID NO: 5227 - RNA, 1904 nt, Artificial Sequence
  mRNA product Design g-2 comprising derived and/or modified sequence from HRSV(A2)__F-del_DSCav1_mut4 (opt5)
gggagaguccgcucagccagguugcagaagcggcuuagcguguguccuaaucuucucucugcguguagguaggccugugccgcaaacaagcuuaccauggagcugcucauccugaaggccaacgcuauuaccacaauccuuacggccgugaccuucugcuuugcgagcggccagaauauuacagaagaguucuaccaauccaccuguucugcugucagcaaaggguaucuguccgcccucagaacaggaugguacaccucuguuaucacaauugaacugagcaacaucaaggagaauaaaugcaacggcaccgacgccaaggugaaacuuaucaagcaggaacuggauaaguauaaaaaugcugugacggagcuccagcugcugaugcaguccacccccgccacagggucuggaagcgcuauuuguuccggcgucgccgugugcaagguucuccaccuggagggggaagugaacaaaaucaagagcgcgcuucugucuaccaauaaagccgucgugucccucagcaacggaguuucugugcugacauuuaagguccuugaccugaagaauuacauugauaaacaacuccugccuauccugaacaagcaguccuguagcauuucuaauaucgagaccgugauugaguuccagcagaaaaacaaucggcuccuggaaaucacgcgcgaguuuuccgugaacgcuggcgucacaaccccgguuagcacauauaugcuuaccaauuccgaacugcucucucugaucaacgacaugcccauuaccaacgaucaaaagaaacuuaugagcaauaacgugcagaucgugagacagcaguccuacagcauuaugugcaucauuaaggaggaaguccuggccuaugugguucaacucccucuguacggcgugaucgacacacccuguuggaaacugcauacgucuccucucugcaccacaaauaccaaggagggguccaacaucugucugacacggaccgaucgcggaugguacugcgacaaugcuggcagcgucucuuucuuuccccaggccgaaacguguaaggugcagagcaacagaguuuucugcgauacaaugaacuccagaacccugccuucugaggugaaucucugcaaugucgacauuuuuaacccgaaauaugauuguaagaucaugaccagcaaaacagacguguccagcucugucauuaccucccugggggcgaucgugagcugcuacggaaagacaaaauguacggccucuaauaagaaccggggcauuaucaagaccuucuccaaugggugcgauuauguuagcaacaaaggaguggacacagucuccgugggcaauacccuuuacuguguuaacaagcaagagggcaaaucucuguaugugaagggggaacccaucauuaacuuuuacgacccucucgucuuccccagcgaugaguuugacgcuuccaucucucaggugaaugagaaaauuaaccagagccuggccuucauccgcaaguccgaugaacugcuccacaaugugaacgcuggaaagagcacaaccaauauuaugaucacgaccauuaucaucguuauuaucgucauucugcuuucucugaucgccgugggccuccugcuguauugcaaagccagaugaggacuaguaauaaggaaacuguaugaaugucugugggcaggaagugaagagauccuucuguaaagguuuuuggaauuaugucugcugaauaauaaacuuuuuugaaauaauaaaucugguagaaaaaugagaucuaaaaaaaaaaaaaaaaaaaaaaaaaaaaaaaaaaaaaaaaaaaaaaaaaaaaaaaaaaaaaaaaugcaucccccccccccccccccccccccccccccccaaaggcucuuuucagagccaccagaauu

SEQ ID NO: 5228 - RNA, 1904 nt, Artificial Sequence
  mRNA product Design g-2 comprising derived and/or modified sequence from HRSV(A2)__F-del_DSCav1_mut4 (opt6)
gggagaguccgcucagccagguugcagaagcggcuuagcguguguccuaaucuucucucugcguguagguaggccugugccgcaaacaagcuuaccauggaacuuuuaauacuaaaagcuaacgccauaaccacuauacuaacagcagucacauucugcuucgcaucaggccaaaacauaaccgaagaauuuuaccaauccacuuguucagcagucuccaaaggauauuuauccgcacuucguacaggaugguauacaucaguaauaacaauagaacucuccaacauaaaagaaaauaaaugcaacggcaccgacgcaaaaguaaaacucaucaaacaagaauuagacaaauacaagaacgccguaacagaacuacaauuacuaaugcaaucaacacccgccacaggaucaggaucugcaauaugcucuggaguagcaguaugcaaaguauuacaccuagaaggagaaguaaacaaaaucaaaagcgcacuacuauccacaaacaaagcuguaguaucacuaucaaacggaguaucaguauuaacuuucaaaguacuugaucuaaaaaacuacauagacaaacaacuacuacccauauuaaacaaacaaucaugcucaauaagcaauauagaaacaguaauagaauuucaacaaaaaaacaacagacuacuagaaaucacaagggaauuuucaguaaaugccgguguuacaaccccaguaucaacauacaugcuaacuaacucagaacuacuauccuuaauaaacgauaugccaauaacaaacgaucaaaaaaaacuaauguccaacaacguacaaauaguaagacaacaaucauacucaaucaugugcauuauaaaagaagaagucuuagcauacguaguacaauuaccacuauacgguguaauagauacaccauguuggaaauuacacacaagcccacuaugcacaacuaacacaaaagaaggcucaaauauauguuuaacaagaacagaccgagguugguacugcgacaaugcaggaucaguaucauucuuuccacaagcagaaacauguaaaguucaauccaacagaguauucugcgacacaaugaacuccagaacacuaccuucagaaguaaaccucuguaacguagacauauuuaaucccaaguacgacugcaaaauaaugacaucgaaaacagacguaagcuccucagugauaacaucccucggcgccaucguauccuguuacgguaaaacuaaauguaccgccucaaacaaaaaccgcgguauuauaaaaacuuuuucuaauggcugcgauuacguaagcaacaaaggcgucgacacaguuuccguaggaaacacacuauacugcguaaacaaacaagaagguaaaucucuauacguaaaaggagaaccaauaauaaauuucuaugauccuuuaguauucccauccgaugaauuugacgccucuaucucacaagucaacgaaaaaauaaaucaaucauuagcauucauacgaaaaucagacgaacuacuacacaacguaaacgcaggaaaaucaacaaccaacauaaugauaaccacaauaauaauaguuauuauagugauacuauuauccuuaauugcagucggacuauuauuauacuguaaagcacgcuaaggacuaguaauaaggaaacuguaugaaugucugugggcaggaagugaagagauccuucuguaaagguuuuuggaauuaugucugcugaauaauaaacuuuuuugaaauaauaaaucugguagaaaaaugagaucuaaaaaaaaaaaaaaaaaaaaaaaaaaaaaaaaaaaaaaaaaaaaaaaaaaaaaaaaaaaaaaaaugcaucccccccccccccccccccccccccccccccaaaggcucuuuucagagccaccagaauu

SEQ ID NO: 5229 - RNA, 1904 nt, Artificial Sequence
  mRNA product Design g-2 comprising derived and/or modified sequence from HRSV(A2)__F-del_DSCav1_mut4 (opt11)
gggagaguccgcucagccagguugcagaagcggcuuagcguguguccuaaucuucucucugcguguagguaggccugugccgcaaacaagcuuaccauggaacuccucauccucaaagccaaugccaucaccacaauccugacagcaguaaccuucugcuucgcauccggacaaaacaucaccgaagaauuuuaccagucaaccugcuccgcugucucaaaaggcuaccucucagcccuucgcaccggcugguacaccucggucauaacaauagaacucuccaauaucaaagaaaacaaaugcaacggcacugacgccaagguaaaacucaucaaacaggaacucgauaaauacaagaacgccguaacagaacuacaacuacucaugcaaucaacaccggccaccggcuccgguuccgccauaugcuccggaguggccgugugcaagguccuccaccuugaaggggaaguuaacaaaaucaaaucagcccuccucuccacuaacaaagccguaguaucccuaagcaacgguguauccguccucaccuucaaaguacuagaccuaaagaauuauaucgacaaacaacuccuccccauacucaacaaacaauccugcuccauaagcaacaucgaaacagucaucgaguuccagcagaaaaacaaccgacuccucgaaauaacccgcgaguucucagucaacgccggagucaccacacccgucagcaccuacaugcugaccaacuccgaacuccucuccuuaaucaaugacaugcccaucaccaaugaccaaaagaaacucaugucaaacaacguccaaauaguacgccaacaauccuacuccaucaugugcaucauaaaagaagaaguacucgccuacgucguccaacucccccucuacggcguaaucgacacccccugcuggaaacuacacacaagcccccucugcaccacaaacacuaaagagggcuccaacaucugucuaacccgcaccgaucgaggcugguacugcgacaacgccggaucugucucauucuucccccaagccgaaaccugcaaaguccaauccaaccgcgucuucugcgacaccaugaacucgagaacccucccuuccgaagucaaccuaugcaacgucgacauuuucaaccccaaauacgacugcaaaaucaugaccucgaaaaccgacguaucauccagcgucaucaccagccuaggcgcaaucgugagcugcuacggcaaaaccaaaugcaccgcgagcaauaaaaaccgcgggaucaucaaaacuuucuccaacggcugcgacuacgucuccaacaagggagucgauaccgucuccguaggcaacacccucuacugcgucaacaaacaagaaggcaaaucacuauacguaaaaggcgagccaaucauaaacuucuacgacccucuaguuuucccauccgacgaguucgacgcuagcaucucccaagucaacgagaaaaucaaccaaucccucgcauucauccgcaaauccgacgaacuccuccacaacguaaacgcaggcaaaucaacuacuaauauaaugaucacaaccaucauaauagucauaaucguaauccuccuaucccucaucgccgucggacuacugcucuacugcaaagcccgcuaaggacuaguaauaaggaaacuguaugaaugucugugggcaggaagugaagagauccuucuguaaagguuuuuggaauuaugucugcugaauaauaaacuuuuuugaaauaauaaaucugguagaaaaaugagaucuaaaaaaaaaaaaaaaaaaaaaaaaaaaaaaaaaaaaaaaaaaaaaaaaaaaaaaaaaaaaaaaaugcaucccccccccccccccccccccccccccccccaaaggcucuuuucagagccaccagaauu

SEQ ID NO: 5230 - RNA, 2136 nt, Artificial Sequence
  mRNA product Design g-3 comprising derived and/or modified sequence from HRSV(A2)__F-del_DSCav1_mut4 (opt1)
gggagaguccgcucagccagguugcagaagcggcuuagcguguguccuaaucuucucucugcguguagguaggccugugccgcaaacaagcuuaccauggagcugcucauccugaaggccaacgccaucaccaccauccugacggcggugaccuucugcuucgccagcggccagaacaucaccgaggaguucuaccaguccacgugcagcgccgucuccaagggguaccucagcgcccugcggaccggcugguacaccuccgugaucaccaucgagcugagcaacaucaaggagaacaagugcaacgggaccgacgccaaggugaagcucaucaagcaggagcuggacaaguacaagaacgcggucacggagcugcagcuccugaugcaguccaccccggcaaccggcuccggcuccgccaucugcagcggcgucgccgugugcaaggugcugcaccucgagggggaggucaacaagaucaagagcgcccugcuguccaccaacaaggccguggugagccucuccaacggcgucagcgugcugaccuucaaggugcuggaccucaagaacuacaucgacaagcagcugcugcccauccugaacaagcagagcugcuccaucagcaacaucgagacggugaucgaguuccagcagaagaacaaccggcuccuggagaucacccgcgaguucagcgugaacgccggggucaccacccccguguccacguacaugcugaccaacagcgagcuccugucccugaucaacgacaugccgaucaccaacgaccagaagaagcucaugagcaacaacgugcagaucguccggcagcaguccuacagcaucaugugcaucaucaaggaggaggugcuggcguacgugguccagcugccccucuacggcgugaucgacacccccugcuggaagcugcacacgagcccccugugcaccaccaacaccaaggagggguccaacaucugccucacgcgcaccgaccggggcugguacugcgacaacgccggcagcgucuccuucuucccgcaggccgagaccugcaaggugcagagcaaccgcguguucugcgacaccaugaacucccggacgcugcccagcgagguaaaccucugcaacgucgacaucuucaaccccaaguacgacugcaagaucaugaccuccaagaccgacgugagcuccagcgugaucaccucccugggggccaucgucagcugcuacggcaagacgaagugcaccgccagcaacaagaaccgggggaucaucaagaccuucuccaacggcugcgacuacgugagcaacaagggcguggacaccguguccgucgggaacacccuguacugcgugaacaagcaggagggcaagagccucuacgugaagggggagcccaucaucaacuucuacgacccgcuggucuuccccuccgacgaguucgacgcgagcaucucccaggugaacgagaagaucaaccagagccuggccuucauccgcaaguccgacgagcugcuccacaacgugaacgccggcaagagcacgaccaacaucaugaucaccaccaucaucaucgucaucaucgugauccugcugucccucaucgccguggggcugcugcucuacugcaaggcccggugaggacuagugaagggaacacccaaauuuaauucagccuuaagcacaauuaauuaagagugaaacguaauuguacaagcaguuggucacccaccauagggcaugaucaacaccgcaaccuuuccuuuuucccccagugauucugaaaaaccccucuucccuucagcuugcuuagauguuccaaauuuaguaagcuuaaggcggccuacagaagaaaaagaaaaaaaaggccacaaaaguucccucucacuuucaguaaauaaaauaaaagcagcaacagaaauaaagaaauaaaugaaauucaaaaugaaauaaauauuguguugugcagcauuaaaaaaucaauaaaaauuaaaaaugagcaagaucuaaaaaaaaaaaaaaaaaaaaaaaaaaaaaaaaaaaaaaaaaaaaaaaaaaaaaaaaaaaaaaaaugcaucccccccccccccccccccccccccccccccaaaggcucuuuucagagccaccagaauu

SEQ ID NO: 5231 - RNA, 2136 nt, Artificial Sequence
  mRNA product Design g-3 comprising derived and/or modified sequence from HRSV(A2)__F-del_DSCav1_mut4 (opt1)
gggagaguccgcucagccagguugcagaagcggcuuagcguguguccuaaucuucucucugcguguagguaggccugugccgcaaacaagcuuaccauggagcugcucauccugaaggccaacgccaucaccaccauccugacggcggugaccuucugcuucgccagcggccagaacaucaccgaggaguucuaccaguccacgugcagcgccgucuccaagggguaccucagcgcccugcgcaccggcugguacaccuccgugaucaccaucgagcugagcaacaucaaggagaacaagugcaacgggaccgacgccaaggugaagcucaucaagcaggagcuggacaaguacaagaacgcggucacggagcugcagcuccugaugcaguccacccccgccaccggcagcggguccgccaucugcagcggcguggccgugugcaagguccugcaccucgagggcgaggugaacaagaucaaguccgcgcugcugagcaccaacaaggccguggucucccucagcaacgggguguccgugcugacguucaagguccuggaccucaagaacuacaucgacaagcagcugcugccgauccucaacaagcagagcugcuccaucagcaacaucgagaccgugaucgaguuccagcagaagaacaaccggcugcuggagaucacccgcgaguucuccgugaacgccggcgucaccacgcccgugagcaccuacaugcucaccaacagcgagcugcugucccucaucaacgacaugcccaucaccaacgaccagaagaagcugaugagcaacaacgugcagaucguccggcagcaguccuacagcaucaugugcaucaucaaggaggaggugcuggccuacgugguccagcucccccuguacggggugaucgacacgccgugcuggaagcugcacaccagcccccucugcaccaccaacacgaaggagggcuccaacaucugccugacccgcaccgaccgggggugguacugcgacaacgccggcuccgugagcuucuucccccaggcggagaccugcaagguccaguccaaccgcguguucugcgacacgaugaacagccggacccuccccuccgaggucaaccugugcaacguggacaucuucaacccgaaguacgacugcaagaucaugaccagcaagaccgacguguccagcuccgucaucacgagccugggcgccaucguguccugcuacgggaagaccaagugcaccgccagcaacaagaaccggggcaucaucaagaccuucuccaacgggugcgacuacgugagcaacaagggcgucgacacggugagcgugggcaacacccucuacugcgucaacaagcaggaggggaagucccuguacgugaagggcgagcccaucaucaacuucuacgacccccugguguuccccagcgacgaguucgacgccuccaucagccaggucaacgagaagaucaaccagucccucgccuucauccgcaagagcgacgagcugcugcacaacgugaacgcggggaaguccaccaccaacaucaugaucaccacgaucaucaucgugaucaucgucauccuccugagccugaucgccgugggccuccugcuguacugcaaggcccggugaggacuagugaagggaacacccaaauuuaauucagccuuaagcacaauuaauuaagagugaaacguaauuguacaagcaguuggucacccaccauagggcaugaucaacaccgcaaccuuuccuuuuucccccagugauucugaaaaaccccucuucccuucagcuugcuuagauguuccaaauuuaguaagcuuaaggcggccuacagaagaaaaagaaaaaaaaggccacaaaaguucccucucacuuucaguaaauaaaauaaaagcagcaacagaaauaaagaaauaaaugaaauucaaaaugaaauaaauauuguguugugcagcauuaaaaaaucaauaaaaauuaaaaaugagcaagaucuaaaaaaaaaaaaaaaaaaaaaaaaaaaaaaaaaaaaaaaaaaaaaaaaaaaaaaaaaaaaaaaaugcaucccccccccccccccccccccccccccccccaaaggcucuuuucagagccaccagaauu

SEQ ID NO: 5232 - RNA, 2136 nt, Artificial Sequence
  mRNA product Design g-3 comprising derived and/or modified sequence from HRSV(A2)__F-del_DSCav1_mut4 (opt2)
gggagaguccgcucagccagguugcagaagcggcuuagcguguguccuaaucuucucucugcguguagguaggccugugccgcaaacaagcuuaccauggagcuccucauccucaaggccaacgccaucaccaccauccucaccgccgucaccuucugcuucgccuccggccagaacaucaccgaggaguucuaccaguccaccugcuccgccgucuccaagggcuaccucuccgcccuccgcaccggcugguacaccuccgucaucaccaucgagcucuccaacaucaaggagaacaagugcaacggcaccgacgccaaggucaagcucaucaagcaggagcucgacaaguacaagaacgccgucaccgagcuccagcuccucaugcaguccacccccgccaccggcuccggcuccgccaucugcuccggcgucgccgucugcaagguccuccaccucgagggcgaggucaacaagaucaaguccgcccuccucuccaccaacaaggccgucgucucccucuccaacggcgucuccguccucaccuucaagguccucgaccucaagaacuacaucgacaagcagcuccuccccauccucaacaagcaguccugcuccaucuccaacaucgagaccgucaucgaguuccagcagaagaacaaccgccuccucgagaucacccgcgaguucuccgucaacgccggcgucaccacccccgucuccaccuacaugcucaccaacuccgagcuccucucccucaucaacgacaugcccaucaccaacgaccagaagaagcucauguccaacaacguccagaucguccgccagcaguccuacuccaucaugugcaucaucaaggaggagguccucgccuacgucguccagcucccccucuacggcgucaucgacacccccugcuggaagcuccacaccuccccccucugcaccaccaacaccaaggagggcuccaacaucugccucacccgcaccgaccgcggcugguacugcgacaacgccggcuccgucuccuucuucccccaggccgagaccugcaagguccaguccaaccgcgucuucugcgacaccaugaacucccgcacccuccccuccgaggucaaccucugcaacgucgacaucuucaaccccaaguacgacugcaagaucaugaccuccaagaccgacgucuccuccuccgucaucaccucccucggcgccaucgucuccugcuacggcaagaccaagugcaccgccuccaacaagaaccgcggcaucaucaagaccuucuccaacggcugcgacuacgucuccaacaagggcgucgacaccgucuccgucggcaacacccucuacugcgucaacaagcaggagggcaagucccucuacgucaagggcgagcccaucaucaacuucuacgacccccucgucuuccccuccgacgaguucgacgccuccaucucccaggucaacgagaagaucaaccagucccucgccuucauccgcaaguccgacgagcuccuccacaacgucaacgccggcaaguccaccaccaacaucaugaucaccaccaucaucaucgucaucaucgucauccuccucucccucaucgccgucggccuccuccucuacugcaaggcccgcugaggacuagugaagggaacacccaaauuuaauucagccuuaagcacaauuaauuaagagugaaacguaauuguacaagcaguuggucacccaccauagggcaugaucaacaccgcaaccuuuccuuuuucccccagugauucugaaaaaccccucuucccuucagcuugcuuagauguuccaaauuuaguaagcuuaaggcggccuacagaagaaaaagaaaaaaaaggccacaaaaguucccucucacuuucaguaaauaaaauaaaagcagcaacagaaauaaagaaauaaaugaaauucaaaaugaaauaaauauuguguugugcagcauuaaaaaaucaauaaaaauuaaaaaugagcaagaucuaaaaaaaaaaaaaaaaaaaaaaaaaaaaaaaaaaaaaaaaaaaaaaaaaaaaaaaaaaaaaaaaugcaucccccccccccccccccccccccccccccccaaaggcucuuuucagagccaccagaauu

SEQ ID NO: 5233 - RNA, 2136 nt, Artificial Sequence
  mRNA product Design g-3 comprising derived and/or modified sequence from HRSV(A2)__F-del_DSCav1_mut4 (opt3)
gggagaguccgcucagccagguugcagaagcggcuuagcguguguccuaaucuucucucugcguguagguaggccugugccgcaaacaagcuuaccauggagcugcucauccuuaaggccaacgcuauuaccacaauacugacugcagugacguucugcuuugccagcggccagaauaucaccgaagaguucuaccaauccacauguucugcggucucaaaaggguauuugagugcuuuaagaacuggaugguacaccagcguuauuacaaucgaacuguccaacauuaaggagaauaaaugcaacgguaccgacgccaaggugaaacuaaucaagcaggaacucgauaaguauaaaaaugcaguaacugagcugcagcuucugaugcagucuacacccgccaccggcucggggucagcuauauguagcggaguggcagucugcaagguguugcaccucgagggcgaaguuaacaaaaucaagagugcccugcuguccacgaauaaagcuguggucucucucagcaacgguguguccguauuaacuuuuaagguucuggaccuuaagaauuacauugauaaacaauugcugccuauccuaaacaagcagucauguaguauuagcaauaucgagaccgugauagaguuccagcagaaaaacaauaggcuccuggaaauuacacgggaguuuucugucaacgccggggugacuaccccaguguccacauauaugcuuaccaauucagaacuguugagccucaucaacgacaugccgauuacgaacgaucaaaagaaacugaugaguaauaacguccagaucguucgccagcagucuuacuccaucaugugcauuauaaaggaggaaguguuagcguauguagugcaacugccccucuacggagucaucgacacuccuuguuggaaacuucauacaagcccacugugcaccacuaauacaaaggagggcucgaacauuuguuugacccgaacggaucguggcugguacugcgacaaugcagggucuguguccuucuuuccccaggccgaaaccuguaagguucagucaaacagaguguucugcgauacaaugaauaguagaacucugccuagcgaggucaaccucugcaauguggacaucuuuaacccaaaauaugauuguaagauaaugaccuccaaaacagacguaucuagcucaguuauuaccagucugggagcuaucguguccugcuacgguaagacuaaauguacagccagcaauaagaacaggggcaucauuaagaccuucucuaaugggugcgauuaugucucaaacaaaggaguggacacugucagugugggcaauacgcuuuacuguguuaacaagcaagaggguaaaagccuguaugugaagggggaacccaucauuaacuuuuacgacccuuugguauucccauccgaugaguuugacgcaucuauaucgcaggucaaugagaaaaucaaccagagccucgcuuucauucggaaguccgaugaacuguuacacaaugugaacgccggaaagucaacaaccaauaucaugaucacuaccauuauaaucguuauuaucgugauucugcuaagucucaucgcggucggccugcuuuuguauugcaaagcccgcugaggacuagugaagggaacacccaaauuuaauucagccuuaagcacaauuaauuaagagugaaacguaauuguacaagcaguuggucacccaccauagggcaugaucaacaccgcaaccuuuccuuuuucccccagugauucugaaaaaccccucuucccuucagcuugcuuagauguuccaaauuuaguaagcuuaaggcggccuacagaagaaaaagaaaaaaaaggccacaaaaguucccucucacuuucaguaaauaaaauaaaagcagcaacagaaauaaagaaauaaaugaaauucaaaaugaaauaaauauuguguugugcagcauuaaaaaaucaauaaaaauuaaaaaugagcaagaucuaaaaaaaaaaaaaaaaaaaaaaaaaaaaaaaaaaaaaaaaaaaaaaaaaaaaaaaaaaaaaaaaugcaucccccccccccccccccccccccccccccccaaaggcucuuuucagagccaccagaauu

SEQ ID NO: 5234 - RNA, 2136 nt, Artificial Sequence
  mRNA product Design g-3 comprising derived and/or modified sequence from HRSV(A2)__F-del_DSCav1_mut4 (opt4)
gggagaguccgcucagccagguugcagaagcggcuuagcguguguccuaaucuucucucugcguguagguaggccugugccgcaaacaagcuuaccauggagcugcugauccugaaggccaacgccaucaccaccauccugaccgccgugaccuucugcuucgccagcggccagaacaucaccgaggaguucuaccagagcaccugcagcgccgugagcaagggcuaccugagcgcccugagaaccggcugguacaccagcgugaucaccaucgagcugagcaacaucaaggagaacaagugcaacggcaccgacgccaaggugaagcugaucaagcaggagcuggacaaguacaagaacgccgugaccgagcugcagcugcugaugcagagcacccccgccaccggcagcggcagcgccaucugcagcggcguggccgugugcaaggugcugcaccuggagggcgaggugaacaagaucaagagcgcccugcugagcaccaacaaggccguggugagccugagcaacggcgugagcgugcugaccuucaaggugcuggaccugaagaacuacaucgacaagcagcugcugcccauccugaacaagcagagcugcagcaucagcaacaucgagaccgugaucgaguuccagcagaagaacaacagacugcuggagaucaccagagaguucagcgugaacgccggcgugaccacccccgugagcaccuacaugcugaccaacagcgagcugcugagccugaucaacgacaugcccaucaccaacgaccagaagaagcugaugagcaacaacgugcagaucgugagacagcagagcuacagcaucaugugcaucaucaaggaggaggugcuggccuacguggugcagcugccccuguacggcgugaucgacacccccugcuggaagcugcacaccagcccccugugcaccaccaacaccaaggagggcagcaacaucugccugaccagaaccgacagaggcugguacugcgacaacgccggcagcgugagcuucuucccccaggccgagaccugcaaggugcagagcaacagaguguucugcgacaccaugaacagcagaacccugcccagcgaggugaaccugugcaacguggacaucuucaaccccaaguacgacugcaagaucaugaccagcaagaccgacgugagcagcagcgugaucaccagccugggcgccaucgugagcugcuacggcaagaccaagugcaccgccagcaacaagaacagaggcaucaucaagaccuucagcaacggcugcgacuacgugagcaacaagggcguggacaccgugagcgugggcaacacccuguacugcgugaacaagcaggagggcaagagccuguacgugaagggcgagcccaucaucaacuucuacgacccccugguguuccccagcgacgaguucgacgccagcaucagccaggugaacgagaagaucaaccagagccuggccuucaucagaaagagcgacgagcugcugcacaacgugaacgccggcaagagcaccaccaacaucaugaucaccaccaucaucaucgugaucaucgugauccugcugagccugaucgccgugggccugcugcuguacugcaaggccagaugaggacuagugaagggaacacccaaauuuaauucagccuuaagcacaauuaauuaagagugaaacguaauuguacaagcaguuggucacccaccauagggcaugaucaacaccgcaaccuuuccuuuuucccccagugauucugaaaaaccccucuucccuucagcuugcuuagauguuccaaauuuaguaagcuuaaggcggccuacagaagaaaaagaaaaaaaaggccacaaaaguucccucucacuuucaguaaauaaaauaaaagcagcaacagaaauaaagaaauaaaugaaauucaaaaugaaauaaauauuguguugugcagcauuaaaaaaucaauaaaaauuaaaaaugagcaagaucuaaaaaaaaaaaaaaaaaaaaaaaaaaaaaaaaaaaaaaaaaaaaaaaaaaaaaaaaaaaaaaaaugcaucccccccccccccccccccccccccccccccaaaggcucuuuucagagccaccagaauu

SEQ ID NO: 5235 - RNA, 2136 nt, Artificial Sequence
  mRNA product Design g-3 comprising derived and/or modified sequence from HRSV(A2)__F-del_DSCav1_mut4 (opt5)
gggagaguccgcucagccagguugcagaagcggcuuagcguguguccuaaucuucucucugcguguagguaggccugugccgcaaacaagcuuaccauggagcugcucauccugaaggccaacgcuauuaccacaauccuuacggccgugaccuucugcuuugcgagcggccagaauauuacagaagaguucuaccaauccaccuguucugcugucagcaaaggguaucuguccgcccucagaacaggaugguacaccucuguuaucacaauugaacugagcaacaucaaggagaauaaaugcaacggcaccgacgccaaggugaaacuuaucaagcaggaacuggauaaguauaaaaaugcugugacggagcuccagcugcugaugcaguccacccccgccacagggucuggaagcgcuauuuguuccggcgucgccgugugcaagguucuccaccuggagggggaagugaacaaaaucaagagcgcgcuucugucuaccaauaaagccgucgugucccucagcaacggaguuucugugcugacauuuaagguccuugaccugaagaauuacauugauaaacaacuccugccuauccugaacaagcaguccuguagcauuucuaauaucgagaccgugauugaguuccagcagaaaaacaaucggcuccuggaaaucacgcgcgaguuuuccgugaacgcuggcgucacaaccccgguuagcacauauaugcuuaccaauuccgaacugcucucucugaucaacgacaugcccauuaccaacgaucaaaagaaacuuaugagcaauaacgugcagaucgugagacagcaguccuacagcauuaugugcaucauuaaggaggaaguccuggccuaugugguucaacucccucuguacggcgugaucgacacacccuguuggaaacugcauacgucuccucucugcaccacaaauaccaaggagggguccaacaucugucugacacggaccgaucgcggaugguacugcgacaaugcuggcagcgucucuuucuuuccccaggccgaaacguguaaggugcagagcaacagaguuuucugcgauacaaugaacuccagaacccugccuucugaggugaaucucugcaaugucgacauuuuuaacccgaaauaugauuguaagaucaugaccagcaaaacagacguguccagcucugucauuaccucccugggggcgaucgugagcugcuacggaaagacaaaauguacggccucuaauaagaaccggggcauuaucaagaccuucuccaaugggugcgauuauguuagcaacaaaggaguggacacagucuccgugggcaauacccuuuacuguguuaacaagcaagagggcaaaucucuguaugugaagggggaacccaucauuaacuuuuacgacccucucgucuuccccagcgaugaguuugacgcuuccaucucucaggugaaugagaaaauuaaccagagccuggccuucauccgcaaguccgaugaacugcuccacaaugugaacgcuggaaagagcacaaccaauauuaugaucacgaccauuaucaucguuauuaucgucauucugcuuucucugaucgccgugggccuccugcuguauugcaaagccagaugaggacuagugaagggaacacccaaauuuaauucagccuuaagcacaauuaauuaagagugaaacguaauuguacaagcaguuggucacccaccauagggcaugaucaacaccgcaaccuuuccuuuuucccccagugauucugaaaaaccccucuucccuucagcuugcuuagauguuccaaauuuaguaagcuuaaggcggccuacagaagaaaaagaaaaaaaaggccacaaaaguucccucucacuuucaguaaauaaaauaaaagcagcaacagaaauaaagaaauaaaugaaauucaaaaugaaauaaauauuguguugugcagcauuaaaaaaucaauaaaaauuaaaaaugagcaagaucuaaaaaaaaaaaaaaaaaaaaaaaaaaaaaaaaaaaaaaaaaaaaaaaaaaaaaaaaaaaaaaaaugcaucccccccccccccccccccccccccccccccaaaggcucuuuucagagccaccagaauu

SEQ ID NO: 5236 - RNA, 2136 nt, Artificial Sequence
  mRNA product Design g-3 comprising derived and/or modified sequence from HRSV(A2)__F-del_DSCav1_mut4 (opt6)
gggagaguccgcucagccagguugcagaagcggcuuagcguguguccuaaucuucucucugcguguagguaggccugugccgcaaacaagcuuaccauggaacuuuuaauacuaaaagcuaacgccauaaccacuauacuaacagcagucacauucugcuucgcaucaggccaaaacauaaccgaagaauuuuaccaauccacuuguucagcagucuccaaaggauauuuauccgcacuucguacaggaugguauacaucaguaauaacaauagaacucuccaacauaaaagaaaauaaaugcaacggcaccgacgcaaaaguaaaacucaucaaacaagaauuagacaaauacaagaacgccguaacagaacuacaauuacuaaugcaaucaacacccgccacaggaucaggaucugcaauaugcucuggaguagcaguaugcaaaguauuacaccuagaaggagaaguaaacaaaaucaaaagcgcacuacuauccacaaacaaagcuguaguaucacuaucaaacggaguaucaguauuaacuuucaaaguacuugaucuaaaaaacuacauagacaaacaacuacuacccauauuaaacaaacaaucaugcucaauaagcaauauagaaacaguaauagaauuucaacaaaaaaacaacagacuacuagaaaucacaagggaauuuucaguaaaugccgguguuacaaccccaguaucaacauacaugcuaacuaacucagaacuacuauccuuaauaaacgauaugccaauaacaaacgaucaaaaaaaacuaauguccaacaacguacaaauaguaagacaacaaucauacucaaucaugugcauuauaaaagaagaagucuuagcauacguaguacaauuaccacuauacgguguaauagauacaccauguuggaaauuacacacaagcccacuaugcacaacuaacacaaaagaaggcucaaauauauguuuaacaagaacagaccgagguugguacugcgacaaugcaggaucaguaucauucuuuccacaagcagaaacauguaaaguucaauccaacagaguauucugcgacacaaugaacuccagaacacuaccuucagaaguaaaccucuguaacguagacauauuuaaucccaaguacgacugcaaaauaaugacaucgaaaacagacguaagcuccucagugauaacaucccucggcgccaucguauccuguuacgguaaaacuaaauguaccgccucaaacaaaaaccgcgguauuauaaaaacuuuuucuaauggcugcgauuacguaagcaacaaaggcgucgacacaguuuccguaggaaacacacuauacugcguaaacaaacaagaagguaaaucucuauacguaaaaggagaaccaauaauaaauuucuaugauccuuuaguauucccauccgaugaauuugacgccucuaucucacaagucaacgaaaaaauaaaucaaucauuagcauucauacgaaaaucagacgaacuacuacacaacguaaacgcaggaaaaucaacaaccaacauaaugauaaccacaauaauaauaguuauuauagugauacuauuauccuuaauugcagucggacuauuauuauacuguaaagcacgcuaaggacuagugaagggaacacccaaauuuaauucagccuuaagcacaauuaauuaagagugaaacguaauuguacaagcaguuggucacccaccauagggcaugaucaacaccgcaaccuuuccuuuuucccccagugauucugaaaaaccccucuucccuucagcuugcuuagauguuccaaauuuaguaagcuuaaggcggccuacagaagaaaaagaaaaaaaaggccacaaaaguucccucucacuuucaguaaauaaaauaaaagcagcaacagaaauaaagaaauaaaugaaauucaaaaugaaauaaauauuguguugugcagcauuaaaaaaucaauaaaaauuaaaaaugagcaagaucuaaaaaaaaaaaaaaaaaaaaaaaaaaaaaaaaaaaaaaaaaaaaaaaaaaaaaaaaaaaaaaaaugcaucccccccccccccccccccccccccccccccaaaggcucuuuucagagccaccagaauu

SEQ ID NO: 5237 - RNA, 2136 nt, Artificial Sequence
  mRNA product Design g-3 comprising derived and/or modified sequence from HRSV(A2)__F-del_DSCav1_mut4 (opt11)
gggagaguccgcucagccagguugcagaagcggcuuagcguguguccuaaucuucucucugcguguagguaggccugugccgcaaacaagcuuaccauggaacuccucauccucaaagccaaugccaucaccacaauccugacagcaguaaccuucugcuucgcauccggacaaaacaucaccgaagaauuuuaccagucaaccugcuccgcugucucaaaaggcuaccucucagcccuucgcaccggcugguacaccucggucauaacaauagaacucuccaauaucaaagaaaacaaaugcaacggcacugacgccaagguaaaacucaucaaacaggaacucgauaaauacaagaacgccguaacagaacuacaacuacucaugcaaucaacaccggccaccggcuccgguuccgccauaugcuccggaguggccgugugcaagguccuccaccuugaaggggaaguuaacaaaaucaaaucagcccuccucuccacuaacaaagccguaguaucccuaagcaacgguguauccguccucaccuucaaaguacuagaccuaaagaauuauaucgacaaacaacuccuccccauacucaacaaacaauccugcuccauaagcaacaucgaaacagucaucgaguuccagcagaaaaacaaccgacuccucgaaauaacccgcgaguucucagucaacgccggagucaccacacccgucagcaccuacaugcugaccaacuccgaacuccucuccuuaaucaaugacaugcccaucaccaaugaccaaaagaaacucaugucaaacaacguccaaauaguacgccaacaauccuacuccaucaugugcaucauaaaagaagaaguacucgccuacgucguccaacucccccucuacggcguaaucgacacccccugcuggaaacuacacacaagcccccucugcaccacaaacacuaaagagggcuccaacaucugucuaacccgcaccgaucgaggcugguacugcgacaacgccggaucugucucauucuucccccaagccgaaaccugcaaaguccaauccaaccgcgucuucugcgacaccaugaacucgagaacccucccuuccgaagucaaccuaugcaacgucgacauuuucaaccccaaauacgacugcaaaaucaugaccucgaaaaccgacguaucauccagcgucaucaccagccuaggcgcaaucgugagcugcuacggcaaaaccaaaugcaccgcgagcaauaaaaaccgcgggaucaucaaaacuuucuccaacggcugcgacuacgucuccaacaagggagucgauaccgucuccguaggcaacacccucuacugcgucaacaaacaagaaggcaaaucacuauacguaaaaggcgagccaaucauaaacuucuacgacccucuaguuuucccauccgacgaguucgacgcuagcaucucccaagucaacgagaaaaucaaccaaucccucgcauucauccgcaaauccgacgaacuccuccacaacguaaacgcaggcaaaucaacuacuaauauaaugaucacaaccaucauaauagucauaaucguaauccuccuaucccucaucgccgucggacuacugcucuacugcaaagcccgcuaaggacuagugaagggaacacccaaauuuaauucagccuuaagcacaauuaauuaagagugaaacguaauuguacaagcaguuggucacccaccauagggcaugaucaacaccgcaaccuuuccuuuuucccccagugauucugaaaaaccccucuucccuucagcuugcuuagauguuccaaauuuaguaagcuuaaggcggccuacagaagaaaaagaaaaaaaaggccacaaaaguucccucucacuuucaguaaauaaaauaaaagcagcaacagaaauaaagaaauaaaugaaauucaaaaugaaauaaauauuguguugugcagcauuaaaaaaucaauaaaaauuaaaaaugagcaagaucuaaaaaaaaaaaaaaaaaaaaaaaaaaaaaaaaaaaaaaaaaaaaaaaaaaaaaaaaaaaaaaaaugcaucccccccccccccccccccccccccccccccaaaggcucuuuucagagccaccagaauu

SEQ ID NO: 5238 - RNA, 1931 nt, Artificial Sequence
  mRNA product Design g-4 comprising derived and/or modified sequence from HRSV(A2)__F-del_DSCav1_mut4 (opt1)
gggagacuccugucgggcggaaguaggaggaguagaguuuaaaaacaguacucuuuuuccgguucgggacguaguugaagcaacgacaagccggauaaccgcucuugagacaggaagcuuaccauggagcugcucauccugaaggccaacgccaucaccaccauccugacggcggugaccuucugcuucgccagcggccagaacaucaccgaggaguucuaccaguccacgugcagcgccgucuccaagggguaccucagcgcccugcggaccggcugguacaccuccgugaucaccaucgagcugagcaacaucaaggagaacaagugcaacgggaccgacgccaaggugaagcucaucaagcaggagcuggacaaguacaagaacgcggucacggagcugcagcuccugaugcaguccaccccggcaaccggcuccggcuccgccaucugcagcggcgucgccgugugcaaggugcugcaccucgagggggaggucaacaagaucaagagcgcccugcuguccaccaacaaggccguggugagccucuccaacggcgucagcgugcugaccuucaaggugcuggaccucaagaacuacaucgacaagcagcugcugcccauccugaacaagcagagcugcuccaucagcaacaucgagacggugaucgaguuccagcagaagaacaaccggcuccuggagaucacccgcgaguucagcgugaacgccggggucaccacccccguguccacguacaugcugaccaacagcgagcuccugucccugaucaacgacaugccgaucaccaacgaccagaagaagcucaugagcaacaacgugcagaucguccggcagcaguccuacagcaucaugugcaucaucaaggaggaggugcuggcguacgugguccagcugccccucuacggcgugaucgacacccccugcuggaagcugcacacgagcccccugugcaccaccaacaccaaggagggguccaacaucugccucacgcgcaccgaccggggcugguacugcgacaacgccggcagcgucuccuucuucccgcaggccgagaccugcaaggugcagagcaaccgcguguucugcgacaccaugaacucccggacgcugcccagcgagguaaaccucugcaacgucgacaucuucaaccccaaguacgacugcaagaucaugaccuccaagaccgacgugagcuccagcgugaucaccucccugggggccaucgucagcugcuacggcaagacgaagugcaccgccagcaacaagaaccgggggaucaucaagaccuucuccaacggcugcgacuacgugagcaacaagggcguggacaccguguccgucgggaacacccuguacugcgugaacaagcaggagggcaagagccucuacgugaagggggagcccaucaucaacuucuacgacccgcuggucuuccccuccgacgaguucgacgcgagcaucucccaggugaacgagaagaucaaccagagccuggccuucauccgcaaguccgacgagcugcuccacaacgugaacgccggcaagagcacgaccaacaucaugaucaccaccaucaucaucgucaucaucgugauccugcugucccucaucgccguggggcugcugcucuacugcaaggcccggugaggacuaguaauaaggaaacuguaugaaugucugugggcaggaagugaagagauccuucuguaaagguuuuuggaauuaugucugcugaauaauaaacuuuuuugaaauaauaaaucugguagaaaaaugagaucuaaaaaaaaaaaaaaaaaaaaaaaaaaaaaaaaaaaaaaaaaaaaaaaaaaaaaaaaaaaaaaaaugcaucccccccccccccccccccccccccccccccaaaggcucuuuucagagccaccagaauu

SEQ ID NO: 5239 - RNA, 1931 nt, Artificial Sequence
  mRNA product Design g-4 comprising derived and/or modified sequence from HRSV(A2)__F-del_DSCav1_mut4 (opt1)
gggagacuccugucgggcggaaguaggaggaguagaguuuaaaaacaguacucuuuuuccgguucgggacguaguugaagcaacgacaagccggauaaccgcucuugagacaggaagcuuaccauggagcugcucauccugaaggccaacgccaucaccaccauccugacggcggugaccuucugcuucgccagcggccagaacaucaccgaggaguucuaccaguccacgugcagcgccgucuccaagggguaccucagcgcccugcgcaccggcugguacaccuccgugaucaccaucgagcugagcaacaucaaggagaacaagugcaacgggaccgacgccaaggugaagcucaucaagcaggagcuggacaaguacaagaacgcggucacggagcugcagcuccugaugcaguccacccccgccaccggcagcggguccgccaucugcagcggcguggccgugugcaagguccugcaccucgagggcgaggugaacaagaucaaguccgcgcugcugagcaccaacaaggccguggucucccucagcaacgggguguccgugcugacguucaagguccuggaccucaagaacuacaucgacaagcagcugcugccgauccucaacaagcagagcugcuccaucagcaacaucgagaccgugaucgaguuccagcagaagaacaaccggcugcuggagaucacccgcgaguucuccgugaacgccggcgucaccacgcccgugagcaccuacaugcucaccaacagcgagcugcugucccucaucaacgacaugcccaucaccaacgaccagaagaagcugaugagcaacaacgugcagaucguccggcagcaguccuacagcaucaugugcaucaucaaggaggaggugcuggccuacgugguccagcucccccuguacggggugaucgacacgccgugcuggaagcugcacaccagcccccucugcaccaccaacacgaaggagggcuccaacaucugccugacccgcaccgaccgggggugguacugcgacaacgccggcuccgugagcuucuucccccaggcggagaccugcaagguccaguccaaccgcguguucugcgacacgaugaacagccggacccuccccuccgaggucaaccugugcaacguggacaucuucaacccgaaguacgacugcaagaucaugaccagcaagaccgacguguccagcuccgucaucacgagccugggcgccaucguguccugcuacgggaagaccaagugcaccgccagcaacaagaaccggggcaucaucaagaccuucuccaacgggugcgacuacgugagcaacaagggcgucgacacggugagcgugggcaacacccucuacugcgucaacaagcaggaggggaagucccuguacgugaagggcgagcccaucaucaacuucuacgacccccugguguuccccagcgacgaguucgacgccuccaucagccaggucaacgagaagaucaaccagucccucgccuucauccgcaagagcgacgagcugcugcacaacgugaacgcggggaaguccaccaccaacaucaugaucaccacgaucaucaucgugaucaucgucauccuccugagccugaucgccgugggccuccugcuguacugcaaggcccggugaggacuaguaauaaggaaacuguaugaaugucugugggcaggaagugaagagauccuucuguaaagguuuuuggaauuaugucugcugaauaauaaacuuuuuugaaauaauaaaucugguagaaaaaugagaucuaaaaaaaaaaaaaaaaaaaaaaaaaaaaaaaaaaaaaaaaaaaaaaaaaaaaaaaaaaaaaaaaugcaucccccccccccccccccccccccccccccccaaaggcucuuuucagagccaccagaauu

SEQ ID NO: 5240 - RNA, 1931 nt, Artificial Sequence
  mRNA product Design g-4 comprising derived and/or modified sequence from HRSV(A2)__F-del_DSCav1_mut4 (opt2)
gggagacuccugucgggcggaaguaggaggaguagaguuuaaaaacaguacucuuuuuccgguucgggacguaguugaagcaacgacaagccggauaaccgcucuugagacaggaagcuuaccauggagcuccucauccucaaggccaacgccaucaccaccauccucaccgccgucaccuucugcuucgccuccggccagaacaucaccgaggaguucuaccaguccaccugcuccgccgucuccaagggcuaccucuccgcccuccgcaccggcugguacaccuccgucaucaccaucgagcucuccaacaucaaggagaacaagugcaacggcaccgacgccaaggucaagcucaucaagcaggagcucgacaaguacaagaacgccgucaccgagcuccagcuccucaugcaguccacccccgccaccggcuccggcuccgccaucugcuccggcgucgccgucugcaagguccuccaccucgagggcgaggucaacaagaucaaguccgcccuccucuccaccaacaaggccgucgucucccucuccaacggcgucuccguccucaccuucaagguccucgaccucaagaacuacaucgacaagcagcuccuccccauccucaacaagcaguccugcuccaucuccaacaucgagaccgucaucgaguuccagcagaagaacaaccgccuccucgagaucacccgcgaguucuccgucaacgccggcgucaccacccccgucuccaccuacaugcucaccaacuccgagcuccucucccucaucaacgacaugcccaucaccaacgaccagaagaagcucauguccaacaacguccagaucguccgccagcaguccuacuccaucaugugcaucaucaaggaggagguccucgccuacgucguccagcucccccucuacggcgucaucgacacccccugcuggaagcuccacaccuccccccucugcaccaccaacaccaaggagggcuccaacaucugccucacccgcaccgaccgcggcugguacugcgacaacgccggcuccgucuccuucuucccccaggccgagaccugcaagguccaguccaaccgcgucuucugcgacaccaugaacucccgcacccuccccuccgaggucaaccucugcaacgucgacaucuucaaccccaaguacgacugcaagaucaugaccuccaagaccgacgucuccuccuccgucaucaccucccucggcgccaucgucuccugcuacggcaagaccaagugcaccgccuccaacaagaaccgcggcaucaucaagaccuucuccaacggcugcgacuacgucuccaacaagggcgucgacaccgucuccgucggcaacacccucuacugcgucaacaagcaggagggcaagucccucuacgucaagggcgagcccaucaucaacuucuacgacccccucgucuuccccuccgacgaguucgacgccuccaucucccaggucaacgagaagaucaaccagucccucgccuucauccgcaaguccgacgagcuccuccacaacgucaacgccggcaaguccaccaccaacaucaugaucaccaccaucaucaucgucaucaucgucauccuccucucccucaucgccgucggccuccuccucuacugcaaggcccgcugaggacuaguaauaaggaaacuguaugaaugucugugggcaggaagugaagagauccuucuguaaagguuuuuggaauuaugucugcugaauaauaaacuuuuuugaaauaauaaaucugguagaaaaaugagaucuaaaaaaaaaaaaaaaaaaaaaaaaaaaaaaaaaaaaaaaaaaaaaaaaaaaaaaaaaaaaaaaaugcaucccccccccccccccccccccccccccccccaaaggcucuuuucagagccaccagaauu

SEQ ID NO: 5241 - RNA, 1931 nt, Artificial Sequence
  mRNA product Design g-4 comprising derived and/or modified sequence from HRSV(A2)__F-del_DSCav1_mut4 (opt3)
gggagacuccugucgggcggaaguaggaggaguagaguuuaaaaacaguacucuuuuuccgguucgggacguaguugaagcaacgacaagccggauaaccgcucuugagacaggaagcuuaccauggagcugcucauccuuaaggccaacgcuauuaccacaauacugacugcagugacguucugcuuugccagcggccagaauaucaccgaagaguucuaccaauccacauguucugcggucucaaaaggguauuugagugcuuuaagaacuggaugguacaccagcguuauuacaaucgaacuguccaacauuaaggagaauaaaugcaacgguaccgacgccaaggugaaacuaaucaagcaggaacucgauaaguauaaaaaugcaguaacugagcugcagcuucugaugcagucuacacccgccaccggcucggggucagcuauauguagcggaguggcagucugcaagguguugcaccucgagggcgaaguuaacaaaaucaagagugcccugcuguccacgaauaaagcuguggucucucucagcaacgguguguccguauuaacuuuuaagguucuggaccuuaagaauuacauugauaaacaauugcugccuauccuaaacaagcagucauguaguauuagcaauaucgagaccgugauagaguuccagcagaaaaacaauaggcuccuggaaauuacacgggaguuuucugucaacgccggggugacuaccccaguguccacauauaugcuuaccaauucagaacuguugagccucaucaacgacaugccgauuacgaacgaucaaaagaaacugaugaguaauaacguccagaucguucgccagcagucuuacuccaucaugugcauuauaaaggaggaaguguuagcguauguagugcaacugccccucuacggagucaucgacacuccuuguuggaaacuucauacaagcccacugugcaccacuaauacaaaggagggcucgaacauuuguuugacccgaacggaucguggcugguacugcgacaaugcagggucuguguccuucuuuccccaggccgaaaccuguaagguucagucaaacagaguguucugcgauacaaugaauaguagaacucugccuagcgaggucaaccucugcaauguggacaucuuuaacccaaaauaugauuguaagauaaugaccuccaaaacagacguaucuagcucaguuauuaccagucugggagcuaucguguccugcuacgguaagacuaaauguacagccagcaauaagaacaggggcaucauuaagaccuucucuaaugggugcgauuaugucucaaacaaaggaguggacacugucagugugggcaauacgcuuuacuguguuaacaagcaagaggguaaaagccuguaugugaagggggaacccaucauuaacuuuuacgacccuuugguauucccauccgaugaguuugacgcaucuauaucgcaggucaaugagaaaaucaaccagagccucgcuuucauucggaaguccgaugaacuguuacacaaugugaacgccggaaagucaacaaccaauaucaugaucacuaccauuauaaucguuauuaucgugauucugcuaagucucaucgcggucggccugcuuuuguauugcaaagcccgcugaggacuaguaauaaggaaacuguaugaaugucugugggcaggaagugaagagauccuucuguaaagguuuuuggaauuaugucugcugaauaauaaacuuuuuugaaauaauaaaucugguagaaaaaugagaucuaaaaaaaaaaaaaaaaaaaaaaaaaaaaaaaaaaaaaaaaaaaaaaaaaaaaaaaaaaaaaaaaugcaucccccccccccccccccccccccccccccccaaaggcucuuuucagagccaccagaauu

SEQ ID NO: 5242 - RNA, 1931 nt, Artificial Sequence
  mRNA product Design g-4 comprising derived and/or modified sequence from HRSV(A2)__F-del_DSCav1_mut4 (opt4)
gggagacuccugucgggcggaaguaggaggaguagaguuuaaaaacaguacucuuuuuccgguucgggacguaguugaagcaacgacaagccggauaaccgcucuugagacaggaagcuuaccauggagcugcugauccugaaggccaacgccaucaccaccauccugaccgccgugaccuucugcuucgccagcggccagaacaucaccgaggaguucuaccagagcaccugcagcgccgugagcaagggcuaccugagcgcccugagaaccggcugguacaccagcgugaucaccaucgagcugagcaacaucaaggagaacaagugcaacggcaccgacgccaaggugaagcugaucaagcaggagcuggacaaguacaagaacgccgugaccgagcugcagcugcugaugcagagcacccccgccaccggcagcggcagcgccaucugcagcggcguggccgugugcaaggugcugcaccuggagggcgaggugaacaagaucaagagcgcccugcugagcaccaacaaggccguggugagccugagcaacggcgugagcgugcugaccuucaaggugcuggaccugaagaacuacaucgacaagcagcugcugcccauccugaacaagcagagcugcagcaucagcaacaucgagaccgugaucgaguuccagcagaagaacaacagacugcuggagaucaccagagaguucagcgugaacgccggcgugaccacccccgugagcaccuacaugcugaccaacagcgagcugcugagccugaucaacgacaugcccaucaccaacgaccagaagaagcugaugagcaacaacgugcagaucgugagacagcagagcuacagcaucaugugcaucaucaaggaggaggugcuggccuacguggugcagcugccccuguacggcgugaucgacacccccugcuggaagcugcacaccagcccccugugcaccaccaacaccaaggagggcagcaacaucugccugaccagaaccgacagaggcugguacugcgacaacgccggcagcgugagcuucuucccccaggccgagaccugcaaggugcagagcaacagaguguucugcgacaccaugaacagcagaacccugcccagcgaggugaaccugugcaacguggacaucuucaaccccaaguacgacugcaagaucaugaccagcaagaccgacgugagcagcagcgugaucaccagccugggcgccaucgugagcugcuacggcaagaccaagugcaccgccagcaacaagaacagaggcaucaucaagaccuucagcaacggcugcgacuacgugagcaacaagggcguggacaccgugagcgugggcaacacccuguacugcgugaacaagcaggagggcaagagccuguacgugaagggcgagcccaucaucaacuucuacgacccccugguguuccccagcgacgaguucgacgccagcaucagccaggugaacgagaagaucaaccagagccuggccuucaucagaaagagcgacgagcugcugcacaacgugaacgccggcaagagcaccaccaacaucaugaucaccaccaucaucaucgugaucaucgugauccugcugagccugaucgccgugggccugcugcuguacugcaaggccagaugaggacuaguaauaaggaaacuguaugaaugucugugggcaggaagugaagagauccuucuguaaagguuuuuggaauuaugucugcugaauaauaaacuuuuuugaaauaauaaaucugguagaaaaaugagaucuaaaaaaaaaaaaaaaaaaaaaaaaaaaaaaaaaaaaaaaaaaaaaaaaaaaaaaaaaaaaaaaaugcaucccccccccccccccccccccccccccccccaaaggcucuuuucagagccaccagaauu

SEQ ID NO: 5243 - RNA, 1931 nt, Artificial Sequence
  mRNA product Design g-4 comprising derived and/or modified sequence from HRSV(A2)__F-del_DSCav1_mut4 (opt5)
gggagacuccugucgggcggaaguaggaggaguagaguuuaaaaacaguacucuuuuuccgguucgggacguaguugaagcaacgacaagccggauaaccgcucuugagacaggaagcuuaccauggagcugcucauccugaaggccaacgcuauuaccacaauccuuacggccgugaccuucugcuuugcgagcggccagaauauuacagaagaguucuaccaauccaccuguucugcugucagcaaaggguaucuguccgcccucagaacaggaugguacaccucuguuaucacaauugaacugagcaacaucaaggagaauaaaugcaacggcaccgacgccaaggugaaacuuaucaagcaggaacuggauaaguauaaaaaugcugugacggagcuccagcugcugaugcaguccacccccgccacagggucuggaagcgcuauuuguuccggcgucgccgugugcaagguucuccaccuggagggggaagugaacaaaaucaagagcgcgcuucugucuaccaauaaagccgucgugucccucagcaacggaguuucugugcugacauuuaagguccuugaccugaagaauuacauugauaaacaacuccugccuauccugaacaagcaguccuguagcauuucuaauaucgagaccgugauugaguuccagcagaaaaacaaucggcuccuggaaaucacgcgcgaguuuuccgugaacgcuggcgucacaaccccgguuagcacauauaugcuuaccaauuccgaacugcucucucugaucaacgacaugcccauuaccaacgaucaaaagaaacuuaugagcaauaacgugcagaucgugagacagcaguccuacagcauuaugugcaucauuaaggaggaaguccuggccuaugugguucaacucccucuguacggcgugaucgacacacccuguuggaaacugcauacgucuccucucugcaccacaaauaccaaggagggguccaacaucugucugacacggaccgaucgcggaugguacugcgacaaugcuggcagcgucucuuucuuuccccaggccgaaacguguaaggugcagagcaacagaguuuucugcgauacaaugaacuccagaacccugccuucugaggugaaucucugcaaugucgacauuuuuaacccgaaauaugauuguaagaucaugaccagcaaaacagacguguccagcucugucauuaccucccugggggcgaucgugagcugcuacggaaagacaaaauguacggccucuaauaagaaccggggcauuaucaagaccuucuccaaugggugcgauuauguuagcaacaaaggaguggacacagucuccgugggcaauacccuuuacuguguuaacaagcaagagggcaaaucucuguaugugaagggggaacccaucauuaacuuuuacgacccucucgucuuccccagcgaugaguuugacgcuuccaucucucaggugaaugagaaaauuaaccagagccuggccuucauccgcaaguccgaugaacugcuccacaaugugaacgcuggaaagagcacaaccaauauuaugaucacgaccauuaucaucguuauuaucgucauucugcuuucucugaucgccgugggccuccugcuguauugcaaagccagaugaggacuaguaauaaggaaacuguaugaaugucugugggcaggaagugaagagauccuucuguaaagguuuuuggaauuaugucugcugaauaauaaacuuuuuugaaauaauaaaucugguagaaaaaugagaucuaaaaaaaaaaaaaaaaaaaaaaaaaaaaaaaaaaaaaaaaaaaaaaaaaaaaaaaaaaaaaaaaugcaucccccccccccccccccccccccccccccccaaaggcucuuuucagagccaccagaauu

SEQ ID NO: 5244 - RNA, 1931 nt, Artificial Sequence
  mRNA product Design g-4 comprising derived and/or modified sequence from HRSV(A2)__F-del_DSCav1_mut4 (opt6)
gggagacuccugucgggcggaaguaggaggaguagaguuuaaaaacaguacucuuuuuccgguucgggacguaguugaagcaacgacaagccggauaaccgcucuugagacaggaagcuuaccauggaacuuuuaauacuaaaagcuaacgccauaaccacuauacuaacagcagucacauucugcuucgcaucaggccaaaacauaaccgaagaauuuuaccaauccacuuguucagcagucuccaaaggauauuuauccgcacuucguacaggaugguauacaucaguaauaacaauagaacucuccaacauaaaagaaaauaaaugcaacggcaccgacgcaaaaguaaaacucaucaaacaagaauuagacaaauacaagaacgccguaacagaacuacaauuacuaaugcaaucaacacccgccacaggaucaggaucugcaauaugcucuggaguagcaguaugcaaaguauuacaccuagaaggagaaguaaacaaaaucaaaagcgcacuacuauccacaaacaaagcuguaguaucacuaucaaacggaguaucaguauuaacuuucaaaguacuugaucuaaaaaacuacauagacaaacaacuacuacccauauuaaacaaacaaucaugcucaauaagcaauauagaaacaguaauagaauuucaacaaaaaaacaacagacuacuagaaaucacaagggaauuuucaguaaaugccgguguuacaaccccaguaucaacauacaugcuaacuaacucagaacuacuauccuuaauaaacgauaugccaauaacaaacgaucaaaaaaaacuaauguccaacaacguacaaauaguaagacaacaaucauacucaaucaugugcauuauaaaagaagaagucuuagcauacguaguacaauuaccacuauacgguguaauagauacaccauguuggaaauuacacacaagcccacuaugcacaacuaacacaaaagaaggcucaaauauauguuuaacaagaacagaccgagguugguacugcgacaaugcaggaucaguaucauucuuuccacaagcagaaacauguaaaguucaauccaacagaguauucugcgacacaaugaacuccagaacacuaccuucagaaguaaaccucuguaacguagacauauuuaaucccaaguacgacugcaaaauaaugacaucgaaaacagacguaagcuccucagugauaacaucccucggcgccaucguauccuguuacgguaaaacuaaauguaccgccucaaacaaaaaccgcgguauuauaaaaacuuuuucuaauggcugcgauuacguaagcaacaaaggcgucgacacaguuuccguaggaaacacacuauacugcguaaacaaacaagaagguaaaucucuauacguaaaaggagaaccaauaauaaauuucuaugauccuuuaguauucccauccgaugaauuugacgccucuaucucacaagucaacgaaaaaauaaaucaaucauuagcauucauacgaaaaucagacgaacuacuacacaacguaaacgcaggaaaaucaacaaccaacauaaugauaaccacaauaauaauaguuauuauagugauacuauuauccuuaauugcagucggacuauuauuauacuguaaagcacgcuaaggacuaguaauaaggaaacuguaugaaugucugugggcaggaagugaagagauccuucuguaaagguuuuuggaauuaugucugcugaauaauaaacuuuuuugaaauaauaaaucugguagaaaaaugagaucuaaaaaaaaaaaaaaaaaaaaaaaaaaaaaaaaaaaaaaaaaaaaaaaaaaaaaaaaaaaaaaaaugcaucccccccccccccccccccccccccccccccaaaggcucuuuucagagccaccagaauu

SEQ ID NO: 5245 - RNA, 1931 nt, Artificial Sequence
  mRNA product Design g-4 comprising derived and/or modified sequence from HRSV(A2)__F-del_DSCav1_mut4 (opt11)
gggagacuccugucgggcggaaguaggaggaguagaguuuaaaaacaguacucuuuuuccgguucgggacguaguugaagcaacgacaagccggauaaccgcucuugagacaggaagcuuaccauggaacuccucauccucaaagccaaugccaucaccacaauccugacagcaguaaccuucugcuucgcauccggacaaaacaucaccgaagaauuuuaccagucaaccugcuccgcugucucaaaaggcuaccucucagcccuucgcaccggcugguacaccucggucauaacaauagaacucuccaauaucaaagaaaacaaaugcaacggcacugacgccaagguaaaacucaucaaacaggaacucgauaaauacaagaacgccguaacagaacuacaacuacucaugcaaucaacaccggccaccggcuccgguuccgccauaugcuccggaguggccgugugcaagguccuccaccuugaaggggaaguuaacaaaaucaaaucagcccuccucuccacuaacaaagccguaguaucccuaagcaacgguguauccguccucaccuucaaaguacuagaccuaaagaauuauaucgacaaacaacuccuccccauacucaacaaacaauccugcuccauaagcaacaucgaaacagucaucgaguuccagcagaaaaacaaccgacuccucgaaauaacccgcgaguucucagucaacgccggagucaccacacccgucagcaccuacaugcugaccaacuccgaacuccucuccuuaaucaaugacaugcccaucaccaaugaccaaaagaaacucaugucaaacaacguccaaauaguacgccaacaauccuacuccaucaugugcaucauaaaagaagaaguacucgccuacgucguccaacucccccucuacggcguaaucgacacccccugcuggaaacuacacacaagcccccucugcaccacaaacacuaaagagggcuccaacaucugucuaacccgcaccgaucgaggcugguacugcgacaacgccggaucugucucauucuucccccaagccgaaaccugcaaaguccaauccaaccgcgucuucugcgacaccaugaacucgagaacccucccuuccgaagucaaccuaugcaacgucgacauuuucaaccccaaauacgacugcaaaaucaugaccucgaaaaccgacguaucauccagcgucaucaccagccuaggcgcaaucgugagcugcuacggcaaaaccaaaugcaccgcgagcaauaaaaaccgcgggaucaucaaaacuuucuccaacggcugcgacuacgucuccaacaagggagucgauaccgucuccguaggcaacacccucuacugcgucaacaaacaagaaggcaaaucacuauacguaaaaggcgagccaaucauaaacuucuacgacccucuaguuuucccauccgacgaguucgacgcuagcaucucccaagucaacgagaaaaucaaccaaucccucgcauucauccgcaaauccgacgaacuccuccacaacguaaacgcaggcaaaucaacuacuaauauaaugaucacaaccaucauaauagucauaaucguaauccuccuaucccucaucgccgucggacuacugcucuacugcaaagcccgcuaaggacuaguaauaaggaaacuguaugaaugucugugggcaggaagugaagagauccuucuguaaagguuuuuggaauuaugucugcugaauaauaaacuuuuuugaaauaauaaaucugguagaaaaaugagaucuaaaaaaaaaaaaaaaaaaaaaaaaaaaaaaaaaaaaaaaaaaaaaaaaaaaaaaaaaaaaaaaaugcaucccccccccccccccccccccccccccccccaaaggcucuuuucagagccaccagaauu

SEQ ID NO: 5246 - RNA, 1907 nt, Artificial Sequence
  mRNA product Design g-5 comprising derived and/or modified sequence from HRSV(A2)__F-del_DSCav1_mut4 (opt1)
gggagacccgugacccggaaguuguacggcuacgcgacuuucccucccacaaacccucgcgcccuuccuuuccuacuugggcccggcagaaagcuuaccauggagcugcucauccugaaggccaacgccaucaccaccauccugacggcggugaccuucugcuucgccagcggccagaacaucaccgaggaguucuaccaguccacgugcagcgccgucuccaagggguaccucagcgcccugcggaccggcugguacaccuccgugaucaccaucgagcugagcaacaucaaggagaacaagugcaacgggaccgacgccaaggugaagcucaucaagcaggagcuggacaaguacaagaacgcggucacggagcugcagcuccugaugcaguccaccccggcaaccggcuccggcuccgccaucugcagcggcgucgccgugugcaaggugcugcaccucgagggggaggucaacaagaucaagagcgcccugcuguccaccaacaaggccguggugagccucuccaacggcgucagcgugcugaccuucaaggugcuggaccucaagaacuacaucgacaagcagcugcugcccauccugaacaagcagagcugcuccaucagcaacaucgagacggugaucgaguuccagcagaagaacaaccggcuccuggagaucacccgcgaguucagcgugaacgccggggucaccacccccguguccacguacaugcugaccaacagcgagcuccugucccugaucaacgacaugccgaucaccaacgaccagaagaagcucaugagcaacaacgugcagaucguccggcagcaguccuacagcaucaugugcaucaucaaggaggaggugcuggcguacgugguccagcugccccucuacggcgugaucgacacccccugcuggaagcugcacacgagcccccugugcaccaccaacaccaaggagggguccaacaucugccucacgcgcaccgaccggggcugguacugcgacaacgccggcagcgucuccuucuucccgcaggccgagaccugcaaggugcagagcaaccgcguguucugcgacaccaugaacucccggacgcugcccagcgagguaaaccucugcaacgucgacaucuucaaccccaaguacgacugcaagaucaugaccuccaagaccgacgugagcuccagcgugaucaccucccugggggccaucgucagcugcuacggcaagacgaagugcaccgccagcaacaagaaccgggggaucaucaagaccuucuccaacggcugcgacuacgugagcaacaagggcguggacaccguguccgucgggaacacccuguacugcgugaacaagcaggagggcaagagccucuacgugaagggggagcccaucaucaacuucuacgacccgcuggucuuccccuccgacgaguucgacgcgagcaucucccaggugaacgagaagaucaaccagagccuggccuucauccgcaaguccgacgagcugcuccacaacgugaacgccggcaagagcacgaccaacaucaugaucaccaccaucaucaucgucaucaucgugauccugcugucccucaucgccguggggcugcugcucuacugcaaggcccggugaggacuaguaauaaggaaacuguaugaaugucugugggcaggaagugaagagauccuucuguaaagguuuuuggaauuaugucugcugaauaauaaacuuuuuugaaauaauaaaucugguagaaaaaugagaucuaaaaaaaaaaaaaaaaaaaaaaaaaaaaaaaaaaaaaaaaaaaaaaaaaaaaaaaaaaaaaaaaugcaucccccccccccccccccccccccccccccccaaaggcucuuuucagagccaccagaauu

SEQ ID NO: 5247 - RNA, 1907 nt, Artificial Sequence
  mRNA product Design g-5 comprising derived and/or modified sequence from HRSV(A2)__F-del_DSCav1_mut4 (opt1)
gggagacccgugacccggaaguuguacggcuacgcgacuuucccucccacaaacccucgcgcccuuccuuuccuacuugggcccggcagaaagcuuaccauggagcugcucauccugaaggccaacgccaucaccaccauccugacggcggugaccuucugcuucgccagcggccagaacaucaccgaggaguucuaccaguccacgugcagcgccgucuccaagggguaccucagcgcccugcgcaccggcugguacaccuccgugaucaccaucgagcugagcaacaucaaggagaacaagugcaacgggaccgacgccaaggugaagcucaucaagcaggagcuggacaaguacaagaacgcggucacggagcugcagcuccugaugcaguccacccccgccaccggcagcggguccgccaucugcagcggcguggccgugugcaagguccugcaccucgagggcgaggugaacaagaucaaguccgcgcugcugagcaccaacaaggccguggucucccucagcaacgggguguccgugcugacguucaagguccuggaccucaagaacuacaucgacaagcagcugcugccgauccucaacaagcagagcugcuccaucagcaacaucgagaccgugaucgaguuccagcagaagaacaaccggcugcuggagaucacccgcgaguucuccgugaacgccggcgucaccacgcccgugagcaccuacaugcucaccaacagcgagcugcugucccucaucaacgacaugcccaucaccaacgaccagaagaagcugaugagcaacaacgugcagaucguccggcagcaguccuacagcaucaugugcaucaucaaggaggaggugcuggccuacgugguccagcucccccuguacggggugaucgacacgccgugcuggaagcugcacaccagcccccucugcaccaccaacacgaaggagggcuccaacaucugccugacccgcaccgaccgggggugguacugcgacaacgccggcuccgugagcuucuucccccaggcggagaccugcaagguccaguccaaccgcguguucugcgacacgaugaacagccggacccuccccuccgaggucaaccugugcaacguggacaucuucaacccgaaguacgacugcaagaucaugaccagcaagaccgacguguccagcuccgucaucacgagccugggcgccaucguguccugcuacgggaagaccaagugcaccgccagcaacaagaaccggggcaucaucaagaccuucuccaacgggugcgacuacgugagcaacaagggcgucgacacggugagcgugggcaacacccucuacugcgucaacaagcaggaggggaagucccuguacgugaagggcgagcccaucaucaacuucuacgacccccugguguuccccagcgacgaguucgacgccuccaucagccaggucaacgagaagaucaaccagucccucgccuucauccgcaagagcgacgagcugcugcacaacgugaacgcggggaaguccaccaccaacaucaugaucaccacgaucaucaucgugaucaucgucauccuccugagccugaucgccgugggccuccugcuguacugcaaggcccggugaggacuaguaauaaggaaacuguaugaaugucugugggcaggaagugaagagauccuucuguaaagguuuuuggaauuaugucugcugaauaauaaacuuuuuugaaauaauaaaucugguagaaaaaugagaucuaaaaaaaaaaaaaaaaaaaaaaaaaaaaaaaaaaaaaaaaaaaaaaaaaaaaaaaaaaaaaaaaugcaucccccccccccccccccccccccccccccccaaaggcucuuuucagagccaccagaauu

SEQ ID NO: 5248 - RNA, 1907 nt, Artificial Sequence
  mRNA product Design g-5 comprising derived and/or modified sequence from HRSV(A2)__F-del_DSCav1_mut4 (opt2)
gggagacccgugacccggaaguuguacggcuacgcgacuuucccucccacaaacccucgcgcccuuccuuuccuacuugggcccggcagaaagcuuaccauggagcuccucauccucaaggccaacgccaucaccaccauccucaccgccgucaccuucugcuucgccuccggccagaacaucaccgaggaguucuaccaguccaccugcuccgccgucuccaagggcuaccucuccgcccuccgcaccggcugguacaccuccgucaucaccaucgagcucuccaacaucaaggagaacaagugcaacggcaccgacgccaaggucaagcucaucaagcaggagcucgacaaguacaagaacgccgucaccgagcuccagcuccucaugcaguccacccccgccaccggcuccggcuccgccaucugcuccggcgucgccgucugcaagguccuccaccucgagggcgaggucaacaagaucaaguccgcccuccucuccaccaacaaggccgucgucucccucuccaacggcgucuccguccucaccuucaagguccucgaccucaagaacuacaucgacaagcagcuccuccccauccucaacaagcaguccugcuccaucuccaacaucgagaccgucaucgaguuccagcagaagaacaaccgccuccucgagaucacccgcgaguucuccgucaacgccggcgucaccacccccgucuccaccuacaugcucaccaacuccgagcuccucucccucaucaacgacaugcccaucaccaacgaccagaagaagcucauguccaacaacguccagaucguccgccagcaguccuacuccaucaugugcaucaucaaggaggagguccucgccuacgucguccagcucccccucuacggcgucaucgacacccccugcuggaagcuccacaccuccccccucugcaccaccaacaccaaggagggcuccaacaucugccucacccgcaccgaccgcggcugguacugcgacaacgccggcuccgucuccuucuucccccaggccgagaccugcaagguccaguccaaccgcgucuucugcgacaccaugaacucccgcacccuccccuccgaggucaaccucugcaacgucgacaucuucaaccccaaguacgacugcaagaucaugaccuccaagaccgacgucuccuccuccgucaucaccucccucggcgccaucgucuccugcuacggcaagaccaagugcaccgccuccaacaagaaccgcggcaucaucaagaccuucuccaacggcugcgacuacgucuccaacaagggcgucgacaccgucuccgucggcaacacccucuacugcgucaacaagcaggagggcaagucccucuacgucaagggcgagcccaucaucaacuucuacgacccccucgucuuccccuccgacgaguucgacgccuccaucucccaggucaacgagaagaucaaccagucccucgccuucauccgcaaguccgacgagcuccuccacaacgucaacgccggcaaguccaccaccaacaucaugaucaccaccaucaucaucgucaucaucgucauccuccucucccucaucgccgucggccuccuccucuacugcaaggcccgcugaggacuaguaauaaggaaacuguaugaaugucugugggcaggaagugaagagauccuucuguaaagguuuuuggaauuaugucugcugaauaauaaacuuuuuugaaauaauaaaucugguagaaaaaugagaucuaaaaaaaaaaaaaaaaaaaaaaaaaaaaaaaaaaaaaaaaaaaaaaaaaaaaaaaaaaaaaaaaugcaucccccccccccccccccccccccccccccccaaaggcucuuuucagagccaccagaauu

SEQ ID NO: 5249 - RNA, 1907 nt, Artificial Sequence
  mRNA product Design g-5 comprising derived and/or modified sequence from HRSV(A2)__F-del_DSCav1_mut4 (opt3)
gggagacccgugacccggaaguuguacggcuacgcgacuuucccucccacaaacccucgcgcccuuccuuuccuacuugggcccggcagaaagcuuaccauggagcugcucauccuuaaggccaacgcuauuaccacaauacugacugcagugacguucugcuuugccagcggccagaauaucaccgaagaguucuaccaauccacauguucugcggucucaaaaggguauuugagugcuuuaagaacuggaugguacaccagcguuauuacaaucgaacuguccaacauuaaggagaauaaaugcaacgguaccgacgccaaggugaaacuaaucaagcaggaacucgauaaguauaaaaaugcaguaacugagcugcagcuucugaugcagucuacacccgccaccggcucggggucagcuauauguagcggaguggcagucugcaagguguugcaccucgagggcgaaguuaacaaaaucaagagugcccugcuguccacgaauaaagcuguggucucucucagcaacgguguguccguauuaacuuuuaagguucuggaccuuaagaauuacauugauaaacaauugcugccuauccuaaacaagcagucauguaguauuagcaauaucgagaccgugauagaguuccagcagaaaaacaauaggcuccuggaaauuacacgggaguuuucugucaacgccggggugacuaccccaguguccacauauaugcuuaccaauucagaacuguugagccucaucaacgacaugccgauuacgaacgaucaaaagaaacugaugaguaauaacguccagaucguucgccagcagucuuacuccaucaugugcauuauaaaggaggaaguguuagcguauguagugcaacugccccucuacggagucaucgacacuccuuguuggaaacuucauacaagcccacugugcaccacuaauacaaaggagggcucgaacauuuguuugacccgaacggaucguggcugguacugcgacaaugcagggucuguguccuucuuuccccaggccgaaaccuguaagguucagucaaacagaguguucugcgauacaaugaauaguagaacucugccuagcgaggucaaccucugcaauguggacaucuuuaacccaaaauaugauuguaagauaaugaccuccaaaacagacguaucuagcucaguuauuaccagucugggagcuaucguguccugcuacgguaagacuaaauguacagccagcaauaagaacaggggcaucauuaagaccuucucuaaugggugcgauuaugucucaaacaaaggaguggacacugucagugugggcaauacgcuuuacuguguuaacaagcaagaggguaaaagccuguaugugaagggggaacccaucauuaacuuuuacgacccuuugguauucccauccgaugaguuugacgcaucuauaucgcaggucaaugagaaaaucaaccagagccucgcuuucauucggaaguccgaugaacuguuacacaaugugaacgccggaaagucaacaaccaauaucaugaucacuaccauuauaaucguuauuaucgugauucugcuaagucucaucgcggucggccugcuuuuguauugcaaagcccgcugaggacuaguaauaaggaaacuguaugaaugucugugggcaggaagugaagagauccuucuguaaagguuuuuggaauuaugucugcugaauaauaaacuuuuuugaaauaauaaaucugguagaaaaaugagaucuaaaaaaaaaaaaaaaaaaaaaaaaaaaaaaaaaaaaaaaaaaaaaaaaaaaaaaaaaaaaaaaaugcaucccccccccccccccccccccccccccccccaaaggcucuuuucagagccaccagaauu

SEQ ID NO: 5250 - RNA, 1907 nt, Artificial Sequence
  mRNA product Design g-5 comprising derived and/or modified sequence from HRSV(A2)__F-del_DSCav1_mut4 (opt4)
gggagacccgugacccggaaguuguacggcuacgcgacuuucccucccacaaacccucgcgcccuuccuuuccuacuugggcccggcagaaagcuuaccauggagcugcugauccugaaggccaacgccaucaccaccauccugaccgccgugaccuucugcuucgccagcggccagaacaucaccgaggaguucuaccagagcaccugcagcgccgugagcaagggcuaccugagcgcccugagaaccggcugguacaccagcgugaucaccaucgagcugagcaacaucaaggagaacaagugcaacggcaccgacgccaaggugaagcugaucaagcaggagcuggacaaguacaagaacgccgugaccgagcugcagcugcugaugcagagcacccccgccaccggcagcggcagcgccaucugcagcggcguggccgugugcaaggugcugcaccuggagggcgaggugaacaagaucaagagcgcccugcugagcaccaacaaggccguggugagccugagcaacggcgugagcgugcugaccuucaaggugcuggaccugaagaacuacaucgacaagcagcugcugcccauccugaacaagcagagcugcagcaucagcaacaucgagaccgugaucgaguuccagcagaagaacaacagacugcuggagaucaccagagaguucagcgugaacgccggcgugaccacccccgugagcaccuacaugcugaccaacagcgagcugcugagccugaucaacgacaugcccaucaccaacgaccagaagaagcugaugagcaacaacgugcagaucgugagacagcagagcuacagcaucaugugcaucaucaaggaggaggugcuggccuacguggugcagcugccccuguacggcgugaucgacacccccugcuggaagcugcacaccagcccccugugcaccaccaacaccaaggagggcagcaacaucugccugaccagaaccgacagaggcugguacugcgacaacgccggcagcgugagcuucuucccccaggccgagaccugcaaggugcagagcaacagaguguucugcgacaccaugaacagcagaacccugcccagcgaggugaaccugugcaacguggacaucuucaaccccaaguacgacugcaagaucaugaccagcaagaccgacgugagcagcagcgugaucaccagccugggcgccaucgugagcugcuacggcaagaccaagugcaccgccagcaacaagaacagaggcaucaucaagaccuucagcaacggcugcgacuacgugagcaacaagggcguggacaccgugagcgugggcaacacccuguacugcgugaacaagcaggagggcaagagccuguacgugaagggcgagcccaucaucaacuucuacgacccccugguguuccccagcgacgaguucgacgccagcaucagccaggugaacgagaagaucaaccagagccuggccuucaucagaaagagcgacgagcugcugcacaacgugaacgccggcaagagcaccaccaacaucaugaucaccaccaucaucaucgugaucaucgugauccugcugagccugaucgccgugggccugcugcuguacugcaaggccagaugaggacuaguaauaaggaaacuguaugaaugucugugggcaggaagugaagagauccuucuguaaagguuuuuggaauuaugucugcugaauaauaaacuuuuuugaaauaauaaaucugguagaaaaaugagaucuaaaaaaaaaaaaaaaaaaaaaaaaaaaaaaaaaaaaaaaaaaaaaaaaaaaaaaaaaaaaaaaaugcaucccccccccccccccccccccccccccccccaaaggcucuuuucagagccaccagaauu

SEQ ID NO: 5251 - RNA, 1907 nt, Artificial Sequence
  mRNA product Design g-5 comprising derived and/or modified sequence from HRSV(A2)__F-del_DSCav1_mut4 (opt5)
gggagacccgugacccggaaguuguacggcuacgcgacuuucccucccacaaacccucgcgcccuuccuuuccuacuugggcccggcagaaagcuuaccauggagcugcucauccugaaggccaacgcuauuaccacaauccuuacggccgugaccuucugcuuugcgagcggccagaauauuacagaagaguucuaccaauccaccuguucugcugucagcaaaggguaucuguccgcccucagaacaggaugguacaccucuguuaucacaauugaacugagcaacaucaaggagaauaaaugcaacggcaccgacgccaaggugaaacuuaucaagcaggaacuggauaaguauaaaaaugcugugacggagcuccagcugcugaugcaguccacccccgccacagggucuggaagcgcuauuuguuccggcgucgccgugugcaagguucuccaccuggagggggaagugaacaaaaucaagagcgcgcuucugucuaccaauaaagccgucgugucccucagcaacggaguuucugugcugacauuuaagguccuugaccugaagaauuacauugauaaacaacuccugccuauccugaacaagcaguccuguagcauuucuaauaucgagaccgugauugaguuccagcagaaaaacaaucggcuccuggaaaucacgcgcgaguuuuccgugaacgcuggcgucacaaccccgguuagcacauauaugcuuaccaauuccgaacugcucucucugaucaacgacaugcccauuaccaacgaucaaaagaaacuuaugagcaauaacgugcagaucgugagacagcaguccuacagcauuaugugcaucauuaaggaggaaguccuggccuaugugguucaacucccucuguacggcgugaucgacacacccuguuggaaacugcauacgucuccucucugcaccacaaauaccaaggagggguccaacaucugucugacacggaccgaucgcggaugguacugcgacaaugcuggcagcgucucuuucuuuccccaggccgaaacguguaaggugcagagcaacagaguuuucugcgauacaaugaacuccagaacccugccuucugaggugaaucucugcaaugucgacauuuuuaacccgaaauaugauuguaagaucaugaccagcaaaacagacguguccagcucugucauuaccucccugggggcgaucgugagcugcuacggaaagacaaaauguacggccucuaauaagaaccggggcauuaucaagaccuucuccaaugggugcgauuauguuagcaacaaaggaguggacacagucuccgugggcaauacccuuuacuguguuaacaagcaagagggcaaaucucuguaugugaagggggaacccaucauuaacuuuuacgacccucucgucuuccccagcgaugaguuugacgcuuccaucucucaggugaaugagaaaauuaaccagagccuggccuucauccgcaaguccgaugaacugcuccacaaugugaacgcuggaaagagcacaaccaauauuaugaucacgaccauuaucaucguuauuaucgucauucugcuuucucugaucgccgugggccuccugcuguauugcaaagccagaugaggacuaguaauaaggaaacuguaugaaugucugugggcaggaagugaagagauccuucuguaaagguuuuuggaauuaugucugcugaauaauaaacuuuuuugaaauaauaaaucugguagaaaaaugagaucuaaaaaaaaaaaaaaaaaaaaaaaaaaaaaaaaaaaaaaaaaaaaaaaaaaaaaaaaaaaaaaaaugcaucccccccccccccccccccccccccccccccaaaggcucuuuucagagccaccagaauu

SEQ ID NO: 5252 - RNA, 1907 nt, Artificial Sequence
  mRNA product Design g-5 comprising derived and/or modified sequence from HRSV(A2)__F-del_DSCav1_mut4 (opt6)
gggagacccgugacccggaaguuguacggcuacgcgacuuucccucccacaaacccucgcgcccuuccuuuccuacuugggcccggcagaaagcuuaccauggaacuuuuaauacuaaaagcuaacgccauaaccacuauacuaacagcagucacauucugcuucgcaucaggccaaaacauaaccgaagaauuuuaccaauccacuuguucagcagucuccaaaggauauuuauccgcacuucguacaggaugguauacaucaguaauaacaauagaacucuccaacauaaaagaaaauaaaugcaacggcaccgacgcaaaaguaaaacucaucaaacaagaauuagacaaauacaagaacgccguaacagaacuacaauuacuaaugcaaucaacacccgccacaggaucaggaucugcaauaugcucuggaguagcaguaugcaaaguauuacaccuagaaggagaaguaaacaaaaucaaaagcgcacuacuauccacaaacaaagcuguaguaucacuaucaaacggaguaucaguauuaacuuucaaaguacuugaucuaaaaaacuacauagacaaacaacuacuacccauauuaaacaaacaaucaugcucaauaagcaauauagaaacaguaauagaauuucaacaaaaaaacaacagacuacuagaaaucacaagggaauuuucaguaaaugccgguguuacaaccccaguaucaacauacaugcuaacuaacucagaacuacuauccuuaauaaacgauaugccaauaacaaacgaucaaaaaaaacuaauguccaacaacguacaaauaguaagacaacaaucauacucaaucaugugcauuauaaaagaagaagucuuagcauacguaguacaauuaccacuauacgguguaauagauacaccauguuggaaauuacacacaagcccacuaugcacaacuaacacaaaagaaggcucaaauauauguuuaacaagaacagaccgagguugguacugcgacaaugcaggaucaguaucauucuuuccacaagcagaaacauguaaaguucaauccaacagaguauucugcgacacaaugaacuccagaacacuaccuucagaaguaaaccucuguaacguagacauauuuaaucccaaguacgacugcaaaauaaugacaucgaaaacagacguaagcuccucagugauaacaucccucggcgccaucguauccuguuacgguaaaacuaaauguaccgccucaaacaaaaaccgcgguauuauaaaaacuuuuucuaauggcugcgauuacguaagcaacaaaggcgucgacacaguuuccguaggaaacacacuauacugcguaaacaaacaagaagguaaaucucuauacguaaaaggagaaccaauaauaaauuucuaugauccuuuaguauucccauccgaugaauuugacgccucuaucucacaagucaacgaaaaaauaaaucaaucauuagcauucauacgaaaaucagacgaacuacuacacaacguaaacgcaggaaaaucaacaaccaacauaaugauaaccacaauaauaauaguuauuauagugauacuauuauccuuaauugcagucggacuauuauuauacuguaaagcacgcuaaggacuaguaauaaggaaacuguaugaaugucugugggcaggaagugaagagauccuucuguaaagguuuuuggaauuaugucugcugaauaauaaacuuuuuugaaauaauaaaucugguagaaaaaugagaucuaaaaaaaaaaaaaaaaaaaaaaaaaaaaaaaaaaaaaaaaaaaaaaaaaaaaaaaaaaaaaaaaugcaucccccccccccccccccccccccccccccccaaaggcucuuuucagagccaccagaauu

SEQ ID NO: 5253 - RNA, 1907 nt, Artificial Sequence
  mRNA product Design g-5 comprising derived and/or modified sequence from HRSV(A2)__F-del_DSCav1_mut4 (opt11)
gggagacccgugacccggaaguuguacggcuacgcgacuuucccucccacaaacccucgcgcccuuccuuuccuacuugggcccggcagaaagcuuaccauggaacuccucauccucaaagccaaugccaucaccacaauccugacagcaguaaccuucugcuucgcauccggacaaaacaucaccgaagaauuuuaccagucaaccugcuccgcugucucaaaaggcuaccucucagcccuucgcaccggcugguacaccucggucauaacaauagaacucuccaauaucaaagaaaacaaaugcaacggcacugacgccaagguaaaacucaucaaacaggaacucgauaaauacaagaacgccguaacagaacuacaacuacucaugcaaucaacaccggccaccggcuccgguuccgccauaugcuccggaguggccgugugcaagguccuccaccuugaaggggaaguuaacaaaaucaaaucagcccuccucuccacuaacaaagccguaguaucccuaagcaacgguguauccguccucaccuucaaaguacuagaccuaaagaauuauaucgacaaacaacuccuccccauacucaacaaacaauccugcuccauaagcaacaucgaaacagucaucgaguuccagcagaaaaacaaccgacuccucgaaauaacccgcgaguucucagucaacgccggagucaccacacccgucagcaccuacaugcugaccaacuccgaacuccucuccuuaaucaaugacaugcccaucaccaaugaccaaaagaaacucaugucaaacaacguccaaauaguacgccaacaauccuacuccaucaugugcaucauaaaagaagaaguacucgccuacgucguccaacucccccucuacggcguaaucgacacccccugcuggaaacuacacacaagcccccucugcaccacaaacacuaaagagggcuccaacaucugucuaacccgcaccgaucgaggcugguacugcgacaacgccggaucugucucauucuucccccaagccgaaaccugcaaaguccaauccaaccgcgucuucugcgacaccaugaacucgagaacccucccuuccgaagucaaccuaugcaacgucgacauuuucaaccccaaauacgacugcaaaaucaugaccucgaaaaccgacguaucauccagcgucaucaccagccuaggcgcaaucgugagcugcuacggcaaaaccaaaugcaccgcgagcaauaaaaaccgcgggaucaucaaaacuuucuccaacggcugcgacuacgucuccaacaagggagucgauaccgucuccguaggcaacacccucuacugcgucaacaaacaagaaggcaaaucacuauacguaaaaggcgagccaaucauaaacuucuacgacccucuaguuuucccauccgacgaguucgacgcuagcaucucccaagucaacgagaaaaucaaccaaucccucgcauucauccgcaaauccgacgaacuccuccacaacguaaacgcaggcaaaucaacuacuaauauaaugaucacaaccaucauaauagucauaaucguaauccuccuaucccucaucgccgucggacuacugcucuacugcaaagcccgcuaaggacuaguaauaaggaaacuguaugaaugucugugggcaggaagugaagagauccuucuguaaagguuuuuggaauuaugucugcugaauaauaaacuuuuuugaaauaauaaaucugguagaaaaaugagaucuaaaaaaaaaaaaaaaaaaaaaaaaaaaaaaaaaaaaaaaaaaaaaaaaaaaaaaaaaaaaaaaaugcaucccccccccccccccccccccccccccccccaaaggcucuuuucagagccaccagaauu

SEQ ID NO: 5254 - RNA, 1923 nt, Artificial Sequence
  mRNA product Design h-1 comprising derived and/or modified sequence from HRSV(A2)__F-del_DSCav1_mut4 (opt1)
gggagacccgugacccggaaguuguacggcuacgcgacuuucccucccacaaacccucgcgcccuuccuuuccuacuugggcccggcagaaagcuuaccauggagcugcucauccugaaggccaacgccaucaccaccauccugacggcggugaccuucugcuucgccagcggccagaacaucaccgaggaguucuaccaguccacgugcagcgccgucuccaagggguaccucagcgcccugcggaccggcugguacaccuccgugaucaccaucgagcugagcaacaucaaggagaacaagugcaacgggaccgacgccaaggugaagcucaucaagcaggagcuggacaaguacaagaacgcggucacggagcugcagcuccugaugcaguccaccccggcaaccggcuccggcuccgccaucugcagcggcgucgccgugugcaaggugcugcaccucgagggggaggucaacaagaucaagagcgcccugcuguccaccaacaaggccguggugagccucuccaacggcgucagcgugcugaccuucaaggugcuggaccucaagaacuacaucgacaagcagcugcugcccauccugaacaagcagagcugcuccaucagcaacaucgagacggugaucgaguuccagcagaagaacaaccggcuccuggagaucacccgcgaguucagcgugaacgccggggucaccacccccguguccacguacaugcugaccaacagcgagcuccugucccugaucaacgacaugccgaucaccaacgaccagaagaagcucaugagcaacaacgugcagaucguccggcagcaguccuacagcaucaugugcaucaucaaggaggaggugcuggcguacgugguccagcugccccucuacggcgugaucgacacccccugcuggaagcugcacacgagcccccugugcaccaccaacaccaaggagggguccaacaucugccucacgcgcaccgaccggggcugguacugcgacaacgccggcagcgucuccuucuucccgcaggccgagaccugcaaggugcagagcaaccgcguguucugcgacaccaugaacucccggacgcugcccagcgagguaaaccucugcaacgucgacaucuucaaccccaaguacgacugcaagaucaugaccuccaagaccgacgugagcuccagcgugaucaccucccugggggccaucgucagcugcuacggcaagacgaagugcaccgccagcaacaagaaccgggggaucaucaagaccuucuccaacggcugcgacuacgugagcaacaagggcguggacaccguguccgucgggaacacccuguacugcgugaacaagcaggagggcaagagccucuacgugaagggggagcccaucaucaacuucuacgacccgcuggucuuccccuccgacgaguucgacgcgagcaucucccaggugaacgagaagaucaaccagagccuggccuucauccgcaaguccgacgagcugcuccacaacgugaacgccggcaagagcacgaccaacaucaugaucaccaccaucaucaucgucaucaucgugauccugcugucccucaucgccguggggcugcugcucuacugcaaggcccggugaggacuaguacuggcugcaucucccuuuccucuguccuccauccuucucccaggauggugaagggggaccugguacccagugauccccaccccaggauccuaaaucaugacuuaccugcuaauaaaaacucauuggaaaagugagaagaucuaaaaaaaaaaaaaaaaaaaaaaaaaaaaaaaaaaaaaaaaaaaaaaaaaaaaaaaaaaaaaaaaugcaucccccccccccccccccccccccccccccccaaaggcucuuuucagagccaccagaauu

SEQ ID NO: 5255 - RNA, 1923 nt, Artificial Sequence
  mRNA product Design h-1 comprising derived and/or modified sequence from HRSV(A2)__F-del_DSCav1_mut4 (opt1)
gggagacccgugacccggaaguuguacggcuacgcgacuuucccucccacaaacccucgcgcccuuccuuuccuacuugggcccggcagaaagcuuaccauggagcugcucauccugaaggccaacgccaucaccaccauccugacggcggugaccuucugcuucgccagcggccagaacaucaccgaggaguucuaccaguccacgugcagcgccgucuccaagggguaccucagcgcccugcgcaccggcugguacaccuccgugaucaccaucgagcugagcaacaucaaggagaacaagugcaacgggaccgacgccaaggugaagcucaucaagcaggagcuggacaaguacaagaacgcggucacggagcugcagcuccugaugcaguccacccccgccaccggcagcggguccgccaucugcagcggcguggccgugugcaagguccugcaccucgagggcgaggugaacaagaucaaguccgcgcugcugagcaccaacaaggccguggucucccucagcaacgggguguccgugcugacguucaagguccuggaccucaagaacuacaucgacaagcagcugcugccgauccucaacaagcagagcugcuccaucagcaacaucgagaccgugaucgaguuccagcagaagaacaaccggcugcuggagaucacccgcgaguucuccgugaacgccggcgucaccacgcccgugagcaccuacaugcucaccaacagcgagcugcugucccucaucaacgacaugcccaucaccaacgaccagaagaagcugaugagcaacaacgugcagaucguccggcagcaguccuacagcaucaugugcaucaucaaggaggaggugcuggccuacgugguccagcucccccuguacggggugaucgacacgccgugcuggaagcugcacaccagcccccucugcaccaccaacacgaaggagggcuccaacaucugccugacccgcaccgaccgggggugguacugcgacaacgccggcuccgugagcuucuucccccaggcggagaccugcaagguccaguccaaccgcguguucugcgacacgaugaacagccggacccuccccuccgaggucaaccugugcaacguggacaucuucaacccgaaguacgacugcaagaucaugaccagcaagaccgacguguccagcuccgucaucacgagccugggcgccaucguguccugcuacgggaagaccaagugcaccgccagcaacaagaaccggggcaucaucaagaccuucuccaacgggugcgacuacgugagcaacaagggcgucgacacggugagcgugggcaacacccucuacugcgucaacaagcaggaggggaagucccuguacgugaagggcgagcccaucaucaacuucuacgacccccugguguuccccagcgacgaguucgacgccuccaucagccaggucaacgagaagaucaaccagucccucgccuucauccgcaagagcgacgagcugcugcacaacgugaacgcggggaaguccaccaccaacaucaugaucaccacgaucaucaucgugaucaucgucauccuccugagccugaucgccgugggccuccugcuguacugcaaggcccggugaggacuaguacuggcugcaucucccuuuccucuguccuccauccuucucccaggauggugaagggggaccugguacccagugauccccaccccaggauccuaaaucaugacuuaccugcuaauaaaaacucauuggaaaagugagaagaucuaaaaaaaaaaaaaaaaaaaaaaaaaaaaaaaaaaaaaaaaaaaaaaaaaaaaaaaaaaaaaaaaugcaucccccccccccccccccccccccccccccccaaaggcucuuuucagagccaccagaauu

SEQ ID NO: 5256 - RNA, 1923 nt, Artificial Sequence
  mRNA product Design h-1 comprising derived and/or modified sequence from HRSV(A2)__F-del_DSCav1_mut4 (opt2)
gggagacccgugacccggaaguuguacggcuacgcgacuuucccucccacaaacccucgcgcccuuccuuuccuacuugggcccggcagaaagcuuaccauggagcuccucauccucaaggccaacgccaucaccaccauccucaccgccgucaccuucugcuucgccuccggccagaacaucaccgaggaguucuaccaguccaccugcuccgccgucuccaagggcuaccucuccgcccuccgcaccggcugguacaccuccgucaucaccaucgagcucuccaacaucaaggagaacaagugcaacggcaccgacgccaaggucaagcucaucaagcaggagcucgacaaguacaagaacgccgucaccgagcuccagcuccucaugcaguccacccccgccaccggcuccggcuccgccaucugcuccggcgucgccgucugcaagguccuccaccucgagggcgaggucaacaagaucaaguccgcccuccucuccaccaacaaggccgucgucucccucuccaacggcgucuccguccucaccuucaagguccucgaccucaagaacuacaucgacaagcagcuccuccccauccucaacaagcaguccugcuccaucuccaacaucgagaccgucaucgaguuccagcagaagaacaaccgccuccucgagaucacccgcgaguucuccgucaacgccggcgucaccacccccgucuccaccuacaugcucaccaacuccgagcuccucucccucaucaacgacaugcccaucaccaacgaccagaagaagcucauguccaacaacguccagaucguccgccagcaguccuacuccaucaugugcaucaucaaggaggagguccucgccuacgucguccagcucccccucuacggcgucaucgacacccccugcuggaagcuccacaccuccccccucugcaccaccaacaccaaggagggcuccaacaucugccucacccgcaccgaccgcggcugguacugcgacaacgccggcuccgucuccuucuucccccaggccgagaccugcaagguccaguccaaccgcgucuucugcgacaccaugaacucccgcacccuccccuccgaggucaaccucugcaacgucgacaucuucaaccccaaguacgacugcaagaucaugaccuccaagaccgacgucuccuccuccgucaucaccucccucggcgccaucgucuccugcuacggcaagaccaagugcaccgccuccaacaagaaccgcggcaucaucaagaccuucuccaacggcugcgacuacgucuccaacaagggcgucgacaccgucuccgucggcaacacccucuacugcgucaacaagcaggagggcaagucccucuacgucaagggcgagcccaucaucaacuucuacgacccccucgucuuccccuccgacgaguucgacgccuccaucucccaggucaacgagaagaucaaccagucccucgccuucauccgcaaguccgacgagcuccuccacaacgucaacgccggcaaguccaccaccaacaucaugaucaccaccaucaucaucgucaucaucgucauccuccucucccucaucgccgucggccuccuccucuacugcaaggcccgcugaggacuaguacuggcugcaucucccuuuccucuguccuccauccuucucccaggauggugaagggggaccugguacccagugauccccaccccaggauccuaaaucaugacuuaccugcuaauaaaaacucauuggaaaagugagaagaucuaaaaaaaaaaaaaaaaaaaaaaaaaaaaaaaaaaaaaaaaaaaaaaaaaaaaaaaaaaaaaaaaugcaucccccccccccccccccccccccccccccccaaaggcucuuuucagagccaccagaauu

SEQ ID NO: 5257 - RNA, 1923 nt, Artificial Sequence
  mRNA product Design h-1 comprising derived and/or modified sequence from HRSV(A2)__F-del_DSCav1_mut4 (opt3)
gggagacccgugacccggaaguuguacggcuacgcgacuuucccucccacaaacccucgcgcccuuccuuuccuacuugggcccggcagaaagcuuaccauggagcugcucauccuuaaggccaacgcuauuaccacaauacugacugcagugacguucugcuuugccagcggccagaauaucaccgaagaguucuaccaauccacauguucugcggucucaaaaggguauuugagugcuuuaagaacuggaugguacaccagcguuauuacaaucgaacuguccaacauuaaggagaauaaaugcaacgguaccgacgccaaggugaaacuaaucaagcaggaacucgauaaguauaaaaaugcaguaacugagcugcagcuucugaugcagucuacacccgccaccggcucggggucagcuauauguagcggaguggcagucugcaagguguugcaccucgagggcgaaguuaacaaaaucaagagugcccugcuguccacgaauaaagcuguggucucucucagcaacgguguguccguauuaacuuuuaagguucuggaccuuaagaauuacauugauaaacaauugcugccuauccuaaacaagcagucauguaguauuagcaauaucgagaccgugauagaguuccagcagaaaaacaauaggcuccuggaaauuacacgggaguuuucugucaacgccggggugacuaccccaguguccacauauaugcuuaccaauucagaacuguugagccucaucaacgacaugccgauuacgaacgaucaaaagaaacugaugaguaauaacguccagaucguucgccagcagucuuacuccaucaugugcauuauaaaggaggaaguguuagcguauguagugcaacugccccucuacggagucaucgacacuccuuguuggaaacuucauacaagcccacugugcaccacuaauacaaaggagggcucgaacauuuguuugacccgaacggaucguggcugguacugcgacaaugcagggucuguguccuucuuuccccaggccgaaaccuguaagguucagucaaacagaguguucugcgauacaaugaauaguagaacucugccuagcgaggucaaccucugcaauguggacaucuuuaacccaaaauaugauuguaagauaaugaccuccaaaacagacguaucuagcucaguuauuaccagucugggagcuaucguguccugcuacgguaagacuaaauguacagccagcaauaagaacaggggcaucauuaagaccuucucuaaugggugcgauuaugucucaaacaaaggaguggacacugucagugugggcaauacgcuuuacuguguuaacaagcaagaggguaaaagccuguaugugaagggggaacccaucauuaacuuuuacgacccuuugguauucccauccgaugaguuugacgcaucuauaucgcaggucaaugagaaaaucaaccagagccucgcuuucauucggaaguccgaugaacuguuacacaaugugaacgccggaaagucaacaaccaauaucaugaucacuaccauuauaaucguuauuaucgugauucugcuaagucucaucgcggucggccugcuuuuguauugcaaagcccgcugaggacuaguacuggcugcaucucccuuuccucuguccuccauccuucucccaggauggugaagggggaccugguacccagugauccccaccccaggauccuaaaucaugacuuaccugcuaauaaaaacucauuggaaaagugagaagaucuaaaaaaaaaaaaaaaaaaaaaaaaaaaaaaaaaaaaaaaaaaaaaaaaaaaaaaaaaaaaaaaaugcaucccccccccccccccccccccccccccccccaaaggcucuuuucagagccaccagaauu

SEQ ID NO: 5258 - RNA, 1923 nt, Artificial Sequence
  mRNA product Design h-1 comprising derived and/or modified sequence from HRSV(A2)__F-del_DSCav1_mut4 (opt4)
gggagacccgugacccggaaguuguacggcuacgcgacuuucccucccacaaacccucgcgcccuuccuuuccuacuugggcccggcagaaagcuuaccauggagcugcugauccugaaggccaacgccaucaccaccauccugaccgccgugaccuucugcuucgccagcggccagaacaucaccgaggaguucuaccagagcaccugcagcgccgugagcaagggcuaccugagcgcccugagaaccggcugguacaccagcgugaucaccaucgagcugagcaacaucaaggagaacaagugcaacggcaccgacgccaaggugaagcugaucaagcaggagcuggacaaguacaagaacgccgugaccgagcugcagcugcugaugcagagcacccccgccaccggcagcggcagcgccaucugcagcggcguggccgugugcaaggugcugcaccuggagggcgaggugaacaagaucaagagcgcccugcugagcaccaacaaggccguggugagccugagcaacggcgugagcgugcugaccuucaaggugcuggaccugaagaacuacaucgacaagcagcugcugcccauccugaacaagcagagcugcagcaucagcaacaucgagaccgugaucgaguuccagcagaagaacaacagacugcuggagaucaccagagaguucagcgugaacgccggcgugaccacccccgugagcaccuacaugcugaccaacagcgagcugcugagccugaucaacgacaugcccaucaccaacgaccagaagaagcugaugagcaacaacgugcagaucgugagacagcagagcuacagcaucaugugcaucaucaaggaggaggugcuggccuacguggugcagcugccccuguacggcgugaucgacacccccugcuggaagcugcacaccagcccccugugcaccaccaacaccaaggagggcagcaacaucugccugaccagaaccgacagaggcugguacugcgacaacgccggcagcgugagcuucuucccccaggccgagaccugcaaggugcagagcaacagaguguucugcgacaccaugaacagcagaacccugcccagcgaggugaaccugugcaacguggacaucuucaaccccaaguacgacugcaagaucaugaccagcaagaccgacgugagcagcagcgugaucaccagccugggcgccaucgugagcugcuacggcaagaccaagugcaccgccagcaacaagaacagaggcaucaucaagaccuucagcaacggcugcgacuacgugagcaacaagggcguggacaccgugagcgugggcaacacccuguacugcgugaacaagcaggagggcaagagccuguacgugaagggcgagcccaucaucaacuucuacgacccccugguguuccccagcgacgaguucgacgccagcaucagccaggugaacgagaagaucaaccagagccuggccuucaucagaaagagcgacgagcugcugcacaacgugaacgccggcaagagcaccaccaacaucaugaucaccaccaucaucaucgugaucaucgugauccugcugagccugaucgccgugggccugcugcuguacugcaaggccagaugaggacuaguacuggcugcaucucccuuuccucuguccuccauccuucucccaggauggugaagggggaccugguacccagugauccccaccccaggauccuaaaucaugacuuaccugcuaauaaaaacucauuggaaaagugagaagaucuaaaaaaaaaaaaaaaaaaaaaaaaaaaaaaaaaaaaaaaaaaaaaaaaaaaaaaaaaaaaaaaaugcaucccccccccccccccccccccccccccccccaaaggcucuuuucagagccaccagaauu

SEQ ID NO: 5259 - RNA, 1923 nt, Artificial Sequence
  mRNA product Design h-1 comprising derived and/or modified sequence from HRSV(A2)__F-del_DSCav1_mut4 (opt5)
gggagacccgugacccggaaguuguacggcuacgcgacuuucccucccacaaacccucgcgcccuuccuuuccuacuugggcccggcagaaagcuuaccauggagcugcucauccugaaggccaacgcuauuaccacaauccuuacggccgugaccuucugcuuugcgagcggccagaauauuacagaagaguucuaccaauccaccuguucugcugucagcaaaggguaucuguccgcccucagaacaggaugguacaccucuguuaucacaauugaacugagcaacaucaaggagaauaaaugcaacggcaccgacgccaaggugaaacuuaucaagcaggaacuggauaaguauaaaaaugcugugacggagcuccagcugcugaugcaguccacccccgccacagggucuggaagcgcuauuuguuccggcgucgccgugugcaagguucuccaccuggagggggaagugaacaaaaucaagagcgcgcuucugucuaccaauaaagccgucgugucccucagcaacggaguuucugugcugacauuuaagguccuugaccugaagaauuacauugauaaacaacuccugccuauccugaacaagcaguccuguagcauuucuaauaucgagaccgugauugaguuccagcagaaaaacaaucggcuccuggaaaucacgcgcgaguuuuccgugaacgcuggcgucacaaccccgguuagcacauauaugcuuaccaauuccgaacugcucucucugaucaacgacaugcccauuaccaacgaucaaaagaaacuuaugagcaauaacgugcagaucgugagacagcaguccuacagcauuaugugcaucauuaaggaggaaguccuggccuaugugguucaacucccucuguacggcgugaucgacacacccuguuggaaacugcauacgucuccucucugcaccacaaauaccaaggagggguccaacaucugucugacacggaccgaucgcggaugguacugcgacaaugcuggcagcgucucuuucuuuccccaggccgaaacguguaaggugcagagcaacagaguuuucugcgauacaaugaacuccagaacccugccuucugaggugaaucucugcaaugucgacauuuuuaacccgaaauaugauuguaagaucaugaccagcaaaacagacguguccagcucugucauuaccucccugggggcgaucgugagcugcuacggaaagacaaaauguacggccucuaauaagaaccggggcauuaucaagaccuucuccaaugggugcgauuauguuagcaacaaaggaguggacacagucuccgugggcaauacccuuuacuguguuaacaagcaagagggcaaaucucuguaugugaagggggaacccaucauuaacuuuuacgacccucucgucuuccccagcgaugaguuugacgcuuccaucucucaggugaaugagaaaauuaaccagagccuggccuucauccgcaaguccgaugaacugcuccacaaugugaacgcuggaaagagcacaaccaauauuaugaucacgaccauuaucaucguuauuaucgucauucugcuuucucugaucgccgugggccuccugcuguauugcaaagccagaugaggacuaguacuggcugcaucucccuuuccucuguccuccauccuucucccaggauggugaagggggaccugguacccagugauccccaccccaggauccuaaaucaugacuuaccugcuaauaaaaacucauuggaaaagugagaagaucuaaaaaaaaaaaaaaaaaaaaaaaaaaaaaaaaaaaaaaaaaaaaaaaaaaaaaaaaaaaaaaaaugcaucccccccccccccccccccccccccccccccaaaggcucuuuucagagccaccagaauu

SEQ ID NO: 5260 - RNA, 1923 nt, Artificial Sequence
  mRNA product Design h-1 comprising derived and/or modified sequence from HRSV(A2)__F-del_DSCav1_mut4 (opt6)
gggagacccgugacccggaaguuguacggcuacgcgacuuucccucccacaaacccucgcgcccuuccuuuccuacuugggcccggcagaaagcuuaccauggaacuuuuaauacuaaaagcuaacgccauaaccacuauacuaacagcagucacauucugcuucgcaucaggccaaaacauaaccgaagaauuuuaccaauccacuuguucagcagucuccaaaggauauuuauccgcacuucguacaggaugguauacaucaguaauaacaauagaacucuccaacauaaaagaaaauaaaugcaacggcaccgacgcaaaaguaaaacucaucaaacaagaauuagacaaauacaagaacgccguaacagaacuacaauuacuaaugcaaucaacacccgccacaggaucaggaucugcaauaugcucuggaguagcaguaugcaaaguauuacaccuagaaggagaaguaaacaaaaucaaaagcgcacuacuauccacaaacaaagcuguaguaucacuaucaaacggaguaucaguauuaacuuucaaaguacuugaucuaaaaaacuacauagacaaacaacuacuacccauauuaaacaaacaaucaugcucaauaagcaauauagaaacaguaauagaauuucaacaaaaaaacaacagacuacuagaaaucacaagggaauuuucaguaaaugccgguguuacaaccccaguaucaacauacaugcuaacuaacucagaacuacuauccuuaauaaacgauaugccaauaacaaacgaucaaaaaaaacuaauguccaacaacguacaaauaguaagacaacaaucauacucaaucaugugcauuauaaaagaagaagucuuagcauacguaguacaauuaccacuauacgguguaauagauacaccauguuggaaauuacacacaagcccacuaugcacaacuaacacaaaagaaggcucaaauauauguuuaacaagaacagaccgagguugguacugcgacaaugcaggaucaguaucauucuuuccacaagcagaaacauguaaaguucaauccaacagaguauucugcgacacaaugaacuccagaacacuaccuucagaaguaaaccucuguaacguagacauauuuaaucccaaguacgacugcaaaauaaugacaucgaaaacagacguaagcuccucagugauaacaucccucggcgccaucguauccuguuacgguaaaacuaaauguaccgccucaaacaaaaaccgcgguauuauaaaaacuuuuucuaauggcugcgauuacguaagcaacaaaggcgucgacacaguuuccguaggaaacacacuauacugcguaaacaaacaagaagguaaaucucuauacguaaaaggagaaccaauaauaaauuucuaugauccuuuaguauucccauccgaugaauuugacgccucuaucucacaagucaacgaaaaaauaaaucaaucauuagcauucauacgaaaaucagacgaacuacuacacaacguaaacgcaggaaaaucaacaaccaacauaaugauaaccacaauaauaauaguuauuauagugauacuauuauccuuaauugcagucggacuauuauuauacuguaaagcacgcuaaggacuaguacuggcugcaucucccuuuccucuguccuccauccuucucccaggauggugaagggggaccugguacccagugauccccaccccaggauccuaaaucaugacuuaccugcuaauaaaaacucauuggaaaagugagaagaucuaaaaaaaaaaaaaaaaaaaaaaaaaaaaaaaaaaaaaaaaaaaaaaaaaaaaaaaaaaaaaaaaugcaucccccccccccccccccccccccccccccccaaaggcucuuuucagagccaccagaauu

SEQ ID NO: 5261 - RNA, 1923 nt, Artificial Sequence
  mRNA product Design h-1 comprising derived and/or modified sequence from HRSV(A2)__F-del_DSCav1_mut4 (opt11)
gggagacccgugacccggaaguuguacggcuacgcgacuuucccucccacaaacccucgcgcccuuccuuuccuacuugggcccggcagaaagcuuaccauggaacuccucauccucaaagccaaugccaucaccacaauccugacagcaguaaccuucugcuucgcauccggacaaaacaucaccgaagaauuuuaccagucaaccugcuccgcugucucaaaaggcuaccucucagcccuucgcaccggcugguacaccucggucauaacaauagaacucuccaauaucaaagaaaacaaaugcaacggcacugacgccaagguaaaacucaucaaacaggaacucgauaaauacaagaacgccguaacagaacuacaacuacucaugcaaucaacaccggccaccggcuccgguuccgccauaugcuccggaguggccgugugcaagguccuccaccuugaaggggaaguuaacaaaaucaaaucagcccuccucuccacuaacaaagccguaguaucccuaagcaacgguguauccguccucaccuucaaaguacuagaccuaaagaauuauaucgacaaacaacuccuccccauacucaacaaacaauccugcuccauaagcaacaucgaaacagucaucgaguuccagcagaaaaacaaccgacuccucgaaauaacccgcgaguucucagucaacgccggagucaccacacccgucagcaccuacaugcugaccaacuccgaacuccucuccuuaaucaaugacaugcccaucaccaaugaccaaaagaaacucaugucaaacaacguccaaauaguacgccaacaauccuacuccaucaugugcaucauaaaagaagaaguacucgccuacgucguccaacucccccucuacggcguaaucgacacccccugcuggaaacuacacacaagcccccucugcaccacaaacacuaaagagggcuccaacaucugucuaacccgcaccgaucgaggcugguacugcgacaacgccggaucugucucauucuucccccaagccgaaaccugcaaaguccaauccaaccgcgucuucugcgacaccaugaacucgagaacccucccuuccgaagucaaccuaugcaacgucgacauuuucaaccccaaauacgacugcaaaaucaugaccucgaaaaccgacguaucauccagcgucaucaccagccuaggcgcaaucgugagcugcuacggcaaaaccaaaugcaccgcgagcaauaaaaaccgcgggaucaucaaaacuuucuccaacggcugcgacuacgucuccaacaagggagucgauaccgucuccguaggcaacacccucuacugcgucaacaaacaagaaggcaaaucacuauacguaaaaggcgagccaaucauaaacuucuacgacccucuaguuuucccauccgacgaguucgacgcuagcaucucccaagucaacgagaaaaucaaccaaucccucgcauucauccgcaaauccgacgaacuccuccacaacguaaacgcaggcaaaucaacuacuaauauaaugaucacaaccaucauaauagucauaaucguaauccuccuaucccucaucgccgucggacuacugcucuacugcaaagcccgcuaaggacuaguacuggcugcaucucccuuuccucuguccuccauccuucucccaggauggugaagggggaccugguacccagugauccccaccccaggauccuaaaucaugacuuaccugcuaauaaaaacucauuggaaaagugagaagaucuaaaaaaaaaaaaaaaaaaaaaaaaaaaaaaaaaaaaaaaaaaaaaaaaaaaaaaaaaaaaaaaaugcaucccccccccccccccccccccccccccccccaaaggcucuuuucagagccaccagaauu

SEQ ID NO: 5262 - RNA, 2139 nt, Artificial Sequence
  mRNA product Design h-2 comprising derived and/or modified sequence from HRSV(A2)__F-del_DSCav1_mut4 (opt1)
gggagacccgugacccggaaguuguacggcuacgcgacuuucccucccacaaacccucgcgcccuuccuuuccuacuugggcccggcagaaagcuuaccauggagcugcucauccugaaggccaacgccaucaccaccauccugacggcggugaccuucugcuucgccagcggccagaacaucaccgaggaguucuaccaguccacgugcagcgccgucuccaagggguaccucagcgcccugcggaccggcugguacaccuccgugaucaccaucgagcugagcaacaucaaggagaacaagugcaacgggaccgacgccaaggugaagcucaucaagcaggagcuggacaaguacaagaacgcggucacggagcugcagcuccugaugcaguccaccccggcaaccggcuccggcuccgccaucugcagcggcgucgccgugugcaaggugcugcaccucgagggggaggucaacaagaucaagagcgcccugcuguccaccaacaaggccguggugagccucuccaacggcgucagcgugcugaccuucaaggugcuggaccucaagaacuacaucgacaagcagcugcugcccauccugaacaagcagagcugcuccaucagcaacaucgagacggugaucgaguuccagcagaagaacaaccggcuccuggagaucacccgcgaguucagcgugaacgccggggucaccacccccguguccacguacaugcugaccaacagcgagcuccugucccugaucaacgacaugccgaucaccaacgaccagaagaagcucaugagcaacaacgugcagaucguccggcagcaguccuacagcaucaugugcaucaucaaggaggaggugcuggcguacgugguccagcugccccucuacggcgugaucgacacccccugcuggaagcugcacacgagcccccugugcaccaccaacaccaaggagggguccaacaucugccucacgcgcaccgaccggggcugguacugcgacaacgccggcagcgucuccuucuucccgcaggccgagaccugcaaggugcagagcaaccgcguguucugcgacaccaugaacucccggacgcugcccagcgagguaaaccucugcaacgucgacaucuucaaccccaaguacgacugcaagaucaugaccuccaagaccgacgugagcuccagcgugaucaccucccugggggccaucgucagcugcuacggcaagacgaagugcaccgccagcaacaagaaccgggggaucaucaagaccuucuccaacggcugcgacuacgugagcaacaagggcguggacaccguguccgucgggaacacccuguacugcgugaacaagcaggagggcaagagccucuacgugaagggggagcccaucaucaacuucuacgacccgcuggucuuccccuccgacgaguucgacgcgagcaucucccaggugaacgagaagaucaaccagagccuggccuucauccgcaaguccgacgagcugcuccacaacgugaacgccggcaagagcacgaccaacaucaugaucaccaccaucaucaucgucaucaucgugauccugcugucccucaucgccguggggcugcugcucuacugcaaggcccggugaggacuagugaagggaacacccaaauuuaauucagccuuaagcacaauuaauuaagagugaaacguaauuguacaagcaguuggucacccaccauagggcaugaucaacaccgcaaccuuuccuuuuucccccagugauucugaaaaaccccucuucccuucagcuugcuuagauguuccaaauuuaguaagcuuaaggcggccuacagaagaaaaagaaaaaaaaggccacaaaaguucccucucacuuucaguaaauaaaauaaaagcagcaacagaaauaaagaaauaaaugaaauucaaaaugaaauaaauauuguguugugcagcauuaaaaaaucaauaaaaauuaaaaaugagcaagaucuaaaaaaaaaaaaaaaaaaaaaaaaaaaaaaaaaaaaaaaaaaaaaaaaaaaaaaaaaaaaaaaaugcaucccccccccccccccccccccccccccccccaaaggcucuuuucagagccaccagaauu

SEQ ID NO: 5263 - RNA, 2139 nt, Artificial Sequence
  mRNA product Design h-2 comprising derived and/or modified sequence from HRSV(A2)__F-del_DSCav1_mut4 (opt1)
gggagacccgugacccggaaguuguacggcuacgcgacuuucccucccacaaacccucgcgcccuuccuuuccuacuugggcccggcagaaagcuuaccauggagcugcucauccugaaggccaacgccaucaccaccauccugacggcggugaccuucugcuucgccagcggccagaacaucaccgaggaguucuaccaguccacgugcagcgccgucuccaagggguaccucagcgcccugcgcaccggcugguacaccuccgugaucaccaucgagcugagcaacaucaaggagaacaagugcaacgggaccgacgccaaggugaagcucaucaagcaggagcuggacaaguacaagaacgcggucacggagcugcagcuccugaugcaguccacccccgccaccggcagcggguccgccaucugcagcggcguggccgugugcaagguccugcaccucgagggcgaggugaacaagaucaaguccgcgcugcugagcaccaacaaggccguggucucccucagcaacgggguguccgugcugacguucaagguccuggaccucaagaacuacaucgacaagcagcugcugccgauccucaacaagcagagcugcuccaucagcaacaucgagaccgugaucgaguuccagcagaagaacaaccggcugcuggagaucacccgcgaguucuccgugaacgccggcgucaccacgcccgugagcaccuacaugcucaccaacagcgagcugcugucccucaucaacgacaugcccaucaccaacgaccagaagaagcugaugagcaacaacgugcagaucguccggcagcaguccuacagcaucaugugcaucaucaaggaggaggugcuggccuacgugguccagcucccccuguacggggugaucgacacgccgugcuggaagcugcacaccagcccccucugcaccaccaacacgaaggagggcuccaacaucugccugacccgcaccgaccgggggugguacugcgacaacgccggcuccgugagcuucuucccccaggcggagaccugcaagguccaguccaaccgcguguucugcgacacgaugaacagccggacccuccccuccgaggucaaccugugcaacguggacaucuucaacccgaaguacgacugcaagaucaugaccagcaagaccgacguguccagcuccgucaucacgagccugggcgccaucguguccugcuacgggaagaccaagugcaccgccagcaacaagaaccggggcaucaucaagaccuucuccaacgggugcgacuacgugagcaacaagggcgucgacacggugagcgugggcaacacccucuacugcgucaacaagcaggaggggaagucccuguacgugaagggcgagcccaucaucaacuucuacgacccccugguguuccccagcgacgaguucgacgccuccaucagccaggucaacgagaagaucaaccagucccucgccuucauccgcaagagcgacgagcugcugcacaacgugaacgcggggaaguccaccaccaacaucaugaucaccacgaucaucaucgugaucaucgucauccuccugagccugaucgccgugggccuccugcuguacugcaaggcccggugaggacuagugaagggaacacccaaauuuaauucagccuuaagcacaauuaauuaagagugaaacguaauuguacaagcaguuggucacccaccauagggcaugaucaacaccgcaaccuuuccuuuuucccccagugauucugaaaaaccccucuucccuucagcuugcuuagauguuccaaauuuaguaagcuuaaggcggccuacagaagaaaaagaaaaaaaaggccacaaaaguucccucucacuuucaguaaauaaaauaaaagcagcaacagaaauaaagaaauaaaugaaauucaaaaugaaauaaauauuguguugugcagcauuaaaaaaucaauaaaaauuaaaaaugagcaagaucuaaaaaaaaaaaaaaaaaaaaaaaaaaaaaaaaaaaaaaaaaaaaaaaaaaaaaaaaaaaaaaaaugcaucccccccccccccccccccccccccccccccaaaggcucuuuucagagccaccagaauu

SEQ ID NO: 5264 - RNA, 2139 nt, Artificial Sequence
  mRNA product Design h-2 comprising derived and/or modified sequence from HRSV(A2)__F-del_DSCav1_mut4 (opt2)
gggagacccgugacccggaaguuguacggcuacgcgacuuucccucccacaaacccucgcgcccuuccuuuccuacuugggcccggcagaaagcuuaccauggagcuccucauccucaaggccaacgccaucaccaccauccucaccgccgucaccuucugcuucgccuccggccagaacaucaccgaggaguucuaccaguccaccugcuccgccgucuccaagggcuaccucuccgcccuccgcaccggcugguacaccuccgucaucaccaucgagcucuccaacaucaaggagaacaagugcaacggcaccgacgccaaggucaagcucaucaagcaggagcucgacaaguacaagaacgccgucaccgagcuccagcuccucaugcaguccacccccgccaccggcuccggcuccgccaucugcuccggcgucgccgucugcaagguccuccaccucgagggcgaggucaacaagaucaaguccgcccuccucuccaccaacaaggccgucgucucccucuccaacggcgucuccguccucaccuucaagguccucgaccucaagaacuacaucgacaagcagcuccuccccauccucaacaagcaguccugcuccaucuccaacaucgagaccgucaucgaguuccagcagaagaacaaccgccuccucgagaucacccgcgaguucuccgucaacgccggcgucaccacccccgucuccaccuacaugcucaccaacuccgagcuccucucccucaucaacgacaugcccaucaccaacgaccagaagaagcucauguccaacaacguccagaucguccgccagcaguccuacuccaucaugugcaucaucaaggaggagguccucgccuacgucguccagcucccccucuacggcgucaucgacacccccugcuggaagcuccacaccuccccccucugcaccaccaacaccaaggagggcuccaacaucugccucacccgcaccgaccgcggcugguacugcgacaacgccggcuccgucuccuucuucccccaggccgagaccugcaagguccaguccaaccgcgucuucugcgacaccaugaacucccgcacccuccccuccgaggucaaccucugcaacgucgacaucuucaaccccaaguacgacugcaagaucaugaccuccaagaccgacgucuccuccuccgucaucaccucccucggcgccaucgucuccugcuacggcaagaccaagugcaccgccuccaacaagaaccgcggcaucaucaagaccuucuccaacggcugcgacuacgucuccaacaagggcgucgacaccgucuccgucggcaacacccucuacugcgucaacaagcaggagggcaagucccucuacgucaagggcgagcccaucaucaacuucuacgacccccucgucuuccccuccgacgaguucgacgccuccaucucccaggucaacgagaagaucaaccagucccucgccuucauccgcaaguccgacgagcuccuccacaacgucaacgccggcaaguccaccaccaacaucaugaucaccaccaucaucaucgucaucaucgucauccuccucucccucaucgccgucggccuccuccucuacugcaaggcccgcugaggacuagugaagggaacacccaaauuuaauucagccuuaagcacaauuaauuaagagugaaacguaauuguacaagcaguuggucacccaccauagggcaugaucaacaccgcaaccuuuccuuuuucccccagugauucugaaaaaccccucuucccuucagcuugcuuagauguuccaaauuuaguaagcuuaaggcggccuacagaagaaaaagaaaaaaaaggccacaaaaguucccucucacuuucaguaaauaaaauaaaagcagcaacagaaauaaagaaauaaaugaaauucaaaaugaaauaaauauuguguugugcagcauuaaaaaaucaauaaaaauuaaaaaugagcaagaucuaaaaaaaaaaaaaaaaaaaaaaaaaaaaaaaaaaaaaaaaaaaaaaaaaaaaaaaaaaaaaaaaugcaucccccccccccccccccccccccccccccccaaaggcucuuuucagagccaccagaauu

SEQ ID NO: 5265 - RNA, 2139 nt, Artificial Sequence
  mRNA product Design h-2 comprising derived and/or modified sequence from HRSV(A2)__F-del_DSCav1_mut4 (opt3)
gggagacccgugacccggaaguuguacggcuacgcgacuuucccucccacaaacccucgcgcccuuccuuuccuacuugggcccggcagaaagcuuaccauggagcugcucauccuuaaggccaacgcuauuaccacaauacugacugcagugacguucugcuuugccagcggccagaauaucaccgaagaguucuaccaauccacauguucugcggucucaaaaggguauuugagugcuuuaagaacuggaugguacaccagcguuauuacaaucgaacuguccaacauuaaggagaauaaaugcaacgguaccgacgccaaggugaaacuaaucaagcaggaacucgauaaguauaaaaaugcaguaacugagcugcagcuucugaugcagucuacacccgccaccggcucggggucagcuauauguagcggaguggcagucugcaagguguugcaccucgagggcgaaguuaacaaaaucaagagugcccugcuguccacgaauaaagcuguggucucucucagcaacgguguguccguauuaacuuuuaagguucuggaccuuaagaauuacauugauaaacaauugcugccuauccuaaacaagcagucauguaguauuagcaauaucgagaccgugauagaguuccagcagaaaaacaauaggcuccuggaaauuacacgggaguuuucugucaacgccggggugacuaccccaguguccacauauaugcuuaccaauucagaacuguugagccucaucaacgacaugccgauuacgaacgaucaaaagaaacugaugaguaauaacguccagaucguucgccagcagucuuacuccaucaugugcauuauaaaggaggaaguguuagcguauguagugcaacugccccucuacggagucaucgacacuccuuguuggaaacuucauacaagcccacugugcaccacuaauacaaaggagggcucgaacauuuguuugacccgaacggaucguggcugguacugcgacaaugcagggucuguguccuucuuuccccaggccgaaaccuguaagguucagucaaacagaguguucugcgauacaaugaauaguagaacucugccuagcgaggucaaccucugcaauguggacaucuuuaacccaaaauaugauuguaagauaaugaccuccaaaacagacguaucuagcucaguuauuaccagucugggagcuaucguguccugcuacgguaagacuaaauguacagccagcaauaagaacaggggcaucauuaagaccuucucuaaugggugcgauuaugucucaaacaaaggaguggacacugucagugugggcaauacgcuuuacuguguuaacaagcaagaggguaaaagccuguaugugaagggggaacccaucauuaacuuuuacgacccuuugguauucccauccgaugaguuugacgcaucuauaucgcaggucaaugagaaaaucaaccagagccucgcuuucauucggaaguccgaugaacuguuacacaaugugaacgccggaaagucaacaaccaauaucaugaucacuaccauuauaaucguuauuaucgugauucugcuaagucucaucgcggucggccugcuuuuguauugcaaagcccgcugaggacuagugaagggaacacccaaauuuaauucagccuuaagcacaauuaauuaagagugaaacguaauuguacaagcaguuggucacccaccauagggcaugaucaacaccgcaaccuuuccuuuuucccccagugauucugaaaaaccccucuucccuucagcuugcuuagauguuccaaauuuaguaagcuuaaggcggccuacagaagaaaaagaaaaaaaaggccacaaaaguucccucucacuuucaguaaauaaaauaaaagcagcaacagaaauaaagaaauaaaugaaauucaaaaugaaauaaauauuguguugugcagcauuaaaaaaucaauaaaaauuaaaaaugagcaagaucuaaaaaaaaaaaaaaaaaaaaaaaaaaaaaaaaaaaaaaaaaaaaaaaaaaaaaaaaaaaaaaaaugcaucccccccccccccccccccccccccccccccaaaggcucuuuucagagccaccagaauu

SEQ ID NO: 5266 - RNA, 2139 nt, Artificial Sequence
  mRNA product Design h-2 comprising derived and/or modified sequence from HRSV(A2)__F-del_DSCav1_mut4 (opt4)
gggagacccgugacccggaaguuguacggcuacgcgacuuucccucccacaaacccucgcgcccuuccuuuccuacuugggcccggcagaaagcuuaccauggagcugcugauccugaaggccaacgccaucaccaccauccugaccgccgugaccuucugcuucgccagcggccagaacaucaccgaggaguucuaccagagcaccugcagcgccgugagcaagggcuaccugagcgcccugagaaccggcugguacaccagcgugaucaccaucgagcugagcaacaucaaggagaacaagugcaacggcaccgacgccaaggugaagcugaucaagcaggagcuggacaaguacaagaacgccgugaccgagcugcagcugcugaugcagagcacccccgccaccggcagcggcagcgccaucugcagcggcguggccgugugcaaggugcugcaccuggagggcgaggugaacaagaucaagagcgcccugcugagcaccaacaaggccguggugagccugagcaacggcgugagcgugcugaccuucaaggugcuggaccugaagaacuacaucgacaagcagcugcugcccauccugaacaagcagagcugcagcaucagcaacaucgagaccgugaucgaguuccagcagaagaacaacagacugcuggagaucaccagagaguucagcgugaacgccggcgugaccacccccgugagcaccuacaugcugaccaacagcgagcugcugagccugaucaacgacaugcccaucaccaacgaccagaagaagcugaugagcaacaacgugcagaucgugagacagcagagcuacagcaucaugugcaucaucaaggaggaggugcuggccuacguggugcagcugccccuguacggcgugaucgacacccccugcuggaagcugcacaccagcccccugugcaccaccaacaccaaggagggcagcaacaucugccugaccagaaccgacagaggcugguacugcgacaacgccggcagcgugagcuucuucccccaggccgagaccugcaaggugcagagcaacagaguguucugcgacaccaugaacagcagaacccugcccagcgaggugaaccugugcaacguggacaucuucaaccccaaguacgacugcaagaucaugaccagcaagaccgacgugagcagcagcgugaucaccagccugggcgccaucgugagcugcuacggcaagaccaagugcaccgccagcaacaagaacagaggcaucaucaagaccuucagcaacggcugcgacuacgugagcaacaagggcguggacaccgugagcgugggcaacacccuguacugcgugaacaagcaggagggcaagagccuguacgugaagggcgagcccaucaucaacuucuacgacccccugguguuccccagcgacgaguucgacgccagcaucagccaggugaacgagaagaucaaccagagccuggccuucaucagaaagagcgacgagcugcugcacaacgugaacgccggcaagagcaccaccaacaucaugaucaccaccaucaucaucgugaucaucgugauccugcugagccugaucgccgugggccugcugcuguacugcaaggccagaugaggacuagugaagggaacacccaaauuuaauucagccuuaagcacaauuaauuaagagugaaacguaauuguacaagcaguuggucacccaccauagggcaugaucaacaccgcaaccuuuccuuuuucccccagugauucugaaaaaccccucuucccuucagcuugcuuagauguuccaaauuuaguaagcuuaaggcggccuacagaagaaaaagaaaaaaaaggccacaaaaguucccucucacuuucaguaaauaaaauaaaagcagcaacagaaauaaagaaauaaaugaaauucaaaaugaaauaaauauuguguugugcagcauuaaaaaaucaauaaaaauuaaaaaugagcaagaucuaaaaaaaaaaaaaaaaaaaaaaaaaaaaaaaaaaaaaaaaaaaaaaaaaaaaaaaaaaaaaaaaugcaucccccccccccccccccccccccccccccccaaaggcucuuuucagagccaccagaauu

SEQ ID NO: 5267 - RNA, 2139 nt, Artificial Sequence
  mRNA product Design h-2 comprising derived and/or modified sequence from HRSV(A2)__F-del_DSCav1_mut4 (opt5)
gggagacccgugacccggaaguuguacggcuacgcgacuuucccucccacaaacccucgcgcccuuccuuuccuacuugggcccggcagaaagcuuaccauggagcugcucauccugaaggccaacgcuauuaccacaauccuuacggccgugaccuucugcuuugcgagcggccagaauauuacagaagaguucuaccaauccaccuguucugcugucagcaaaggguaucuguccgcccucagaacaggaugguacaccucuguuaucacaauugaacugagcaacaucaaggagaauaaaugcaacggcaccgacgccaaggugaaacuuaucaagcaggaacuggauaaguauaaaaaugcugugacggagcuccagcugcugaugcaguccacccccgccacagggucuggaagcgcuauuuguuccggcgucgccgugugcaagguucuccaccuggagggggaagugaacaaaaucaagagcgcgcuucugucuaccaauaaagccgucgugucccucagcaacggaguuucugugcugacauuuaagguccuugaccugaagaauuacauugauaaacaacuccugccuauccugaacaagcaguccuguagcauuucuaauaucgagaccgugauugaguuccagcagaaaaacaaucggcuccuggaaaucacgcgcgaguuuuccgugaacgcuggcgucacaaccccgguuagcacauauaugcuuaccaauuccgaacugcucucucugaucaacgacaugcccauuaccaacgaucaaaagaaacuuaugagcaauaacgugcagaucgugagacagcaguccuacagcauuaugugcaucauuaaggaggaaguccuggccuaugugguucaacucccucuguacggcgugaucgacacacccuguuggaaacugcauacgucuccucucugcaccacaaauaccaaggagggguccaacaucugucugacacggaccgaucgcggaugguacugcgacaaugcuggcagcgucucuuucuuuccccaggccgaaacguguaaggugcagagcaacagaguuuucugcgauacaaugaacuccagaacccugccuucugaggugaaucucugcaaugucgacauuuuuaacccgaaauaugauuguaagaucaugaccagcaaaacagacguguccagcucugucauuaccucccugggggcgaucgugagcugcuacggaaagacaaaauguacggccucuaauaagaaccggggcauuaucaagaccuucuccaaugggugcgauuauguuagcaacaaaggaguggacacagucuccgugggcaauacccuuuacuguguuaacaagcaagagggcaaaucucuguaugugaagggggaacccaucauuaacuuuuacgacccucucgucuuccccagcgaugaguuugacgcuuccaucucucaggugaaugagaaaauuaaccagagccuggccuucauccgcaaguccgaugaacugcuccacaaugugaacgcuggaaagagcacaaccaauauuaugaucacgaccauuaucaucguuauuaucgucauucugcuuucucugaucgccgugggccuccugcuguauugcaaagccagaugaggacuagugaagggaacacccaaauuuaauucagccuuaagcacaauuaauuaagagugaaacguaauuguacaagcaguuggucacccaccauagggcaugaucaacaccgcaaccuuuccuuuuucccccagugauucugaaaaaccccucuucccuucagcuugcuuagauguuccaaauuuaguaagcuuaaggcggccuacagaagaaaaagaaaaaaaaggccacaaaaguucccucucacuuucaguaaauaaaauaaaagcagcaacagaaauaaagaaauaaaugaaauucaaaaugaaauaaauauuguguugugcagcauuaaaaaaucaauaaaaauuaaaaaugagcaagaucuaaaaaaaaaaaaaaaaaaaaaaaaaaaaaaaaaaaaaaaaaaaaaaaaaaaaaaaaaaaaaaaaugcaucccccccccccccccccccccccccccccccaaaggcucuuuucagagccaccagaauu

SEQ ID NO: 5268 - RNA, 2139 nt, Artificial Sequence
  mRNA product Design h-2 comprising derived and/or modified sequence from HRSV(A2)__F-del_DSCav1_mut4 (opt6)
gggagacccgugacccggaaguuguacggcuacgcgacuuucccucccacaaacccucgcgcccuuccuuuccuacuugggcccggcagaaagcuuaccauggaacuuuuaauacuaaaagcuaacgccauaaccacuauacuaacagcagucacauucugcuucgcaucaggccaaaacauaaccgaagaauuuuaccaauccacuuguucagcagucuccaaaggauauuuauccgcacuucguacaggaugguauacaucaguaauaacaauagaacucuccaacauaaaagaaaauaaaugcaacggcaccgacgcaaaaguaaaacucaucaaacaagaauuagacaaauacaagaacgccguaacagaacuacaauuacuaaugcaaucaacacccgccacaggaucaggaucugcaauaugcucuggaguagcaguaugcaaaguauuacaccuagaaggagaaguaaacaaaaucaaaagcgcacuacuauccacaaacaaagcuguaguaucacuaucaaacggaguaucaguauuaacuuucaaaguacuugaucuaaaaaacuacauagacaaacaacuacuacccauauuaaacaaacaaucaugcucaauaagcaauauagaaacaguaauagaauuucaacaaaaaaacaacagacuacuagaaaucacaagggaauuuucaguaaaugccgguguuacaaccccaguaucaacauacaugcuaacuaacucagaacuacuauccuuaauaaacgauaugccaauaacaaacgaucaaaaaaaacuaauguccaacaacguacaaauaguaagacaacaaucauacucaaucaugugcauuauaaaagaagaagucuuagcauacguaguacaauuaccacuauacgguguaauagauacaccauguuggaaauuacacacaagcccacuaugcacaacuaacacaaaagaaggcucaaauauauguuuaacaagaacagaccgagguugguacugcgacaaugcaggaucaguaucauucuuuccacaagcagaaacauguaaaguucaauccaacagaguauucugcgacacaaugaacuccagaacacuaccuucagaaguaaaccucuguaacguagacauauuuaaucccaaguacgacugcaaaauaaugacaucgaaaacagacguaagcuccucagugauaacaucccucggcgccaucguauccuguuacgguaaaacuaaauguaccgccucaaacaaaaaccgcgguauuauaaaaacuuuuucuaauggcugcgauuacguaagcaacaaaggcgucgacacaguuuccguaggaaacacacuauacugcguaaacaaacaagaagguaaaucucuauacguaaaaggagaaccaauaauaaauuucuaugauccuuuaguauucccauccgaugaauuugacgccucuaucucacaagucaacgaaaaaauaaaucaaucauuagcauucauacgaaaaucagacgaacuacuacacaacguaaacgcaggaaaaucaacaaccaacauaaugauaaccacaauaauaauaguuauuauagugauacuauuauccuuaauugcagucggacuauuauuauacuguaaagcacgcuaaggacuagugaagggaacacccaaauuuaauucagccuuaagcacaauuaauuaagagugaaacguaauuguacaagcaguuggucacccaccauagggcaugaucaacaccgcaaccuuuccuuuuucccccagugauucugaaaaaccccucuucccuucagcuugcuuagauguuccaaauuuaguaagcuuaaggcggccuacagaagaaaaagaaaaaaaaggccacaaaaguucccucucacuuucaguaaauaaaauaaaagcagcaacagaaauaaagaaauaaaugaaauucaaaaugaaauaaauauuguguugugcagcauuaaaaaaucaauaaaaauuaaaaaugagcaagaucuaaaaaaaaaaaaaaaaaaaaaaaaaaaaaaaaaaaaaaaaaaaaaaaaaaaaaaaaaaaaaaaaugcaucccccccccccccccccccccccccccccccaaaggcucuuuucagagccaccagaauu

SEQ ID NO: 5269 - RNA, 2139 nt, Artificial Sequence
  mRNA product Design h-2 comprising derived and/or modified sequence from HRSV(A2)__F-del_DSCav1_mut4 (opt11)
gggagacccgugacccggaaguuguacggcuacgcgacuuucccucccacaaacccucgcgcccuuccuuuccuacuugggcccggcagaaagcuuaccauggaacuccucauccucaaagccaaugccaucaccacaauccugacagcaguaaccuucugcuucgcauccggacaaaacaucaccgaagaauuuuaccagucaaccugcuccgcugucucaaaaggcuaccucucagcccuucgcaccggcugguacaccucggucauaacaauagaacucuccaauaucaaagaaaacaaaugcaacggcacugacgccaagguaaaacucaucaaacaggaacucgauaaauacaagaacgccguaacagaacuacaacuacucaugcaaucaacaccggccaccggcuccgguuccgccauaugcuccggaguggccgugugcaagguccuccaccuugaaggggaaguuaacaaaaucaaaucagcccuccucuccacuaacaaagccguaguaucccuaagcaacgguguauccguccucaccuucaaaguacuagaccuaaagaauuauaucgacaaacaacuccuccccauacucaacaaacaauccugcuccauaagcaacaucgaaacagucaucgaguuccagcagaaaaacaaccgacuccucgaaauaacccgcgaguucucagucaacgccggagucaccacacccgucagcaccuacaugcugaccaacuccgaacuccucuccuuaaucaaugacaugcccaucaccaaugaccaaaagaaacucaugucaaacaacguccaaauaguacgccaacaauccuacuccaucaugugcaucauaaaagaagaaguacucgccuacgucguccaacucccccucuacggcguaaucgacacccccugcuggaaacuacacacaagcccccucugcaccacaaacacuaaagagggcuccaacaucugucuaacccgcaccgaucgaggcugguacugcgacaacgccggaucugucucauucuucccccaagccgaaaccugcaaaguccaauccaaccgcgucuucugcgacaccaugaacucgagaacccucccuuccgaagucaaccuaugcaacgucgacauuuucaaccccaaauacgacugcaaaaucaugaccucgaaaaccgacguaucauccagcgucaucaccagccuaggcgcaaucgugagcugcuacggcaaaaccaaaugcaccgcgagcaauaaaaaccgcgggaucaucaaaacuuucuccaacggcugcgacuacgucuccaacaagggagucgauaccgucuccguaggcaacacccucuacugcgucaacaaacaagaaggcaaaucacuauacguaaaaggcgagccaaucauaaacuucuacgacccucuaguuuucccauccgacgaguucgacgcuagcaucucccaagucaacgagaaaaucaaccaaucccucgcauucauccgcaaauccgacgaacuccuccacaacguaaacgcaggcaaaucaacuacuaauauaaugaucacaaccaucauaauagucauaaucguaauccuccuaucccucaucgccgucggacuacugcucuacugcaaagcccgcuaaggacuagugaagggaacacccaaauuuaauucagccuuaagcacaauuaauuaagagugaaacguaauuguacaagcaguuggucacccaccauagggcaugaucaacaccgcaaccuuuccuuuuucccccagugauucugaaaaaccccucuucccuucagcuugcuuagauguuccaaauuuaguaagcuuaaggcggccuacagaagaaaaagaaaaaaaaggccacaaaaguucccucucacuuucaguaaauaaaauaaaagcagcaacagaaauaaagaaauaaaugaaauucaaaaugaaauaaauauuguguugugcagcauuaaaaaaucaauaaaaauuaaaaaugagcaagaucuaaaaaaaaaaaaaaaaaaaaaaaaaaaaaaaaaaaaaaaaaaaaaaaaaaaaaaaaaaaaaaaaugcaucccccccccccccccccccccccccccccccaaaggcucuuuucagagccaccagaauu

SEQ ID NO: 5270 - RNA, 1919 nt, Artificial Sequence
  mRNA product Design h-3 comprising derived and/or modified sequence from HRSV(A2)__F-del_DSCav1_mut4 (opt1)
gggagacccgugacccggaaguuguacggcuacgcgacuuucccucccacaaacccucgcgcccuuccuuuccuacuugggcccggcagaaagcuuaccauggagcugcucauccugaaggccaacgccaucaccaccauccugacggcggugaccuucugcuucgccagcggccagaacaucaccgaggaguucuaccaguccacgugcagcgccgucuccaagggguaccucagcgcccugcggaccggcugguacaccuccgugaucaccaucgagcugagcaacaucaaggagaacaagugcaacgggaccgacgccaaggugaagcucaucaagcaggagcuggacaaguacaagaacgcggucacggagcugcagcuccugaugcaguccaccccggcaaccggcuccggcuccgccaucugcagcggcgucgccgugugcaaggugcugcaccucgagggggaggucaacaagaucaagagcgcccugcuguccaccaacaaggccguggugagccucuccaacggcgucagcgugcugaccuucaaggugcuggaccucaagaacuacaucgacaagcagcugcugcccauccugaacaagcagagcugcuccaucagcaacaucgagacggugaucgaguuccagcagaagaacaaccggcuccuggagaucacccgcgaguucagcgugaacgccggggucaccacccccguguccacguacaugcugaccaacagcgagcuccugucccugaucaacgacaugccgaucaccaacgaccagaagaagcucaugagcaacaacgugcagaucguccggcagcaguccuacagcaucaugugcaucaucaaggaggaggugcuggcguacgugguccagcugccccucuacggcgugaucgacacccccugcuggaagcugcacacgagcccccugugcaccaccaacaccaaggagggguccaacaucugccucacgcgcaccgaccggggcugguacugcgacaacgccggcagcgucuccuucuucccgcaggccgagaccugcaaggugcagagcaaccgcguguucugcgacaccaugaacucccggacgcugcccagcgagguaaaccucugcaacgucgacaucuucaaccccaaguacgacugcaagaucaugaccuccaagaccgacgugagcuccagcgugaucaccucccugggggccaucgucagcugcuacggcaagacgaagugcaccgccagcaacaagaaccgggggaucaucaagaccuucuccaacggcugcgacuacgugagcaacaagggcguggacaccguguccgucgggaacacccuguacugcgugaacaagcaggagggcaagagccucuacgugaagggggagcccaucaucaacuucuacgacccgcuggucuuccccuccgacgaguucgacgcgagcaucucccaggugaacgagaagaucaaccagagccuggccuucauccgcaaguccgacgagcugcuccacaacgugaacgccggcaagagcacgaccaacaucaugaucaccaccaucaucaucgucaucaucgugauccugcugucccucaucgccguggggcugcugcucuacugcaaggcccggugaggacuaguggaagcauuuuccuggcugauuaaaagaaauuacucagcuauggucaucuguuccuguuagaaggcuaugcagcauauuauauacuaugcgcauguuaugaaaugcauaauaaaaaauuuuaaaaaaucuaaaagaucuaaaaaaaaaaaaaaaaaaaaaaaaaaaaaaaaaaaaaaaaaaaaaaaaaaaaaaaaaaaaaaaaugcaucccccccccccccccccccccccccccccccaaaggcucuuuucagagccaccagaauu

SEQ ID NO: 5271 - RNA, 1919 nt, Artificial Sequence
  mRNA product Design h-3 comprising derived and/or modified sequence from HRSV(A2)__F-del_DSCav1_mut4 (opt1)
gggagacccgugacccggaaguuguacggcuacgcgacuuucccucccacaaacccucgcgcccuuccuuuccuacuugggcccggcagaaagcuuaccauggagcugcucauccugaaggccaacgccaucaccaccauccugacggcggugaccuucugcuucgccagcggccagaacaucaccgaggaguucuaccaguccacgugcagcgccgucuccaagggguaccucagcgcccugcgcaccggcugguacaccuccgugaucaccaucgagcugagcaacaucaaggagaacaagugcaacgggaccgacgccaaggugaagcucaucaagcaggagcuggacaaguacaagaacgcggucacggagcugcagcuccugaugcaguccacccccgccaccggcagcggguccgccaucugcagcggcguggccgugugcaagguccugcaccucgagggcgaggugaacaagaucaaguccgcgcugcugagcaccaacaaggccguggucucccucagcaacgggguguccgugcugacguucaagguccuggaccucaagaacuacaucgacaagcagcugcugccgauccucaacaagcagagcugcuccaucagcaacaucgagaccgugaucgaguuccagcagaagaacaaccggcugcuggagaucacccgcgaguucuccgugaacgccggcgucaccacgcccgugagcaccuacaugcucaccaacagcgagcugcugucccucaucaacgacaugcccaucaccaacgaccagaagaagcugaugagcaacaacgugcagaucguccggcagcaguccuacagcaucaugugcaucaucaaggaggaggugcuggccuacgugguccagcucccccuguacggggugaucgacacgccgugcuggaagcugcacaccagcccccucugcaccaccaacacgaaggagggcuccaacaucugccugacccgcaccgaccgggggugguacugcgacaacgccggcuccgugagcuucuucccccaggcggagaccugcaagguccaguccaaccgcguguucugcgacacgaugaacagccggacccuccccuccgaggucaaccugugcaacguggacaucuucaacccgaaguacgacugcaagaucaugaccagcaagaccgacguguccagcuccgucaucacgagccugggcgccaucguguccugcuacgggaagaccaagugcaccgccagcaacaagaaccggggcaucaucaagaccuucuccaacgggugcgacuacgugagcaacaagggcgucgacacggugagcgugggcaacacccucuacugcgucaacaagcaggaggggaagucccuguacgugaagggcgagcccaucaucaacuucuacgacccccugguguuccccagcgacgaguucgacgccuccaucagccaggucaacgagaagaucaaccagucccucgccuucauccgcaagagcgacgagcugcugcacaacgugaacgcggggaaguccaccaccaacaucaugaucaccacgaucaucaucgugaucaucgucauccuccugagccugaucgccgugggccuccugcuguacugcaaggcccggugaggacuaguggaagcauuuuccuggcugauuaaaagaaauuacucagcuauggucaucuguuccuguuagaaggcuaugcagcauauuauauacuaugcgcauguuaugaaaugcauaauaaaaaauuuuaaaaaaucuaaaagaucuaaaaaaaaaaaaaaaaaaaaaaaaaaaaaaaaaaaaaaaaaaaaaaaaaaaaaaaaaaaaaaaaugcaucccccccccccccccccccccccccccccccaaaggcucuuuucagagccaccagaauu

SEQ ID NO: 5272 - RNA, 1919 nt, Artificial Sequence
  mRNA product Design h-3 comprising derived and/or modified sequence from HRSV(A2)__F-del_DSCav1_mut4 (opt2)
gggagacccgugacccggaaguuguacggcuacgcgacuuucccucccacaaacccucgcgcccuuccuuuccuacuugggcccggcagaaagcuuaccauggagcuccucauccucaaggccaacgccaucaccaccauccucaccgccgucaccuucugcuucgccuccggccagaacaucaccgaggaguucuaccaguccaccugcuccgccgucuccaagggcuaccucuccgcccuccgcaccggcugguacaccuccgucaucaccaucgagcucuccaacaucaaggagaacaagugcaacggcaccgacgccaaggucaagcucaucaagcaggagcucgacaaguacaagaacgccgucaccgagcuccagcuccucaugcaguccacccccgccaccggcuccggcuccgccaucugcuccggcgucgccgucugcaagguccuccaccucgagggcgaggucaacaagaucaaguccgcccuccucuccaccaacaaggccgucgucucccucuccaacggcgucuccguccucaccuucaagguccucgaccucaagaacuacaucgacaagcagcuccuccccauccucaacaagcaguccugcuccaucuccaacaucgagaccgucaucgaguuccagcagaagaacaaccgccuccucgagaucacccgcgaguucuccgucaacgccggcgucaccacccccgucuccaccuacaugcucaccaacuccgagcuccucucccucaucaacgacaugcccaucaccaacgaccagaagaagcucauguccaacaacguccagaucguccgccagcaguccuacuccaucaugugcaucaucaaggaggagguccucgccuacgucguccagcucccccucuacggcgucaucgacacccccugcuggaagcuccacaccuccccccucugcaccaccaacaccaaggagggcuccaacaucugccucacccgcaccgaccgcggcugguacugcgacaacgccggcuccgucuccuucuucccccaggccgagaccugcaagguccaguccaaccgcgucuucugcgacaccaugaacucccgcacccuccccuccgaggucaaccucugcaacgucgacaucuucaaccccaaguacgacugcaagaucaugaccuccaagaccgacgucuccuccuccgucaucaccucccucggcgccaucgucuccugcuacggcaagaccaagugcaccgccuccaacaagaaccgcggcaucaucaagaccuucuccaacggcugcgacuacgucuccaacaagggcgucgacaccgucuccgucggcaacacccucuacugcgucaacaagcaggagggcaagucccucuacgucaagggcgagcccaucaucaacuucuacgacccccucgucuuccccuccgacgaguucgacgccuccaucucccaggucaacgagaagaucaaccagucccucgccuucauccgcaaguccgacgagcuccuccacaacgucaacgccggcaaguccaccaccaacaucaugaucaccaccaucaucaucgucaucaucgucauccuccucucccucaucgccgucggccuccuccucuacugcaaggcccgcugaggacuaguggaagcauuuuccuggcugauuaaaagaaauuacucagcuauggucaucuguuccuguuagaaggcuaugcagcauauuauauacuaugcgcauguuaugaaaugcauaauaaaaaauuuuaaaaaaucuaaaagaucuaaaaaaaaaaaaaaaaaaaaaaaaaaaaaaaaaaaaaaaaaaaaaaaaaaaaaaaaaaaaaaaaugcaucccccccccccccccccccccccccccccccaaaggcucuuuucagagccaccagaauu

SEQ ID NO: 5273 - RNA, 1919 nt, Artificial Sequence
  mRNA product Design h-3 comprising derived and/or modified sequence from HRSV(A2)__F-del_DSCav1_mut4 (opt3)
gggagacccgugacccggaaguuguacggcuacgcgacuuucccucccacaaacccucgcgcccuuccuuuccuacuugggcccggcagaaagcuuaccauggagcugcucauccuuaaggccaacgcuauuaccacaauacugacugcagugacguucugcuuugccagcggccagaauaucaccgaagaguucuaccaauccacauguucugcggucucaaaaggguauuugagugcuuuaagaacuggaugguacaccagcguuauuacaaucgaacuguccaacauuaaggagaauaaaugcaacgguaccgacgccaaggugaaacuaaucaagcaggaacucgauaaguauaaaaaugcaguaacugagcugcagcuucugaugcagucuacacccgccaccggcucggggucagcuauauguagcggaguggcagucugcaagguguugcaccucgagggcgaaguuaacaaaaucaagagugcccugcuguccacgaauaaagcuguggucucucucagcaacgguguguccguauuaacuuuuaagguucuggaccuuaagaauuacauugauaaacaauugcugccuauccuaaacaagcagucauguaguauuagcaauaucgagaccgugauagaguuccagcagaaaaacaauaggcuccuggaaauuacacgggaguuuucugucaacgccggggugacuaccccaguguccacauauaugcuuaccaauucagaacuguugagccucaucaacgacaugccgauuacgaacgaucaaaagaaacugaugaguaauaacguccagaucguucgccagcagucuuacuccaucaugugcauuauaaaggaggaaguguuagcguauguagugcaacugccccucuacggagucaucgacacuccuuguuggaaacuucauacaagcccacugugcaccacuaauacaaaggagggcucgaacauuuguuugacccgaacggaucguggcugguacugcgacaaugcagggucuguguccuucuuuccccaggccgaaaccuguaagguucagucaaacagaguguucugcgauacaaugaauaguagaacucugccuagcgaggucaaccucugcaauguggacaucuuuaacccaaaauaugauuguaagauaaugaccuccaaaacagacguaucuagcucaguuauuaccagucugggagcuaucguguccugcuacgguaagacuaaauguacagccagcaauaagaacaggggcaucauuaagaccuucucuaaugggugcgauuaugucucaaacaaaggaguggacacugucagugugggcaauacgcuuuacuguguuaacaagcaagaggguaaaagccuguaugugaagggggaacccaucauuaacuuuuacgacccuuugguauucccauccgaugaguuugacgcaucuauaucgcaggucaaugagaaaaucaaccagagccucgcuuucauucggaaguccgaugaacuguuacacaaugugaacgccggaaagucaacaaccaauaucaugaucacuaccauuauaaucguuauuaucgugauucugcuaagucucaucgcggucggccugcuuuuguauugcaaagcccgcugaggacuaguggaagcauuuuccuggcugauuaaaagaaauuacucagcuauggucaucuguuccuguuagaaggcuaugcagcauauuauauacuaugcgcauguuaugaaaugcauaauaaaaaauuuuaaaaaaucuaaaagaucuaaaaaaaaaaaaaaaaaaaaaaaaaaaaaaaaaaaaaaaaaaaaaaaaaaaaaaaaaaaaaaaaugcaucccccccccccccccccccccccccccccccaaaggcucuuuucagagccaccagaauu

SEQ ID NO: 5274 - RNA, 1919 nt, Artificial Sequence
  mRNA product Design h-3 comprising derived and/or modified sequence from HRSV(A2)__F-del_DSCav1_mut4 (opt4)
gggagacccgugacccggaaguuguacggcuacgcgacuuucccucccacaaacccucgcgcccuuccuuuccuacuugggcccggcagaaagcuuaccauggagcugcugauccugaaggccaacgccaucaccaccauccugaccgccgugaccuucugcuucgccagcggccagaacaucaccgaggaguucuaccagagcaccugcagcgccgugagcaagggcuaccugagcgcccugagaaccggcugguacaccagcgugaucaccaucgagcugagcaacaucaaggagaacaagugcaacggcaccgacgccaaggugaagcugaucaagcaggagcuggacaaguacaagaacgccgugaccgagcugcagcugcugaugcagagcacccccgccaccggcagcggcagcgccaucugcagcggcguggccgugugcaaggugcugcaccuggagggcgaggugaacaagaucaagagcgcccugcugagcaccaacaaggccguggugagccugagcaacggcgugagcgugcugaccuucaaggugcuggaccugaagaacuacaucgacaagcagcugcugcccauccugaacaagcagagcugcagcaucagcaacaucgagaccgugaucgaguuccagcagaagaacaacagacugcuggagaucaccagagaguucagcgugaacgccggcgugaccacccccgugagcaccuacaugcugaccaacagcgagcugcugagccugaucaacgacaugcccaucaccaacgaccagaagaagcugaugagcaacaacgugcagaucgugagacagcagagcuacagcaucaugugcaucaucaaggaggaggugcuggccuacguggugcagcugccccuguacggcgugaucgacacccccugcuggaagcugcacaccagcccccugugcaccaccaacaccaaggagggcagcaacaucugccugaccagaaccgacagaggcugguacugcgacaacgccggcagcgugagcuucuucccccaggccgagaccugcaaggugcagagcaacagaguguucugcgacaccaugaacagcagaacccugcccagcgaggugaaccugugcaacguggacaucuucaaccccaaguacgacugcaagaucaugaccagcaagaccgacgugagcagcagcgugaucaccagccugggcgccaucgugagcugcuacggcaagaccaagugcaccgccagcaacaagaacagaggcaucaucaagaccuucagcaacggcugcgacuacgugagcaacaagggcguggacaccgugagcgugggcaacacccuguacugcgugaacaagcaggagggcaagagccuguacgugaagggcgagcccaucaucaacuucuacgacccccugguguuccccagcgacgaguucgacgccagcaucagccaggugaacgagaagaucaaccagagccuggccuucaucagaaagagcgacgagcugcugcacaacgugaacgccggcaagagcaccaccaacaucaugaucaccaccaucaucaucgugaucaucgugauccugcugagccugaucgccgugggccugcugcuguacugcaaggccagaugaggacuaguggaagcauuuuccuggcugauuaaaagaaauuacucagcuauggucaucuguuccuguuagaaggcuaugcagcauauuauauacuaugcgcauguuaugaaaugcauaauaaaaaauuuuaaaaaaucuaaaagaucuaaaaaaaaaaaaaaaaaaaaaaaaaaaaaaaaaaaaaaaaaaaaaaaaaaaaaaaaaaaaaaaaugcaucccccccccccccccccccccccccccccccaaaggcucuuuucagagccaccagaauu

SEQ ID NO: 5275 - RNA, 1919 nt, Artificial Sequence
  mRNA product Design h-3 comprising derived and/or modified sequence from HRSV(A2)__F-del_DSCav1_mut4 (opt5)
gggagacccgugacccggaaguuguacggcuacgcgacuuucccucccacaaacccucgcgcccuuccuuuccuacuugggcccggcagaaagcuuaccauggagcugcucauccugaaggccaacgcuauuaccacaauccuuacggccgugaccuucugcuuugcgagcggccagaauauuacagaagaguucuaccaauccaccuguucugcugucagcaaaggguaucuguccgcccucagaacaggaugguacaccucuguuaucacaauugaacugagcaacaucaaggagaauaaaugcaacggcaccgacgccaaggugaaacuuaucaagcaggaacuggauaaguauaaaaaugcugugacggagcuccagcugcugaugcaguccacccccgccacagggucuggaagcgcuauuuguuccggcgucgccgugugcaagguucuccaccuggagggggaagugaacaaaaucaagagcgcgcuucugucuaccaauaaagccgucgugucccucagcaacggaguuucugugcugacauuuaagguccuugaccugaagaauuacauugauaaacaacuccugccuauccugaacaagcaguccuguagcauuucuaauaucgagaccgugauugaguuccagcagaaaaacaaucggcuccuggaaaucacgcgcgaguuuuccgugaacgcuggcgucacaaccccgguuagcacauauaugcuuaccaauuccgaacugcucucucugaucaacgacaugcccauuaccaacgaucaaaagaaacuuaugagcaauaacgugcagaucgugagacagcaguccuacagcauuaugugcaucauuaaggaggaaguccuggccuaugugguucaacucccucuguacggcgugaucgacacacccuguuggaaacugcauacgucuccucucugcaccacaaauaccaaggagggguccaacaucugucugacacggaccgaucgcggaugguacugcgacaaugcuggcagcgucucuuucuuuccccaggccgaaacguguaaggugcagagcaacagaguuuucugcgauacaaugaacuccagaacccugccuucugaggugaaucucugcaaugucgacauuuuuaacccgaaauaugauuguaagaucaugaccagcaaaacagacguguccagcucugucauuaccucccugggggcgaucgugagcugcuacggaaagacaaaauguacggccucuaauaagaaccggggcauuaucaagaccuucuccaaugggugcgauuauguuagcaacaaaggaguggacacagucuccgugggcaauacccuuuacuguguuaacaagcaagagggcaaaucucuguaugugaagggggaacccaucauuaacuuuuacgacccucucgucuuccccagcgaugaguuugacgcuuccaucucucaggugaaugagaaaauuaaccagagccuggccuucauccgcaaguccgaugaacugcuccacaaugugaacgcuggaaagagcacaaccaauauuaugaucacgaccauuaucaucguuauuaucgucauucugcuuucucugaucgccgugggccuccugcuguauugcaaagccagaugaggacuaguggaagcauuuuccuggcugauuaaaagaaauuacucagcuauggucaucuguuccuguuagaaggcuaugcagcauauuauauacuaugcgcauguuaugaaaugcauaauaaaaaauuuuaaaaaaucuaaaagaucuaaaaaaaaaaaaaaaaaaaaaaaaaaaaaaaaaaaaaaaaaaaaaaaaaaaaaaaaaaaaaaaaugcaucccccccccccccccccccccccccccccccaaaggcucuuuucagagccaccagaauu

SEQ ID NO: 5276 - RNA, 1919 nt, Artificial Sequence
  mRNA product Design h-3 comprising derived and/or modified sequence from HRSV(A2)__F-del_DSCav1_mut4 (opt6)
gggagacccgugacccggaaguuguacggcuacgcgacuuucccucccacaaacccucgcgcccuuccuuuccuacuugggcccggcagaaagcuuaccauggaacuuuuaauacuaaaagcuaacgccauaaccacuauacuaacagcagucacauucugcuucgcaucaggccaaaacauaaccgaagaauuuuaccaauccacuuguucagcagucuccaaaggauauuuauccgcacuucguacaggaugguauacaucaguaauaacaauagaacucuccaacauaaaagaaaauaaaugcaacggcaccgacgcaaaaguaaaacucaucaaacaagaauuagacaaauacaagaacgccguaacagaacuacaauuacuaaugcaaucaacacccgccacaggaucaggaucugcaauaugcucuggaguagcaguaugcaaaguauuacaccuagaaggagaaguaaacaaaaucaaaagcgcacuacuauccacaaacaaagcuguaguaucacuaucaaacggaguaucaguauuaacuuucaaaguacuugaucuaaaaaacuacauagacaaacaacuacuacccauauuaaacaaacaaucaugcucaauaagcaauauagaaacaguaauagaauuucaacaaaaaaacaacagacuacuagaaaucacaagggaauuuucaguaaaugccgguguuacaaccccaguaucaacauacaugcuaacuaacucagaacuacuauccuuaauaaacgauaugccaauaacaaacgaucaaaaaaaacuaauguccaacaacguacaaauaguaagacaacaaucauacucaaucaugugcauuauaaaagaagaagucuuagcauacguaguacaauuaccacuauacgguguaauagauacaccauguuggaaauuacacacaagcccacuaugcacaacuaacacaaaagaaggcucaaauauauguuuaacaagaacagaccgagguugguacugcgacaaugcaggaucaguaucauucuuuccacaagcagaaacauguaaaguucaauccaacagaguauucugcgacacaaugaacuccagaacacuaccuucagaaguaaaccucuguaacguagacauauuuaaucccaaguacgacugcaaaauaaugacaucgaaaacagacguaagcuccucagugauaacaucccucggcgccaucguauccuguuacgguaaaacuaaauguaccgccucaaacaaaaaccgcgguauuauaaaaacuuuuucuaauggcugcgauuacguaagcaacaaaggcgucgacacaguuuccguaggaaacacacuauacugcguaaacaaacaagaagguaaaucucuauacguaaaaggagaaccaauaauaaauuucuaugauccuuuaguauucccauccgaugaauuugacgccucuaucucacaagucaacgaaaaaauaaaucaaucauuagcauucauacgaaaaucagacgaacuacuacacaacguaaacgcaggaaaaucaacaaccaacauaaugauaaccacaauaauaauaguuauuauagugauacuauuauccuuaauugcagucggacuauuauuauacuguaaagcacgcuaaggacuaguggaagcauuuuccuggcugauuaaaagaaauuacucagcuauggucaucuguuccuguuagaaggcuaugcagcauauuauauacuaugcgcauguuaugaaaugcauaauaaaaaauuuuaaaaaaucuaaaagaucuaaaaaaaaaaaaaaaaaaaaaaaaaaaaaaaaaaaaaaaaaaaaaaaaaaaaaaaaaaaaaaaaugcaucccccccccccccccccccccccccccccccaaaggcucuuuucagagccaccagaauu

SEQ ID NO: 5277 - RNA, 1919 nt, Artificial Sequence
  mRNA product Design h-3 comprising derived and/or modified sequence from HRSV(A2)__F-del_DSCav1_mut4 (opt11)
gggagacccgugacccggaaguuguacggcuacgcgacuuucccucccacaaacccucgcgcccuuccuuuccuacuugggcccggcagaaagcuuaccauggaacuccucauccucaaagccaaugccaucaccacaauccugacagcaguaaccuucugcuucgcauccggacaaaacaucaccgaagaauuuuaccagucaaccugcuccgcugucucaaaaggcuaccucucagcccuucgcaccggcugguacaccucggucauaacaauagaacucuccaauaucaaagaaaacaaaugcaacggcacugacgccaagguaaaacucaucaaacaggaacucgauaaauacaagaacgccguaacagaacuacaacuacucaugcaaucaacaccggccaccggcuccgguuccgccauaugcuccggaguggccgugugcaagguccuccaccuugaaggggaaguuaacaaaaucaaaucagcccuccucuccacuaacaaagccguaguaucccuaagcaacgguguauccguccucaccuucaaaguacuagaccuaaagaauuauaucgacaaacaacuccuccccauacucaacaaacaauccugcuccauaagcaacaucgaaacagucaucgaguuccagcagaaaaacaaccgacuccucgaaauaacccgcgaguucucagucaacgccggagucaccacacccgucagcaccuacaugcugaccaacuccgaacuccucuccuuaaucaaugacaugcccaucaccaaugaccaaaagaaacucaugucaaacaacguccaaauaguacgccaacaauccuacuccaucaugugcaucauaaaagaagaaguacucgccuacgucguccaacucccccucuacggcguaaucgacacccccugcuggaaacuacacacaagcccccucugcaccacaaacacuaaagagggcuccaacaucugucuaacccgcaccgaucgaggcugguacugcgacaacgccggaucugucucauucuucccccaagccgaaaccugcaaaguccaauccaaccgcgucuucugcgacaccaugaacucgagaacccucccuuccgaagucaaccuaugcaacgucgacauuuucaaccccaaauacgacugcaaaaucaugaccucgaaaaccgacguaucauccagcgucaucaccagccuaggcgcaaucgugagcugcuacggcaaaaccaaaugcaccgcgagcaauaaaaaccgcgggaucaucaaaacuuucuccaacggcugcgacuacgucuccaacaagggagucgauaccgucuccguaggcaacacccucuacugcgucaacaaacaagaaggcaaaucacuauacguaaaaggcgagccaaucauaaacuucuacgacccucuaguuuucccauccgacgaguucgacgcuagcaucucccaagucaacgagaaaaucaaccaaucccucgcauucauccgcaaauccgacgaacuccuccacaacguaaacgcaggcaaaucaacuacuaauauaaugaucacaaccaucauaauagucauaaucguaauccuccuaucccucaucgccgucggacuacugcucuacugcaaagcccgcuaaggacuaguggaagcauuuuccuggcugauuaaaagaaauuacucagcuauggucaucuguuccuguuagaaggcuaugcagcauauuauauacuaugcgcauguuaugaaaugcauaauaaaaaauuuuaaaaaaucuaaaagaucuaaaaaaaaaaaaaaaaaaaaaaaaaaaaaaaaaaaaaaaaaaaaaaaaaaaaaaaaaaaaaaaaugcaucccccccccccccccccccccccccccccccaaaggcucuuuucagagccaccagaauu

SEQ ID NO: 5278 - RNA, 1982 nt, Artificial Sequence
  mRNA product Design h-4 comprising derived and/or modified sequence from HRSV(A2)__F-del_DSCav1_mut4 (opt1)
gggagagggcgcuuggcuugcaaggacccugagcugcggcauugaagcacacccaacccaacucgacugaagucagccucacugaaccggaucugagaaucuucucucucugggcuugccagggcucuccgaaccuagcuagcauccucuucaauuccaacuagaaagcuuaccauggagcugcucauccugaaggccaacgccaucaccaccauccugacggcggugaccuucugcuucgccagcggccagaacaucaccgaggaguucuaccaguccacgugcagcgccgucuccaagggguaccucagcgcccugcggaccggcugguacaccuccgugaucaccaucgagcugagcaacaucaaggagaacaagugcaacgggaccgacgccaaggugaagcucaucaagcaggagcuggacaaguacaagaacgcggucacggagcugcagcuccugaugcaguccaccccggcaaccggcuccggcuccgccaucugcagcggcgucgccgugugcaaggugcugcaccucgagggggaggucaacaagaucaagagcgcccugcuguccaccaacaaggccguggugagccucuccaacggcgucagcgugcugaccuucaaggugcuggaccucaagaacuacaucgacaagcagcugcugcccauccugaacaagcagagcugcuccaucagcaacaucgagacggugaucgaguuccagcagaagaacaaccggcuccuggagaucacccgcgaguucagcgugaacgccggggucaccacccccguguccacguacaugcugaccaacagcgagcuccugucccugaucaacgacaugccgaucaccaacgaccagaagaagcucaugagcaacaacgugcagaucguccggcagcaguccuacagcaucaugugcaucaucaaggaggaggugcuggcguacgugguccagcugccccucuacggcgugaucgacacccccugcuggaagcugcacacgagcccccugugcaccaccaacaccaaggagggguccaacaucugccucacgcgcaccgaccggggcugguacugcgacaacgccggcagcgucuccuucuucccgcaggccgagaccugcaaggugcagagcaaccgcguguucugcgacaccaugaacucccggacgcugcccagcgagguaaaccucugcaacgucgacaucuucaaccccaaguacgacugcaagaucaugaccuccaagaccgacgugagcuccagcgugaucaccucccugggggccaucgucagcugcuacggcaagacgaagugcaccgccagcaacaagaaccgggggaucaucaagaccuucuccaacggcugcgacuacgugagcaacaagggcguggacaccguguccgucgggaacacccuguacugcgugaacaagcaggagggcaagagccucuacgugaagggggagcccaucaucaacuucuacgacccgcuggucuuccccuccgacgaguucgacgcgagcaucucccaggugaacgagaagaucaaccagagccuggccuucauccgcaaguccgacgagcugcuccacaacgugaacgccggcaagagcacgaccaacaucaugaucaccaccaucaucaucgucaucaucgugauccugcugucccucaucgccguggggcugcugcucuacugcaaggcccggugaggacuaguaauaaggaaacuguaugaaugucugugggcaggaagugaagagauccuucuguaaagguuuuuggaauuaugucugcugaauaauaaacuuuuuugaaauaauaaaucugguagaaaaaugagaucuaaaaaaaaaaaaaaaaaaaaaaaaaaaaaaaaaaaaaaaaaaaaaaaaaaaaaaaaaaaaaaaaugcaucccccccccccccccccccccccccccccccaaaggcucuuuucagagccaccagaauu

SEQ ID NO: 5279 - RNA, 1982 nt, Artificial Sequence
  mRNA product Design h-4 comprising derived and/or modified sequence from HRSV(A2)__F-del_DSCav1_mut4 (opt1)
gggagagggcgcuuggcuugcaaggacccugagcugcggcauugaagcacacccaacccaacucgacugaagucagccucacugaaccggaucugagaaucuucucucucugggcuugccagggcucuccgaaccuagcuagcauccucuucaauuccaacuagaaagcuuaccauggagcugcucauccugaaggccaacgccaucaccaccauccugacggcggugaccuucugcuucgccagcggccagaacaucaccgaggaguucuaccaguccacgugcagcgccgucuccaagggguaccucagcgcccugcgcaccggcugguacaccuccgugaucaccaucgagcugagcaacaucaaggagaacaagugcaacgggaccgacgccaaggugaagcucaucaagcaggagcuggacaaguacaagaacgcggucacggagcugcagcuccugaugcaguccacccccgccaccggcagcggguccgccaucugcagcggcguggccgugugcaagguccugcaccucgagggcgaggugaacaagaucaaguccgcgcugcugagcaccaacaaggccguggucucccucagcaacgggguguccgugcugacguucaagguccuggaccucaagaacuacaucgacaagcagcugcugccgauccucaacaagcagagcugcuccaucagcaacaucgagaccgugaucgaguuccagcagaagaacaaccggcugcuggagaucacccgcgaguucuccgugaacgccggcgucaccacgcccgugagcaccuacaugcucaccaacagcgagcugcugucccucaucaacgacaugcccaucaccaacgaccagaagaagcugaugagcaacaacgugcagaucguccggcagcaguccuacagcaucaugugcaucaucaaggaggaggugcuggccuacgugguccagcucccccuguacggggugaucgacacgccgugcuggaagcugcacaccagcccccucugcaccaccaacacgaaggagggcuccaacaucugccugacccgcaccgaccgggggugguacugcgacaacgccggcuccgugagcuucuucccccaggcggagaccugcaagguccaguccaaccgcguguucugcgacacgaugaacagccggacccuccccuccgaggucaaccugugcaacguggacaucuucaacccgaaguacgacugcaagaucaugaccagcaagaccgacguguccagcuccgucaucacgagccugggcgccaucguguccugcuacgggaagaccaagugcaccgccagcaacaagaaccggggcaucaucaagaccuucuccaacgggugcgacuacgugagcaacaagggcgucgacacggugagcgugggcaacacccucuacugcgucaacaagcaggaggggaagucccuguacgugaagggcgagcccaucaucaacuucuacgacccccugguguuccccagcgacgaguucgacgccuccaucagccaggucaacgagaagaucaaccagucccucgccuucauccgcaagagcgacgagcugcugcacaacgugaacgcggggaaguccaccaccaacaucaugaucaccacgaucaucaucgugaucaucgucauccuccugagccugaucgccgugggccuccugcuguacugcaaggcccggugaggacuaguaauaaggaaacuguaugaaugucugugggcaggaagugaagagauccuucuguaaagguuuuuggaauuaugucugcugaauaauaaacuuuuuugaaauaauaaaucugguagaaaaaugagaucuaaaaaaaaaaaaaaaaaaaaaaaaaaaaaaaaaaaaaaaaaaaaaaaaaaaaaaaaaaaaaaaaugcaucccccccccccccccccccccccccccccccaaaggcucuuuucagagccaccagaauu

SEQ ID NO: 5280 - RNA, 1982 nt, Artificial Sequence
  mRNA product Design h-4 comprising derived and/or modified sequence from HRSV(A2)__F-del_DSCav1_mut4 (opt2)
gggagagggcgcuuggcuugcaaggacccugagcugcggcauugaagcacacccaacccaacucgacugaagucagccucacugaaccggaucugagaaucuucucucucugggcuugccagggcucuccgaaccuagcuagcauccucuucaauuccaacuagaaagcuuaccauggagcuccucauccucaaggccaacgccaucaccaccauccucaccgccgucaccuucugcuucgccuccggccagaacaucaccgaggaguucuaccaguccaccugcuccgccgucuccaagggcuaccucuccgcccuccgcaccggcugguacaccuccgucaucaccaucgagcucuccaacaucaaggagaacaagugcaacggcaccgacgccaaggucaagcucaucaagcaggagcucgacaaguacaagaacgccgucaccgagcuccagcuccucaugcaguccacccccgccaccggcuccggcuccgccaucugcuccggcgucgccgucugcaagguccuccaccucgagggcgaggucaacaagaucaaguccgcccuccucuccaccaacaaggccgucgucucccucuccaacggcgucuccguccucaccuucaagguccucgaccucaagaacuacaucgacaagcagcuccuccccauccucaacaagcaguccugcuccaucuccaacaucgagaccgucaucgaguuccagcagaagaacaaccgccuccucgagaucacccgcgaguucuccgucaacgccggcgucaccacccccgucuccaccuacaugcucaccaacuccgagcuccucucccucaucaacgacaugcccaucaccaacgaccagaagaagcucauguccaacaacguccagaucguccgccagcaguccuacuccaucaugugcaucaucaaggaggagguccucgccuacgucguccagcucccccucuacggcgucaucgacacccccugcuggaagcuccacaccuccccccucugcaccaccaacaccaaggagggcuccaacaucugccucacccgcaccgaccgcggcugguacugcgacaacgccggcuccgucuccuucuucccccaggccgagaccugcaagguccaguccaaccgcgucuucugcgacaccaugaacucccgcacccuccccuccgaggucaaccucugcaacgucgacaucuucaaccccaaguacgacugcaagaucaugaccuccaagaccgacgucuccuccuccgucaucaccucccucggcgccaucgucuccugcuacggcaagaccaagugcaccgccuccaacaagaaccgcggcaucaucaagaccuucuccaacggcugcgacuacgucuccaacaagggcgucgacaccgucuccgucggcaacacccucuacugcgucaacaagcaggagggcaagucccucuacgucaagggcgagcccaucaucaacuucuacgacccccucgucuuccccuccgacgaguucgacgccuccaucucccaggucaacgagaagaucaaccagucccucgccuucauccgcaaguccgacgagcuccuccacaacgucaacgccggcaaguccaccaccaacaucaugaucaccaccaucaucaucgucaucaucgucauccuccucucccucaucgccgucggccuccuccucuacugcaaggcccgcugaggacuaguaauaaggaaacuguaugaaugucugugggcaggaagugaagagauccuucuguaaagguuuuuggaauuaugucugcugaauaauaaacuuuuuugaaauaauaaaucugguagaaaaaugagaucuaaaaaaaaaaaaaaaaaaaaaaaaaaaaaaaaaaaaaaaaaaaaaaaaaaaaaaaaaaaaaaaaugcaucccccccccccccccccccccccccccccccaaaggcucuuuucagagccaccagaauu

SEQ ID NO: 5281 - RNA, 1982 nt, Artificial Sequence
  mRNA product Design h-4 comprising derived and/or modified sequence from HRSV(A2)__F-del_DSCav1_mut4 (opt3)
gggagagggcgcuuggcuugcaaggacccugagcugcggcauugaagcacacccaacccaacucgacugaagucagccucacugaaccggaucugagaaucuucucucucugggcuugccagggcucuccgaaccuagcuagcauccucuucaauuccaacuagaaagcuuaccauggagcugcucauccuuaaggccaacgcuauuaccacaauacugacugcagugacguucugcuuugccagcggccagaauaucaccgaagaguucuaccaauccacauguucugcggucucaaaaggguauuugagugcuuuaagaacuggaugguacaccagcguuauuacaaucgaacuguccaacauuaaggagaauaaaugcaacgguaccgacgccaaggugaaacuaaucaagcaggaacucgauaaguauaaaaaugcaguaacugagcugcagcuucugaugcagucuacacccgccaccggcucggggucagcuauauguagcggaguggcagucugcaagguguugcaccucgagggcgaaguuaacaaaaucaagagugcccugcuguccacgaauaaagcuguggucucucucagcaacgguguguccguauuaacuuuuaagguucuggaccuuaagaauuacauugauaaacaauugcugccuauccuaaacaagcagucauguaguauuagcaauaucgagaccgugauagaguuccagcagaaaaacaauaggcuccuggaaauuacacgggaguuuucugucaacgccggggugacuaccccaguguccacauauaugcuuaccaauucagaacuguugagccucaucaacgacaugccgauuacgaacgaucaaaagaaacugaugaguaauaacguccagaucguucgccagcagucuuacuccaucaugugcauuauaaaggaggaaguguuagcguauguagugcaacugccccucuacggagucaucgacacuccuuguuggaaacuucauacaagcccacugugcaccacuaauacaaaggagggcucgaacauuuguuugacccgaacggaucguggcugguacugcgacaaugcagggucuguguccuucuuuccccaggccgaaaccuguaagguucagucaaacagaguguucugcgauacaaugaauaguagaacucugccuagcgaggucaaccucugcaauguggacaucuuuaacccaaaauaugauuguaagauaaugaccuccaaaacagacguaucuagcucaguuauuaccagucugggagcuaucguguccugcuacgguaagacuaaauguacagccagcaauaagaacaggggcaucauuaagaccuucucuaaugggugcgauuaugucucaaacaaaggaguggacacugucagugugggcaauacgcuuuacuguguuaacaagcaagaggguaaaagccuguaugugaagggggaacccaucauuaacuuuuacgacccuuugguauucccauccgaugaguuugacgcaucuauaucgcaggucaaugagaaaaucaaccagagccucgcuuucauucggaaguccgaugaacuguuacacaaugugaacgccggaaagucaacaaccaauaucaugaucacuaccauuauaaucguuauuaucgugauucugcuaagucucaucgcggucggccugcuuuuguauugcaaagcccgcugaggacuaguaauaaggaaacuguaugaaugucugugggcaggaagugaagagauccuucuguaaagguuuuuggaauuaugucugcugaauaauaaacuuuuuugaaauaauaaaucugguagaaaaaugagaucuaaaaaaaaaaaaaaaaaaaaaaaaaaaaaaaaaaaaaaaaaaaaaaaaaaaaaaaaaaaaaaaaugcaucccccccccccccccccccccccccccccccaaaggcucuuuucagagccaccagaauu

SEQ ID NO: 5282 - RNA, 1982 nt, Artificial Sequence
  mRNA product Design h-4 comprising derived and/or modified sequence from HRSV(A2)__F-del_DSCav1_mut4 (opt4)
gggagagggcgcuuggcuugcaaggacccugagcugcggcauugaagcacacccaacccaacucgacugaagucagccucacugaaccggaucugagaaucuucucucucugggcuugccagggcucuccgaaccuagcuagcauccucuucaauuccaacuagaaagcuuaccauggagcugcugauccugaaggccaacgccaucaccaccauccugaccgccgugaccuucugcuucgccagcggccagaacaucaccgaggaguucuaccagagcaccugcagcgccgugagcaagggcuaccugagcgcccugagaaccggcugguacaccagcgugaucaccaucgagcugagcaacaucaaggagaacaagugcaacggcaccgacgccaaggugaagcugaucaagcaggagcuggacaaguacaagaacgccgugaccgagcugcagcugcugaugcagagcacccccgccaccggcagcggcagcgccaucugcagcggcguggccgugugcaaggugcugcaccuggagggcgaggugaacaagaucaagagcgcccugcugagcaccaacaaggccguggugagccugagcaacggcgugagcgugcugaccuucaaggugcuggaccugaagaacuacaucgacaagcagcugcugcccauccugaacaagcagagcugcagcaucagcaacaucgagaccgugaucgaguuccagcagaagaacaacagacugcuggagaucaccagagaguucagcgugaacgccggcgugaccacccccgugagcaccuacaugcugaccaacagcgagcugcugagccugaucaacgacaugcccaucaccaacgaccagaagaagcugaugagcaacaacgugcagaucgugagacagcagagcuacagcaucaugugcaucaucaaggaggaggugcuggccuacguggugcagcugccccuguacggcgugaucgacacccccugcuggaagcugcacaccagcccccugugcaccaccaacaccaaggagggcagcaacaucugccugaccagaaccgacagaggcugguacugcgacaacgccggcagcgugagcuucuucccccaggccgagaccugcaaggugcagagcaacagaguguucugcgacaccaugaacagcagaacccugcccagcgaggugaaccugugcaacguggacaucuucaaccccaaguacgacugcaagaucaugaccagcaagaccgacgugagcagcagcgugaucaccagccugggcgccaucgugagcugcuacggcaagaccaagugcaccgccagcaacaagaacagaggcaucaucaagaccuucagcaacggcugcgacuacgugagcaacaagggcguggacaccgugagcgugggcaacacccuguacugcgugaacaagcaggagggcaagagccuguacgugaagggcgagcccaucaucaacuucuacgacccccugguguuccccagcgacgaguucgacgccagcaucagccaggugaacgagaagaucaaccagagccuggccuucaucagaaagagcgacgagcugcugcacaacgugaacgccggcaagagcaccaccaacaucaugaucaccaccaucaucaucgugaucaucgugauccugcugagccugaucgccgugggccugcugcuguacugcaaggccagaugaggacuaguaauaaggaaacuguaugaaugucugugggcaggaagugaagagauccuucuguaaagguuuuuggaauuaugucugcugaauaauaaacuuuuuugaaauaauaaaucugguagaaaaaugagaucuaaaaaaaaaaaaaaaaaaaaaaaaaaaaaaaaaaaaaaaaaaaaaaaaaaaaaaaaaaaaaaaaugcaucccccccccccccccccccccccccccccccaaaggcucuuuucagagccaccagaauu

SEQ ID NO: 5283 - RNA, 1982 nt, Artificial Sequence
  mRNA product Design h-4 comprising derived and/or modified sequence from HRSV(A2)__F-del_DSCav1_mut4 (opt5)
gggagagggcgcuuggcuugcaaggacccugagcugcggcauugaagcacacccaacccaacucgacugaagucagccucacugaaccggaucugagaaucuucucucucugggcuugccagggcucuccgaaccuagcuagcauccucuucaauuccaacuagaaagcuuaccauggagcugcucauccugaaggccaacgcuauuaccacaauccuuacggccgugaccuucugcuuugcgagcggccagaauauuacagaagaguucuaccaauccaccuguucugcugucagcaaaggguaucuguccgcccucagaacaggaugguacaccucuguuaucacaauugaacugagcaacaucaaggagaauaaaugcaacggcaccgacgccaaggugaaacuuaucaagcaggaacuggauaaguauaaaaaugcugugacggagcuccagcugcugaugcaguccacccccgccacagggucuggaagcgcuauuuguuccggcgucgccgugugcaagguucuccaccuggagggggaagugaacaaaaucaagagcgcgcuucugucuaccaauaaagccgucgugucccucagcaacggaguuucugugcugacauuuaagguccuugaccugaagaauuacauugauaaacaacuccugccuauccugaacaagcaguccuguagcauuucuaauaucgagaccgugauugaguuccagcagaaaaacaaucggcuccuggaaaucacgcgcgaguuuuccgugaacgcuggcgucacaaccccgguuagcacauauaugcuuaccaauuccgaacugcucucucugaucaacgacaugcccauuaccaacgaucaaaagaaacuuaugagcaauaacgugcagaucgugagacagcaguccuacagcauuaugugcaucauuaaggaggaaguccuggccuaugugguucaacucccucuguacggcgugaucgacacacccuguuggaaacugcauacgucuccucucugcaccacaaauaccaaggagggguccaacaucugucugacacggaccgaucgcggaugguacugcgacaaugcuggcagcgucucuuucuuuccccaggccgaaacguguaaggugcagagcaacagaguuuucugcgauacaaugaacuccagaacccugccuucugaggugaaucucugcaaugucgacauuuuuaacccgaaauaugauuguaagaucaugaccagcaaaacagacguguccagcucugucauuaccucccugggggcgaucgugagcugcuacggaaagacaaaauguacggccucuaauaagaaccggggcauuaucaagaccuucuccaaugggugcgauuauguuagcaacaaaggaguggacacagucuccgugggcaauacccuuuacuguguuaacaagcaagagggcaaaucucuguaugugaagggggaacccaucauuaacuuuuacgacccucucgucuuccccagcgaugaguuugacgcuuccaucucucaggugaaugagaaaauuaaccagagccuggccuucauccgcaaguccgaugaacugcuccacaaugugaacgcuggaaagagcacaaccaauauuaugaucacgaccauuaucaucguuauuaucgucauucugcuuucucugaucgccgugggccuccugcuguauugcaaagccagaugaggacuaguaauaaggaaacuguaugaaugucugugggcaggaagugaagagauccuucuguaaagguuuuuggaauuaugucugcugaauaauaaacuuuuuugaaauaauaaaucugguagaaaaaugagaucuaaaaaaaaaaaaaaaaaaaaaaaaaaaaaaaaaaaaaaaaaaaaaaaaaaaaaaaaaaaaaaaaugcaucccccccccccccccccccccccccccccccaaaggcucuuuucagagccaccagaauu

SEQ ID NO: 5284 - RNA, 1982 nt, Artificial Sequence
  mRNA product Design h-4 comprising derived and/or modified sequence from HRSV(A2)__F-del_DSCav1_mut4 (opt6)
gggagagggcgcuuggcuugcaaggacccugagcugcggcauugaagcacacccaacccaacucgacugaagucagccucacugaaccggaucugagaaucuucucucucugggcuugccagggcucuccgaaccuagcuagcauccucuucaauuccaacuagaaagcuuaccauggaacuuuuaauacuaaaagcuaacgccauaaccacuauacuaacagcagucacauucugcuucgcaucaggccaaaacauaaccgaagaauuuuaccaauccacuuguucagcagucuccaaaggauauuuauccgcacuucguacaggaugguauacaucaguaauaacaauagaacucuccaacauaaaagaaaauaaaugcaacggcaccgacgcaaaaguaaaacucaucaaacaagaauuagacaaauacaagaacgccguaacagaacuacaauuacuaaugcaaucaacacccgccacaggaucaggaucugcaauaugcucuggaguagcaguaugcaaaguauuacaccuagaaggagaaguaaacaaaaucaaaagcgcacuacuauccacaaacaaagcuguaguaucacuaucaaacggaguaucaguauuaacuuucaaaguacuugaucuaaaaaacuacauagacaaacaacuacuacccauauuaaacaaacaaucaugcucaauaagcaauauagaaacaguaauagaauuucaacaaaaaaacaacagacuacuagaaaucacaagggaauuuucaguaaaugccgguguuacaaccccaguaucaacauacaugcuaacuaacucagaacuacuauccuuaauaaacgauaugccaauaacaaacgaucaaaaaaaacuaauguccaacaacguacaaauaguaagacaacaaucauacucaaucaugugcauuauaaaagaagaagucuuagcauacguaguacaauuaccacuauacgguguaauagauacaccauguuggaaauuacacacaagcccacuaugcacaacuaacacaaaagaaggcucaaauauauguuuaacaagaacagaccgagguugguacugcgacaaugcaggaucaguaucauucuuuccacaagcagaaacauguaaaguucaauccaacagaguauucugcgacacaaugaacuccagaacacuaccuucagaaguaaaccucuguaacguagacauauuuaaucccaaguacgacugcaaaauaaugacaucgaaaacagacguaagcuccucagugauaacaucccucggcgccaucguauccuguuacgguaaaacuaaauguaccgccucaaacaaaaaccgcgguauuauaaaaacuuuuucuaauggcugcgauuacguaagcaacaaaggcgucgacacaguuuccguaggaaacacacuauacugcguaaacaaacaagaagguaaaucucuauacguaaaaggagaaccaauaauaaauuucuaugauccuuuaguauucccauccgaugaauuugacgccucuaucucacaagucaacgaaaaaauaaaucaaucauuagcauucauacgaaaaucagacgaacuacuacacaacguaaacgcaggaaaaucaacaaccaacauaaugauaaccacaauaauaauaguuauuauagugauacuauuauccuuaauugcagucggacuauuauuauacuguaaagcacgcuaaggacuaguaauaaggaaacuguaugaaugucugugggcaggaagugaagagauccuucuguaaagguuuuuggaauuaugucugcugaauaauaaacuuuuuugaaauaauaaaucugguagaaaaaugagaucuaaaaaaaaaaaaaaaaaaaaaaaaaaaaaaaaaaaaaaaaaaaaaaaaaaaaaaaaaaaaaaaaugcaucccccccccccccccccccccccccccccccaaaggcucuuuucagagccaccagaauu

SEQ ID NO: 5285 - RNA, 1982 nt, Artificial Sequence
  mRNA product Design h-4 comprising derived and/or modified sequence from HRSV(A2)__F-del_DSCav1_mut4 (opt11)
gggagagggcgcuuggcuugcaaggacccugagcugcggcauugaagcacacccaacccaacucgacugaagucagccucacugaaccggaucugagaaucuucucucucugggcuugccagggcucuccgaaccuagcuagcauccucuucaauuccaacuagaaagcuuaccauggaacuccucauccucaaagccaaugccaucaccacaauccugacagcaguaaccuucugcuucgcauccggacaaaacaucaccgaagaauuuuaccagucaaccugcuccgcugucucaaaaggcuaccucucagcccuucgcaccggcugguacaccucggucauaacaauagaacucuccaauaucaaagaaaacaaaugcaacggcacugacgccaagguaaaacucaucaaacaggaacucgauaaauacaagaacgccguaacagaacuacaacuacucaugcaaucaacaccggccaccggcuccgguuccgccauaugcuccggaguggccgugugcaagguccuccaccuugaaggggaaguuaacaaaaucaaaucagcccuccucuccacuaacaaagccguaguaucccuaagcaacgguguauccguccucaccuucaaaguacuagaccuaaagaauuauaucgacaaacaacuccuccccauacucaacaaacaauccugcuccauaagcaacaucgaaacagucaucgaguuccagcagaaaaacaaccgacuccucgaaauaacccgcgaguucucagucaacgccggagucaccacacccgucagcaccuacaugcugaccaacuccgaacuccucuccuuaaucaaugacaugcccaucaccaaugaccaaaagaaacucaugucaaacaacguccaaauaguacgccaacaauccuacuccaucaugugcaucauaaaagaagaaguacucgccuacgucguccaacucccccucuacggcguaaucgacacccccugcuggaaacuacacacaagcccccucugcaccacaaacacuaaagagggcuccaacaucugucuaacccgcaccgaucgaggcugguacugcgacaacgccggaucugucucauucuucccccaagccgaaaccugcaaaguccaauccaaccgcgucuucugcgacaccaugaacucgagaacccucccuuccgaagucaaccuaugcaacgucgacauuuucaaccccaaauacgacugcaaaaucaugaccucgaaaaccgacguaucauccagcgucaucaccagccuaggcgcaaucgugagcugcuacggcaaaaccaaaugcaccgcgagcaauaaaaaccgcgggaucaucaaaacuuucuccaacggcugcgacuacgucuccaacaagggagucgauaccgucuccguaggcaacacccucuacugcgucaacaaacaagaaggcaaaucacuauacguaaaaggcgagccaaucauaaacuucuacgacccucuaguuuucccauccgacgaguucgacgcuagcaucucccaagucaacgagaaaaucaaccaaucccucgcauucauccgcaaauccgacgaacuccuccacaacguaaacgcaggcaaaucaacuacuaauauaaugaucacaaccaucauaauagucauaaucguaauccuccuaucccucaucgccgucggacuacugcucuacugcaaagcccgcuaaggacuaguaauaaggaaacuguaugaaugucugugggcaggaagugaagagauccuucuguaaagguuuuuggaauuaugucugcugaauaauaaacuuuuuugaaauaauaaaucugguagaaaaaugagaucuaaaaaaaaaaaaaaaaaaaaaaaaaaaaaaaaaaaaaaaaaaaaaaaaaaaaaaaaaaaaaaaaugcaucccccccccccccccccccccccccccccccaaaggcucuuuucagagccaccagaauu

SEQ ID NO: 5286 - RNA, 1998 nt, Artificial Sequence
  mRNA product Design h-5 comprising derived and/or modified sequence from HRSV(A2)__F-del_DSCav1_mut4 (opt1)
gggagagggcgcuuggcuugcaaggacccugagcugcggcauugaagcacacccaacccaacucgacugaagucagccucacugaaccggaucugagaaucuucucucucugggcuugccagggcucuccgaaccuagcuagcauccucuucaauuccaacuagaaagcuuaccauggagcugcucauccugaaggccaacgccaucaccaccauccugacggcggugaccuucugcuucgccagcggccagaacaucaccgaggaguucuaccaguccacgugcagcgccgucuccaagggguaccucagcgcccugcggaccggcugguacaccuccgugaucaccaucgagcugagcaacaucaaggagaacaagugcaacgggaccgacgccaaggugaagcucaucaagcaggagcuggacaaguacaagaacgcggucacggagcugcagcuccugaugcaguccaccccggcaaccggcuccggcuccgccaucugcagcggcgucgccgugugcaaggugcugcaccucgagggggaggucaacaagaucaagagcgcccugcuguccaccaacaaggccguggugagccucuccaacggcgucagcgugcugaccuucaaggugcuggaccucaagaacuacaucgacaagcagcugcugcccauccugaacaagcagagcugcuccaucagcaacaucgagacggugaucgaguuccagcagaagaacaaccggcuccuggagaucacccgcgaguucagcgugaacgccggggucaccacccccguguccacguacaugcugaccaacagcgagcuccugucccugaucaacgacaugccgaucaccaacgaccagaagaagcucaugagcaacaacgugcagaucguccggcagcaguccuacagcaucaugugcaucaucaaggaggaggugcuggcguacgugguccagcugccccucuacggcgugaucgacacccccugcuggaagcugcacacgagcccccugugcaccaccaacaccaaggagggguccaacaucugccucacgcgcaccgaccggggcugguacugcgacaacgccggcagcgucuccuucuucccgcaggccgagaccugcaaggugcagagcaaccgcguguucugcgacaccaugaacucccggacgcugcccagcgagguaaaccucugcaacgucgacaucuucaaccccaaguacgacugcaagaucaugaccuccaagaccgacgugagcuccagcgugaucaccucccugggggccaucgucagcugcuacggcaagacgaagugcaccgccagcaacaagaaccgggggaucaucaagaccuucuccaacggcugcgacuacgugagcaacaagggcguggacaccguguccgucgggaacacccuguacugcgugaacaagcaggagggcaagagccucuacgugaagggggagcccaucaucaacuucuacgacccgcuggucuuccccuccgacgaguucgacgcgagcaucucccaggugaacgagaagaucaaccagagccuggccuucauccgcaaguccgacgagcugcuccacaacgugaacgccggcaagagcacgaccaacaucaugaucaccaccaucaucaucgucaucaucgugauccugcugucccucaucgccguggggcugcugcucuacugcaaggcccggugaggacuaguacuggcugcaucucccuuuccucuguccuccauccuucucccaggauggugaagggggaccugguacccagugauccccaccccaggauccuaaaucaugacuuaccugcuaauaaaaacucauuggaaaagugagaagaucuaaaaaaaaaaaaaaaaaaaaaaaaaaaaaaaaaaaaaaaaaaaaaaaaaaaaaaaaaaaaaaaaugcaucccccccccccccccccccccccccccccccaaaggcucuuuucagagccaccagaauu

SEQ ID NO: 5287 - RNA, 1998 nt, Artificial Sequence
  mRNA product Design h-5 comprising derived and/or modified sequence from HRSV(A2)__F-del_DSCav1_mut4 (opt1)
gggagagggcgcuuggcuugcaaggacccugagcugcggcauugaagcacacccaacccaacucgacugaagucagccucacugaaccggaucugagaaucuucucucucugggcuugccagggcucuccgaaccuagcuagcauccucuucaauuccaacuagaaagcuuaccauggagcugcucauccugaaggccaacgccaucaccaccauccugacggcggugaccuucugcuucgccagcggccagaacaucaccgaggaguucuaccaguccacgugcagcgccgucuccaagggguaccucagcgcccugcgcaccggcugguacaccuccgugaucaccaucgagcugagcaacaucaaggagaacaagugcaacgggaccgacgccaaggugaagcucaucaagcaggagcuggacaaguacaagaacgcggucacggagcugcagcuccugaugcaguccacccccgccaccggcagcggguccgccaucugcagcggcguggccgugugcaagguccugcaccucgagggcgaggugaacaagaucaaguccgcgcugcugagcaccaacaaggccguggucucccucagcaacgggguguccgugcugacguucaagguccuggaccucaagaacuacaucgacaagcagcugcugccgauccucaacaagcagagcugcuccaucagcaacaucgagaccgugaucgaguuccagcagaagaacaaccggcugcuggagaucacccgcgaguucuccgugaacgccggcgucaccacgcccgugagcaccuacaugcucaccaacagcgagcugcugucccucaucaacgacaugcccaucaccaacgaccagaagaagcugaugagcaacaacgugcagaucguccggcagcaguccuacagcaucaugugcaucaucaaggaggaggugcuggccuacgugguccagcucccccuguacggggugaucgacacgccgugcuggaagcugcacaccagcccccucugcaccaccaacacgaaggagggcuccaacaucugccugacccgcaccgaccgggggugguacugcgacaacgccggcuccgugagcuucuucccccaggcggagaccugcaagguccaguccaaccgcguguucugcgacacgaugaacagccggacccuccccuccgaggucaaccugugcaacguggacaucuucaacccgaaguacgacugcaagaucaugaccagcaagaccgacguguccagcuccgucaucacgagccugggcgccaucguguccugcuacgggaagaccaagugcaccgccagcaacaagaaccggggcaucaucaagaccuucuccaacgggugcgacuacgugagcaacaagggcgucgacacggugagcgugggcaacacccucuacugcgucaacaagcaggaggggaagucccuguacgugaagggcgagcccaucaucaacuucuacgacccccugguguuccccagcgacgaguucgacgccuccaucagccaggucaacgagaagaucaaccagucccucgccuucauccgcaagagcgacgagcugcugcacaacgugaacgcggggaaguccaccaccaacaucaugaucaccacgaucaucaucgugaucaucgucauccuccugagccugaucgccgugggccuccugcuguacugcaaggcccggugaggacuaguacuggcugcaucucccuuuccucuguccuccauccuucucccaggauggugaagggggaccugguacccagugauccccaccccaggauccuaaaucaugacuuaccugcuaauaaaaacucauuggaaaagugagaagaucuaaaaaaaaaaaaaaaaaaaaaaaaaaaaaaaaaaaaaaaaaaaaaaaaaaaaaaaaaaaaaaaaugcaucccccccccccccccccccccccccccccccaaaggcucuuuucagagccaccagaauu

SEQ ID NO: 5288 - RNA, 1998 nt, Artificial Sequence
  mRNA product Design h-5 comprising derived and/or modified sequence from HRSV(A2)__F-del_DSCav1_mut4 (opt2)
gggagagggcgcuuggcuugcaaggacccugagcugcggcauugaagcacacccaacccaacucgacugaagucagccucacugaaccggaucugagaaucuucucucucugggcuugccagggcucuccgaaccuagcuagcauccucuucaauuccaacuagaaagcuuaccauggagcuccucauccucaaggccaacgccaucaccaccauccucaccgccgucaccuucugcuucgccuccggccagaacaucaccgaggaguucuaccaguccaccugcuccgccgucuccaagggcuaccucuccgcccuccgcaccggcugguacaccuccgucaucaccaucgagcucuccaacaucaaggagaacaagugcaacggcaccgacgccaaggucaagcucaucaagcaggagcucgacaaguacaagaacgccgucaccgagcuccagcuccucaugcaguccacccccgccaccggcuccggcuccgccaucugcuccggcgucgccgucugcaagguccuccaccucgagggcgaggucaacaagaucaaguccgcccuccucuccaccaacaaggccgucgucucccucuccaacggcgucuccguccucaccuucaagguccucgaccucaagaacuacaucgacaagcagcuccuccccauccucaacaagcaguccugcuccaucuccaacaucgagaccgucaucgaguuccagcagaagaacaaccgccuccucgagaucacccgcgaguucuccgucaacgccggcgucaccacccccgucuccaccuacaugcucaccaacuccgagcuccucucccucaucaacgacaugcccaucaccaacgaccagaagaagcucauguccaacaacguccagaucguccgccagcaguccuacuccaucaugugcaucaucaaggaggagguccucgccuacgucguccagcucccccucuacggcgucaucgacacccccugcuggaagcuccacaccuccccccucugcaccaccaacaccaaggagggcuccaacaucugccucacccgcaccgaccgcggcugguacugcgacaacgccggcuccgucuccuucuucccccaggccgagaccugcaagguccaguccaaccgcgucuucugcgacaccaugaacucccgcacccuccccuccgaggucaaccucugcaacgucgacaucuucaaccccaaguacgacugcaagaucaugaccuccaagaccgacgucuccuccuccgucaucaccucccucggcgccaucgucuccugcuacggcaagaccaagugcaccgccuccaacaagaaccgcggcaucaucaagaccuucuccaacggcugcgacuacgucuccaacaagggcgucgacaccgucuccgucggcaacacccucuacugcgucaacaagcaggagggcaagucccucuacgucaagggcgagcccaucaucaacuucuacgacccccucgucuuccccuccgacgaguucgacgccuccaucucccaggucaacgagaagaucaaccagucccucgccuucauccgcaaguccgacgagcuccuccacaacgucaacgccggcaaguccaccaccaacaucaugaucaccaccaucaucaucgucaucaucgucauccuccucucccucaucgccgucggccuccuccucuacugcaaggcccgcugaggacuaguacuggcugcaucucccuuuccucuguccuccauccuucucccaggauggugaagggggaccugguacccagugauccccaccccaggauccuaaaucaugacuuaccugcuaauaaaaacucauuggaaaagugagaagaucuaaaaaaaaaaaaaaaaaaaaaaaaaaaaaaaaaaaaaaaaaaaaaaaaaaaaaaaaaaaaaaaaugcaucccccccccccccccccccccccccccccccaaaggcucuuuucagagccaccagaauu

SEQ ID NO: 5289 - RNA, 1998 nt, Artificial Sequence
  mRNA product Design h-5 comprising derived and/or modified sequence from HRSV(A2)__F-del_DSCav1_mut4 (opt3)
gggagagggcgcuuggcuugcaaggacccugagcugcggcauugaagcacacccaacccaacucgacugaagucagccucacugaaccggaucugagaaucuucucucucugggcuugccagggcucuccgaaccuagcuagcauccucuucaauuccaacuagaaagcuuaccauggagcugcucauccuuaaggccaacgcuauuaccacaauacugacugcagugacguucugcuuugccagcggccagaauaucaccgaagaguucuaccaauccacauguucugcggucucaaaaggguauuugagugcuuuaagaacuggaugguacaccagcguuauuacaaucgaacuguccaacauuaaggagaauaaaugcaacgguaccgacgccaaggugaaacuaaucaagcaggaacucgauaaguauaaaaaugcaguaacugagcugcagcuucugaugcagucuacacccgccaccggcucggggucagcuauauguagcggaguggcagucugcaagguguugcaccucgagggcgaaguuaacaaaaucaagagugcccugcuguccacgaauaaagcuguggucucucucagcaacgguguguccguauuaacuuuuaagguucuggaccuuaagaauuacauugauaaacaauugcugccuauccuaaacaagcagucauguaguauuagcaauaucgagaccgugauagaguuccagcagaaaaacaauaggcuccuggaaauuacacgggaguuuucugucaacgccggggugacuaccccaguguccacauauaugcuuaccaauucagaacuguugagccucaucaacgacaugccgauuacgaacgaucaaaagaaacugaugaguaauaacguccagaucguucgccagcagucuuacuccaucaugugcauuauaaaggaggaaguguuagcguauguagugcaacugccccucuacggagucaucgacacuccuuguuggaaacuucauacaagcccacugugcaccacuaauacaaaggagggcucgaacauuuguuugacccgaacggaucguggcugguacugcgacaaugcagggucuguguccuucuuuccccaggccgaaaccuguaagguucagucaaacagaguguucugcgauacaaugaauaguagaacucugccuagcgaggucaaccucugcaauguggacaucuuuaacccaaaauaugauuguaagauaaugaccuccaaaacagacguaucuagcucaguuauuaccagucugggagcuaucguguccugcuacgguaagacuaaauguacagccagcaauaagaacaggggcaucauuaagaccuucucuaaugggugcgauuaugucucaaacaaaggaguggacacugucagugugggcaauacgcuuuacuguguuaacaagcaagaggguaaaagccuguaugugaagggggaacccaucauuaacuuuuacgacccuuugguauucccauccgaugaguuugacgcaucuauaucgcaggucaaugagaaaaucaaccagagccucgcuuucauucggaaguccgaugaacuguuacacaaugugaacgccggaaagucaacaaccaauaucaugaucacuaccauuauaaucguuauuaucgugauucugcuaagucucaucgcggucggccugcuuuuguauugcaaagcccgcugaggacuaguacuggcugcaucucccuuuccucuguccuccauccuucucccaggauggugaagggggaccugguacccagugauccccaccccaggauccuaaaucaugacuuaccugcuaauaaaaacucauuggaaaagugagaagaucuaaaaaaaaaaaaaaaaaaaaaaaaaaaaaaaaaaaaaaaaaaaaaaaaaaaaaaaaaaaaaaaaugcaucccccccccccccccccccccccccccccccaaaggcucuuuucagagccaccagaauu

SEQ ID NO: 5290 - RNA, 1998 nt, Artificial Sequence
  mRNA product Design h-5 comprising derived and/or modified sequence from HRSV(A2)__F-del_DSCav1_mut4 (opt4)
gggagagggcgcuuggcuugcaaggacccugagcugcggcauugaagcacacccaacccaacucgacugaagucagccucacugaaccggaucugagaaucuucucucucugggcuugccagggcucuccgaaccuagcuagcauccucuucaauuccaacuagaaagcuuaccauggagcugcugauccugaaggccaacgccaucaccaccauccugaccgccgugaccuucugcuucgccagcggccagaacaucaccgaggaguucuaccagagcaccugcagcgccgugagcaagggcuaccugagcgcccugagaaccggcugguacaccagcgugaucaccaucgagcugagcaacaucaaggagaacaagugcaacggcaccgacgccaaggugaagcugaucaagcaggagcuggacaaguacaagaacgccgugaccgagcugcagcugcugaugcagagcacccccgccaccggcagcggcagcgccaucugcagcggcguggccgugugcaaggugcugcaccuggagggcgaggugaacaagaucaagagcgcccugcugagcaccaacaaggccguggugagccugagcaacggcgugagcgugcugaccuucaaggugcuggaccugaagaacuacaucgacaagcagcugcugcccauccugaacaagcagagcugcagcaucagcaacaucgagaccgugaucgaguuccagcagaagaacaacagacugcuggagaucaccagagaguucagcgugaacgccggcgugaccacccccgugagcaccuacaugcugaccaacagcgagcugcugagccugaucaacgacaugcccaucaccaacgaccagaagaagcugaugagcaacaacgugcagaucgugagacagcagagcuacagcaucaugugcaucaucaaggaggaggugcuggccuacguggugcagcugccccuguacggcgugaucgacacccccugcuggaagcugcacaccagcccccugugcaccaccaacaccaaggagggcagcaacaucugccugaccagaaccgacagaggcugguacugcgacaacgccggcagcgugagcuucuucccccaggccgagaccugcaaggugcagagcaacagaguguucugcgacaccaugaacagcagaacccugcccagcgaggugaaccugugcaacguggacaucuucaaccccaaguacgacugcaagaucaugaccagcaagaccgacgugagcagcagcgugaucaccagccugggcgccaucgugagcugcuacggcaagaccaagugcaccgccagcaacaagaacagaggcaucaucaagaccuucagcaacggcugcgacuacgugagcaacaagggcguggacaccgugagcgugggcaacacccuguacugcgugaacaagcaggagggcaagagccuguacgugaagggcgagcccaucaucaacuucuacgacccccugguguuccccagcgacgaguucgacgccagcaucagccaggugaacgagaagaucaaccagagccuggccuucaucagaaagagcgacgagcugcugcacaacgugaacgccggcaagagcaccaccaacaucaugaucaccaccaucaucaucgugaucaucgugauccugcugagccugaucgccgugggccugcugcuguacugcaaggccagaugaggacuaguacuggcugcaucucccuuuccucuguccuccauccuucucccaggauggugaagggggaccugguacccagugauccccaccccaggauccuaaaucaugacuuaccugcuaauaaaaacucauuggaaaagugagaagaucuaaaaaaaaaaaaaaaaaaaaaaaaaaaaaaaaaaaaaaaaaaaaaaaaaaaaaaaaaaaaaaaaugcaucccccccccccccccccccccccccccccccaaaggcucuuuucagagccaccagaauu

SEQ ID NO: 5291 - RNA, 1998 nt, Artificial Sequence
  mRNA product Design h-5 comprising derived and/or modified sequence from HRSV(A2)__F-del_DSCav1_mut4 (opt5)
gggagagggcgcuuggcuugcaaggacccugagcugcggcauugaagcacacccaacccaacucgacugaagucagccucacugaaccggaucugagaaucuucucucucugggcuugccagggcucuccgaaccuagcuagcauccucuucaauuccaacuagaaagcuuaccauggagcugcucauccugaaggccaacgcuauuaccacaauccuuacggccgugaccuucugcuuugcgagcggccagaauauuacagaagaguucuaccaauccaccuguucugcugucagcaaaggguaucuguccgcccucagaacaggaugguacaccucuguuaucacaauugaacugagcaacaucaaggagaauaaaugcaacggcaccgacgccaaggugaaacuuaucaagcaggaacuggauaaguauaaaaaugcugugacggagcuccagcugcugaugcaguccacccccgccacagggucuggaagcgcuauuuguuccggcgucgccgugugcaagguucuccaccuggagggggaagugaacaaaaucaagagcgcgcuucugucuaccaauaaagccgucgugucccucagcaacggaguuucugugcugacauuuaagguccuugaccugaagaauuacauugauaaacaacuccugccuauccugaacaagcaguccuguagcauuucuaauaucgagaccgugauugaguuccagcagaaaaacaaucggcuccuggaaaucacgcgcgaguuuuccgugaacgcuggcgucacaaccccgguuagcacauauaugcuuaccaauuccgaacugcucucucugaucaacgacaugcccauuaccaacgaucaaaagaaacuuaugagcaauaacgugcagaucgugagacagcaguccuacagcauuaugugcaucauuaaggaggaaguccuggccuaugugguucaacucccucuguacggcgugaucgacacacccuguuggaaacugcauacgucuccucucugcaccacaaauaccaaggagggguccaacaucugucugacacggaccgaucgcggaugguacugcgacaaugcuggcagcgucucuuucuuuccccaggccgaaacguguaaggugcagagcaacagaguuuucugcgauacaaugaacuccagaacccugccuucugaggugaaucucugcaaugucgacauuuuuaacccgaaauaugauuguaagaucaugaccagcaaaacagacguguccagcucugucauuaccucccugggggcgaucgugagcugcuacggaaagacaaaauguacggccucuaauaagaaccggggcauuaucaagaccuucuccaaugggugcgauuauguuagcaacaaaggaguggacacagucuccgugggcaauacccuuuacuguguuaacaagcaagagggcaaaucucuguaugugaagggggaacccaucauuaacuuuuacgacccucucgucuuccccagcgaugaguuugacgcuuccaucucucaggugaaugagaaaauuaaccagagccuggccuucauccgcaaguccgaugaacugcuccacaaugugaacgcuggaaagagcacaaccaauauuaugaucacgaccauuaucaucguuauuaucgucauucugcuuucucugaucgccgugggccuccugcuguauugcaaagccagaugaggacuaguacuggcugcaucucccuuuccucuguccuccauccuucucccaggauggugaagggggaccugguacccagugauccccaccccaggauccuaaaucaugacuuaccugcuaauaaaaacucauuggaaaagugagaagaucuaaaaaaaaaaaaaaaaaaaaaaaaaaaaaaaaaaaaaaaaaaaaaaaaaaaaaaaaaaaaaaaaugcaucccccccccccccccccccccccccccccccaaaggcucuuuucagagccaccagaauu

SEQ ID NO: 5292 - RNA, 1998 nt, Artificial Sequence
  mRNA product Design h-5 comprising derived and/or modified sequence from HRSV(A2)__F-del_DSCav1_mut4 (opt6)
gggagagggcgcuuggcuugcaaggacccugagcugcggcauugaagcacacccaacccaacucgacugaagucagccucacugaaccggaucugagaaucuucucucucugggcuugccagggcucuccgaaccuagcuagcauccucuucaauuccaacuagaaagcuuaccauggaacuuuuaauacuaaaagcuaacgccauaaccacuauacuaacagcagucacauucugcuucgcaucaggccaaaacauaaccgaagaauuuuaccaauccacuuguucagcagucuccaaaggauauuuauccgcacuucguacaggaugguauacaucaguaauaacaauagaacucuccaacauaaaagaaaauaaaugcaacggcaccgacgcaaaaguaaaacucaucaaacaagaauuagacaaauacaagaacgccguaacagaacuacaauuacuaaugcaaucaacacccgccacaggaucaggaucugcaauaugcucuggaguagcaguaugcaaaguauuacaccuagaaggagaaguaaacaaaaucaaaagcgcacuacuauccacaaacaaagcuguaguaucacuaucaaacggaguaucaguauuaacuuucaaaguacuugaucuaaaaaacuacauagacaaacaacuacuacccauauuaaacaaacaaucaugcucaauaagcaauauagaaacaguaauagaauuucaacaaaaaaacaacagacuacuagaaaucacaagggaauuuucaguaaaugccgguguuacaaccccaguaucaacauacaugcuaacuaacucagaacuacuauccuuaauaaacgauaugccaauaacaaacgaucaaaaaaaacuaauguccaacaacguacaaauaguaagacaacaaucauacucaaucaugugcauuauaaaagaagaagucuuagcauacguaguacaauuaccacuauacgguguaauagauacaccauguuggaaauuacacacaagcccacuaugcacaacuaacacaaaagaaggcucaaauauauguuuaacaagaacagaccgagguugguacugcgacaaugcaggaucaguaucauucuuuccacaagcagaaacauguaaaguucaauccaacagaguauucugcgacacaaugaacuccagaacacuaccuucagaaguaaaccucuguaacguagacauauuuaaucccaaguacgacugcaaaauaaugacaucgaaaacagacguaagcuccucagugauaacaucccucggcgccaucguauccuguuacgguaaaacuaaauguaccgccucaaacaaaaaccgcgguauuauaaaaacuuuuucuaauggcugcgauuacguaagcaacaaaggcgucgacacaguuuccguaggaaacacacuauacugcguaaacaaacaagaagguaaaucucuauacguaaaaggagaaccaauaauaaauuucuaugauccuuuaguauucccauccgaugaauuugacgccucuaucucacaagucaacgaaaaaauaaaucaaucauuagcauucauacgaaaaucagacgaacuacuacacaacguaaacgcaggaaaaucaacaaccaacauaaugauaaccacaauaauaauaguuauuauagugauacuauuauccuuaauugcagucggacuauuauuauacuguaaagcacgcuaaggacuaguacuggcugcaucucccuuuccucuguccuccauccuucucccaggauggugaagggggaccugguacccagugauccccaccccaggauccuaaaucaugacuuaccugcuaauaaaaacucauuggaaaagugagaagaucuaaaaaaaaaaaaaaaaaaaaaaaaaaaaaaaaaaaaaaaaaaaaaaaaaaaaaaaaaaaaaaaaugcaucccccccccccccccccccccccccccccccaaaggcucuuuucagagccaccagaauu

SEQ ID NO: 5293 - RNA, 1998 nt, Artificial Sequence
  mRNA product Design h-5 comprising derived and/or modified sequence from HRSV(A2)__F-del_DSCav1_mut4 (opt11)
gggagagggcgcuuggcuugcaaggacccugagcugcggcauugaagcacacccaacccaacucgacugaagucagccucacugaaccggaucugagaaucuucucucucugggcuugccagggcucuccgaaccuagcuagcauccucuucaauuccaacuagaaagcuuaccauggaacuccucauccucaaagccaaugccaucaccacaauccugacagcaguaaccuucugcuucgcauccggacaaaacaucaccgaagaauuuuaccagucaaccugcuccgcugucucaaaaggcuaccucucagcccuucgcaccggcugguacaccucggucauaacaauagaacucuccaauaucaaagaaaacaaaugcaacggcacugacgccaagguaaaacucaucaaacaggaacucgauaaauacaagaacgccguaacagaacuacaacuacucaugcaaucaacaccggccaccggcuccgguuccgccauaugcuccggaguggccgugugcaagguccuccaccuugaaggggaaguuaacaaaaucaaaucagcccuccucuccacuaacaaagccguaguaucccuaagcaacgguguauccguccucaccuucaaaguacuagaccuaaagaauuauaucgacaaacaacuccuccccauacucaacaaacaauccugcuccauaagcaacaucgaaacagucaucgaguuccagcagaaaaacaaccgacuccucgaaauaacccgcgaguucucagucaacgccggagucaccacacccgucagcaccuacaugcugaccaacuccgaacuccucuccuuaaucaaugacaugcccaucaccaaugaccaaaagaaacucaugucaaacaacguccaaauaguacgccaacaauccuacuccaucaugugcaucauaaaagaagaaguacucgccuacgucguccaacucccccucuacggcguaaucgacacccccugcuggaaacuacacacaagcccccucugcaccacaaacacuaaagagggcuccaacaucugucuaacccgcaccgaucgaggcugguacugcgacaacgccggaucugucucauucuucccccaagccgaaaccugcaaaguccaauccaaccgcgucuucugcgacaccaugaacucgagaacccucccuuccgaagucaaccuaugcaacgucgacauuuucaaccccaaauacgacugcaaaaucaugaccucgaaaaccgacguaucauccagcgucaucaccagccuaggcgcaaucgugagcugcuacggcaaaaccaaaugcaccgcgagcaauaaaaaccgcgggaucaucaaaacuuucuccaacggcugcgacuacgucuccaacaagggagucgauaccgucuccguaggcaacacccucuacugcgucaacaaacaagaaggcaaaucacuauacguaaaaggcgagccaaucauaaacuucuacgacccucuaguuuucccauccgacgaguucgacgcuagcaucucccaagucaacgagaaaaucaaccaaucccucgcauucauccgcaaauccgacgaacuccuccacaacguaaacgcaggcaaaucaacuacuaauauaaugaucacaaccaucauaauagucauaaucguaauccuccuaucccucaucgccgucggacuacugcucuacugcaaagcccgcuaaggacuaguacuggcugcaucucccuuuccucuguccuccauccuucucccaggauggugaagggggaccugguacccagugauccccaccccaggauccuaaaucaugacuuaccugcuaauaaaaacucauuggaaaagugagaagaucuaaaaaaaaaaaaaaaaaaaaaaaaaaaaaaaaaaaaaaaaaaaaaaaaaaaaaaaaaaaaaaaaugcaucccccccccccccccccccccccccccccccaaaggcucuuuucagagccaccagaauu

SEQ ID NO: 5294 - RNA, 1931 nt, Artificial Sequence
  mRNA product Design i-1 comprising derived and/or modified sequence from HRSV(A2)__F-del_DSCav1_mut4 (opt1)
gggagagggcgcuuggcuugcaaggacccugagcugcggcauugaagcacacccaacccaacucgacugaagucagccucacugaaccggaucugagaaucuucucucucugggcuugccagggcucuccgaaccuagcuagcauccucuucaauuccaacuagaaagcuuaccauggagcugcucauccugaaggccaacgccaucaccaccauccugacggcggugaccuucugcuucgccagcggccagaacaucaccgaggaguucuaccaguccacgugcagcgccgucuccaagggguaccucagcgcccugcggaccggcugguacaccuccgugaucaccaucgagcugagcaacaucaaggagaacaagugcaacgggaccgacgccaaggugaagcucaucaagcaggagcuggacaaguacaagaacgcggucacggagcugcagcuccugaugcaguccaccccggcaaccggcuccggcuccgccaucugcagcggcgucgccgugugcaaggugcugcaccucgagggggaggucaacaagaucaagagcgcccugcuguccaccaacaaggccguggugagccucuccaacggcgucagcgugcugaccuucaaggugcuggaccucaagaacuacaucgacaagcagcugcugcccauccugaacaagcagagcugcuccaucagcaacaucgagacggugaucgaguuccagcagaagaacaaccggcuccuggagaucacccgcgaguucagcgugaacgccggggucaccacccccguguccacguacaugcugaccaacagcgagcuccugucccugaucaacgacaugccgaucaccaacgaccagaagaagcucaugagcaacaacgugcagaucguccggcagcaguccuacagcaucaugugcaucaucaaggaggaggugcuggcguacgugguccagcugccccucuacggcgugaucgacacccccugcuggaagcugcacacgagcccccugugcaccaccaacaccaaggagggguccaacaucugccucacgcgcaccgaccggggcugguacugcgacaacgccggcagcgucuccuucuucccgcaggccgagaccugcaaggugcagagcaaccgcguguucugcgacaccaugaacucccggacgcugcccagcgagguaaaccucugcaacgucgacaucuucaaccccaaguacgacugcaagaucaugaccuccaagaccgacgugagcuccagcgugaucaccucccugggggccaucgucagcugcuacggcaagacgaagugcaccgccagcaacaagaaccgggggaucaucaagaccuucuccaacggcugcgacuacgugagcaacaagggcguggacaccguguccgucgggaacacccuguacugcgugaacaagcaggagggcaagagccucuacgugaagggggagcccaucaucaacuucuacgacccgcuggucuuccccuccgacgaguucgacgcgagcaucucccaggugaacgagaagaucaaccagagccuggccuucauccgcaaguccgacgagcugcuccacaacgugaacgccggcaagagcacgaccaacaucaugaucaccaccaucaucaucgucaucaucgugauccugcugucccucaucgccguggggcugcugcucuacugcaaggcccggugaggacuaguguccaccugucccuccugggcugcuggauugucucguuuuccugccaaauaaacaggaucagcgcuuuacagaucuaaaaaaaaaaaaaaaaaaaaaaaaaaaaaaaaaaaaaaaaaaaaaaaaaaaaaaaaaaaaaaaaugcaucccccccccccccccccccccccccccccccaaaggcucuuuucagagccaccagaauu

SEQ ID NO: 5295 - RNA, 1931 nt, Artificial Sequence
  mRNA product Design i-1 comprising derived and/or modified sequence from HRSV(A2)__F-del_DSCav1_mut4 (opt1)
gggagagggcgcuuggcuugcaaggacccugagcugcggcauugaagcacacccaacccaacucgacugaagucagccucacugaaccggaucugagaaucuucucucucugggcuugccagggcucuccgaaccuagcuagcauccucuucaauuccaacuagaaagcuuaccauggagcugcucauccugaaggccaacgccaucaccaccauccugacggcggugaccuucugcuucgccagcggccagaacaucaccgaggaguucuaccaguccacgugcagcgccgucuccaagggguaccucagcgcccugcgcaccggcugguacaccuccgugaucaccaucgagcugagcaacaucaaggagaacaagugcaacgggaccgacgccaaggugaagcucaucaagcaggagcuggacaaguacaagaacgcggucacggagcugcagcuccugaugcaguccacccccgccaccggcagcggguccgccaucugcagcggcguggccgugugcaagguccugcaccucgagggcgaggugaacaagaucaaguccgcgcugcugagcaccaacaaggccguggucucccucagcaacgggguguccgugcugacguucaagguccuggaccucaagaacuacaucgacaagcagcugcugccgauccucaacaagcagagcugcuccaucagcaacaucgagaccgugaucgaguuccagcagaagaacaaccggcugcuggagaucacccgcgaguucuccgugaacgccggcgucaccacgcccgugagcaccuacaugcucaccaacagcgagcugcugucccucaucaacgacaugcccaucaccaacgaccagaagaagcugaugagcaacaacgugcagaucguccggcagcaguccuacagcaucaugugcaucaucaaggaggaggugcuggccuacgugguccagcucccccuguacggggugaucgacacgccgugcuggaagcugcacaccagcccccucugcaccaccaacacgaaggagggcuccaacaucugccugacccgcaccgaccgggggugguacugcgacaacgccggcuccgugagcuucuucccccaggcggagaccugcaagguccaguccaaccgcguguucugcgacacgaugaacagccggacccuccccuccgaggucaaccugugcaacguggacaucuucaacccgaaguacgacugcaagaucaugaccagcaagaccgacguguccagcuccgucaucacgagccugggcgccaucguguccugcuacgggaagaccaagugcaccgccagcaacaagaaccggggcaucaucaagaccuucuccaacgggugcgacuacgugagcaacaagggcgucgacacggugagcgugggcaacacccucuacugcgucaacaagcaggaggggaagucccuguacgugaagggcgagcccaucaucaacuucuacgacccccugguguuccccagcgacgaguucgacgccuccaucagccaggucaacgagaagaucaaccagucccucgccuucauccgcaagagcgacgagcugcugcacaacgugaacgcggggaaguccaccaccaacaucaugaucaccacgaucaucaucgugaucaucgucauccuccugagccugaucgccgugggccuccugcuguacugcaaggcccggugaggacuaguguccaccugucccuccugggcugcuggauugucucguuuuccugccaaauaaacaggaucagcgcuuuacagaucuaaaaaaaaaaaaaaaaaaaaaaaaaaaaaaaaaaaaaaaaaaaaaaaaaaaaaaaaaaaaaaaaugcaucccccccccccccccccccccccccccccccaaaggcucuuuucagagccaccagaauu

SEQ ID NO: 5296 - RNA, 1931 nt, Artificial Sequence
  mRNA product Design i-1 comprising derived and/or modified sequence from HRSV(A2)__F-del_DSCav1_mut4 (opt2)
gggagagggcgcuuggcuugcaaggacccugagcugcggcauugaagcacacccaacccaacucgacugaagucagccucacugaaccggaucugagaaucuucucucucugggcuugccagggcucuccgaaccuagcuagcauccucuucaauuccaacuagaaagcuuaccauggagcuccucauccucaaggccaacgccaucaccaccauccucaccgccgucaccuucugcuucgccuccggccagaacaucaccgaggaguucuaccaguccaccugcuccgccgucuccaagggcuaccucuccgcccuccgcaccggcugguacaccuccgucaucaccaucgagcucuccaacaucaaggagaacaagugcaacggcaccgacgccaaggucaagcucaucaagcaggagcucgacaaguacaagaacgccgucaccgagcuccagcuccucaugcaguccacccccgccaccggcuccggcuccgccaucugcuccggcgucgccgucugcaagguccuccaccucgagggcgaggucaacaagaucaaguccgcccuccucuccaccaacaaggccgucgucucccucuccaacggcgucuccguccucaccuucaagguccucgaccucaagaacuacaucgacaagcagcuccuccccauccucaacaagcaguccugcuccaucuccaacaucgagaccgucaucgaguuccagcagaagaacaaccgccuccucgagaucacccgcgaguucuccgucaacgccggcgucaccacccccgucuccaccuacaugcucaccaacuccgagcuccucucccucaucaacgacaugcccaucaccaacgaccagaagaagcucauguccaacaacguccagaucguccgccagcaguccuacuccaucaugugcaucaucaaggaggagguccucgccuacgucguccagcucccccucuacggcgucaucgacacccccugcuggaagcuccacaccuccccccucugcaccaccaacaccaaggagggcuccaacaucugccucacccgcaccgaccgcggcugguacugcgacaacgccggcuccgucuccuucuucccccaggccgagaccugcaagguccaguccaaccgcgucuucugcgacaccaugaacucccgcacccuccccuccgaggucaaccucugcaacgucgacaucuucaaccccaaguacgacugcaagaucaugaccuccaagaccgacgucuccuccuccgucaucaccucccucggcgccaucgucuccugcuacggcaagaccaagugcaccgccuccaacaagaaccgcggcaucaucaagaccuucuccaacggcugcgacuacgucuccaacaagggcgucgacaccgucuccgucggcaacacccucuacugcgucaacaagcaggagggcaagucccucuacgucaagggcgagcccaucaucaacuucuacgacccccucgucuuccccuccgacgaguucgacgccuccaucucccaggucaacgagaagaucaaccagucccucgccuucauccgcaaguccgacgagcuccuccacaacgucaacgccggcaaguccaccaccaacaucaugaucaccaccaucaucaucgucaucaucgucauccuccucucccucaucgccgucggccuccuccucuacugcaaggcccgcugaggacuaguguccaccugucccuccugggcugcuggauugucucguuuuccugccaaauaaacaggaucagcgcuuuacagaucuaaaaaaaaaaaaaaaaaaaaaaaaaaaaaaaaaaaaaaaaaaaaaaaaaaaaaaaaaaaaaaaaugcaucccccccccccccccccccccccccccccccaaaggcucuuuucagagccaccagaauu

SEQ ID NO: 5297 - RNA, 1931 nt, Artificial Sequence
  mRNA product Design i-1 comprising derived and/or modified sequence from HRSV(A2)__F-del_DSCav1_mut4 (opt3)
gggagagggcgcuuggcuugcaaggacccugagcugcggcauugaagcacacccaacccaacucgacugaagucagccucacugaaccggaucugagaaucuucucucucugggcuugccagggcucuccgaaccuagcuagcauccucuucaauuccaacuagaaagcuuaccauggagcugcucauccuuaaggccaacgcuauuaccacaauacugacugcagugacguucugcuuugccagcggccagaauaucaccgaagaguucuaccaauccacauguucugcggucucaaaaggguauuugagugcuuuaagaacuggaugguacaccagcguuauuacaaucgaacuguccaacauuaaggagaauaaaugcaacgguaccgacgccaaggugaaacuaaucaagcaggaacucgauaaguauaaaaaugcaguaacugagcugcagcuucugaugcagucuacacccgccaccggcucggggucagcuauauguagcggaguggcagucugcaagguguugcaccucgagggcgaaguuaacaaaaucaagagugcccugcuguccacgaauaaagcuguggucucucucagcaacgguguguccguauuaacuuuuaagguucuggaccuuaagaauuacauugauaaacaauugcugccuauccuaaacaagcagucauguaguauuagcaauaucgagaccgugauagaguuccagcagaaaaacaauaggcuccuggaaauuacacgggaguuuucugucaacgccggggugacuaccccaguguccacauauaugcuuaccaauucagaacuguugagccucaucaacgacaugccgauuacgaacgaucaaaagaaacugaugaguaauaacguccagaucguucgccagcagucuuacuccaucaugugcauuauaaaggaggaaguguuagcguauguagugcaacugccccucuacggagucaucgacacuccuuguuggaaacuucauacaagcccacugugcaccacuaauacaaaggagggcucgaacauuuguuugacccgaacggaucguggcugguacugcgacaaugcagggucuguguccuucuuuccccaggccgaaaccuguaagguucagucaaacagaguguucugcgauacaaugaauaguagaacucugccuagcgaggucaaccucugcaauguggacaucuuuaacccaaaauaugauuguaagauaaugaccuccaaaacagacguaucuagcucaguuauuaccagucugggagcuaucguguccugcuacgguaagacuaaauguacagccagcaauaagaacaggggcaucauuaagaccuucucuaaugggugcgauuaugucucaaacaaaggaguggacacugucagugugggcaauacgcuuuacuguguuaacaagcaagaggguaaaagccuguaugugaagggggaacccaucauuaacuuuuacgacccuuugguauucccauccgaugaguuugacgcaucuauaucgcaggucaaugagaaaaucaaccagagccucgcuuucauucggaaguccgaugaacuguuacacaaugugaacgccggaaagucaacaaccaauaucaugaucacuaccauuauaaucguuauuaucgugauucugcuaagucucaucgcggucggccugcuuuuguauugcaaagcccgcugaggacuaguguccaccugucccuccugggcugcuggauugucucguuuuccugccaaauaaacaggaucagcgcuuuacagaucuaaaaaaaaaaaaaaaaaaaaaaaaaaaaaaaaaaaaaaaaaaaaaaaaaaaaaaaaaaaaaaaaugcaucccccccccccccccccccccccccccccccaaaggcucuuuucagagccaccagaauu

SEQ ID NO: 5298 - RNA, 1931 nt, Artificial Sequence
  mRNA product Design i-1 comprising derived and/or modified sequence from HRSV(A2)__F-del_DSCav1_mut4 (opt4)
gggagagggcgcuuggcuugcaaggacccugagcugcggcauugaagcacacccaacccaacucgacugaagucagccucacugaaccggaucugagaaucuucucucucugggcuugccagggcucuccgaaccuagcuagcauccucuucaauuccaacuagaaagcuuaccauggagcugcugauccugaaggccaacgccaucaccaccauccugaccgccgugaccuucugcuucgccagcggccagaacaucaccgaggaguucuaccagagcaccugcagcgccgugagcaagggcuaccugagcgcccugagaaccggcugguacaccagcgugaucaccaucgagcugagcaacaucaaggagaacaagugcaacggcaccgacgccaaggugaagcugaucaagcaggagcuggacaaguacaagaacgccgugaccgagcugcagcugcugaugcagagcacccccgccaccggcagcggcagcgccaucugcagcggcguggccgugugcaaggugcugcaccuggagggcgaggugaacaagaucaagagcgcccugcugagcaccaacaaggccguggugagccugagcaacggcgugagcgugcugaccuucaaggugcuggaccugaagaacuacaucgacaagcagcugcugcccauccugaacaagcagagcugcagcaucagcaacaucgagaccgugaucgaguuccagcagaagaacaacagacugcuggagaucaccagagaguucagcgugaacgccggcgugaccacccccgugagcaccuacaugcugaccaacagcgagcugcugagccugaucaacgacaugcccaucaccaacgaccagaagaagcugaugagcaacaacgugcagaucgugagacagcagagcuacagcaucaugugcaucaucaaggaggaggugcuggccuacguggugcagcugccccuguacggcgugaucgacacccccugcuggaagcugcacaccagcccccugugcaccaccaacaccaaggagggcagcaacaucugccugaccagaaccgacagaggcugguacugcgacaacgccggcagcgugagcuucuucccccaggccgagaccugcaaggugcagagcaacagaguguucugcgacaccaugaacagcagaacccugcccagcgaggugaaccugugcaacguggacaucuucaaccccaaguacgacugcaagaucaugaccagcaagaccgacgugagcagcagcgugaucaccagccugggcgccaucgugagcugcuacggcaagaccaagugcaccgccagcaacaagaacagaggcaucaucaagaccuucagcaacggcugcgacuacgugagcaacaagggcguggacaccgugagcgugggcaacacccuguacugcgugaacaagcaggagggcaagagccuguacgugaagggcgagcccaucaucaacuucuacgacccccugguguuccccagcgacgaguucgacgccagcaucagccaggugaacgagaagaucaaccagagccuggccuucaucagaaagagcgacgagcugcugcacaacgugaacgccggcaagagcaccaccaacaucaugaucaccaccaucaucaucgugaucaucgugauccugcugagccugaucgccgugggccugcugcuguacugcaaggccagaugaggacuaguguccaccugucccuccugggcugcuggauugucucguuuuccugccaaauaaacaggaucagcgcuuuacagaucuaaaaaaaaaaaaaaaaaaaaaaaaaaaaaaaaaaaaaaaaaaaaaaaaaaaaaaaaaaaaaaaaugcaucccccccccccccccccccccccccccccccaaaggcucuuuucagagccaccagaauu

SEQ ID NO: 5299 - RNA, 1931 nt, Artificial Sequence
  mRNA product Design i-1 comprising derived and/or modified sequence from HRSV(A2)__F-del_DSCav1_mut4 (opt5)
gggagagggcgcuuggcuugcaaggacccugagcugcggcauugaagcacacccaacccaacucgacugaagucagccucacugaaccggaucugagaaucuucucucucugggcuugccagggcucuccgaaccuagcuagcauccucuucaauuccaacuagaaagcuuaccauggagcugcucauccugaaggccaacgcuauuaccacaauccuuacggccgugaccuucugcuuugcgagcggccagaauauuacagaagaguucuaccaauccaccuguucugcugucagcaaaggguaucuguccgcccucagaacaggaugguacaccucuguuaucacaauugaacugagcaacaucaaggagaauaaaugcaacggcaccgacgccaaggugaaacuuaucaagcaggaacuggauaaguauaaaaaugcugugacggagcuccagcugcugaugcaguccacccccgccacagggucuggaagcgcuauuuguuccggcgucgccgugugcaagguucuccaccuggagggggaagugaacaaaaucaagagcgcgcuucugucuaccaauaaagccgucgugucccucagcaacggaguuucugugcugacauuuaagguccuugaccugaagaauuacauugauaaacaacuccugccuauccugaacaagcaguccuguagcauuucuaauaucgagaccgugauugaguuccagcagaaaaacaaucggcuccuggaaaucacgcgcgaguuuuccgugaacgcuggcgucacaaccccgguuagcacauauaugcuuaccaauuccgaacugcucucucugaucaacgacaugcccauuaccaacgaucaaaagaaacuuaugagcaauaacgugcagaucgugagacagcaguccuacagcauuaugugcaucauuaaggaggaaguccuggccuaugugguucaacucccucuguacggcgugaucgacacacccuguuggaaacugcauacgucuccucucugcaccacaaauaccaaggagggguccaacaucugucugacacggaccgaucgcggaugguacugcgacaaugcuggcagcgucucuuucuuuccccaggccgaaacguguaaggugcagagcaacagaguuuucugcgauacaaugaacuccagaacccugccuucugaggugaaucucugcaaugucgacauuuuuaacccgaaauaugauuguaagaucaugaccagcaaaacagacguguccagcucugucauuaccucccugggggcgaucgugagcugcuacggaaagacaaaauguacggccucuaauaagaaccggggcauuaucaagaccuucuccaaugggugcgauuauguuagcaacaaaggaguggacacagucuccgugggcaauacccuuuacuguguuaacaagcaagagggcaaaucucuguaugugaagggggaacccaucauuaacuuuuacgacccucucgucuuccccagcgaugaguuugacgcuuccaucucucaggugaaugagaaaauuaaccagagccuggccuucauccgcaaguccgaugaacugcuccacaaugugaacgcuggaaagagcacaaccaauauuaugaucacgaccauuaucaucguuauuaucgucauucugcuuucucugaucgccgugggccuccugcuguauugcaaagccagaugaggacuaguguccaccugucccuccugggcugcuggauugucucguuuuccugccaaauaaacaggaucagcgcuuuacagaucuaaaaaaaaaaaaaaaaaaaaaaaaaaaaaaaaaaaaaaaaaaaaaaaaaaaaaaaaaaaaaaaaugcaucccccccccccccccccccccccccccccccaaaggcucuuuucagagccaccagaauu

SEQ ID NO: 5300 - RNA, 1931 nt, Artificial Sequence
  mRNA product Design i-1 comprising derived and/or modified sequence from HRSV(A2)__F-del_DSCav1_mut4 (opt6)
gggagagggcgcuuggcuugcaaggacccugagcugcggcauugaagcacacccaacccaacucgacugaagucagccucacugaaccggaucugagaaucuucucucucugggcuugccagggcucuccgaaccuagcuagcauccucuucaauuccaacuagaaagcuuaccauggaacuuuuaauacuaaaagcuaacgccauaaccacuauacuaacagcagucacauucugcuucgcaucaggccaaaacauaaccgaagaauuuuaccaauccacuuguucagcagucuccaaaggauauuuauccgcacuucguacaggaugguauacaucaguaauaacaauagaacucuccaacauaaaagaaaauaaaugcaacggcaccgacgcaaaaguaaaacucaucaaacaagaauuagacaaauacaagaacgccguaacagaacuacaauuacuaaugcaaucaacacccgccacaggaucaggaucugcaauaugcucuggaguagcaguaugcaaaguauuacaccuagaaggagaaguaaacaaaaucaaaagcgcacuacuauccacaaacaaagcuguaguaucacuaucaaacggaguaucaguauuaacuuucaaaguacuugaucuaaaaaacuacauagacaaacaacuacuacccauauuaaacaaacaaucaugcucaauaagcaauauagaaacaguaauagaauuucaacaaaaaaacaacagacuacuagaaaucacaagggaauuuucaguaaaugccgguguuacaaccccaguaucaacauacaugcuaacuaacucagaacuacuauccuuaauaaacgauaugccaauaacaaacgaucaaaaaaaacuaauguccaacaacguacaaauaguaagacaacaaucauacucaaucaugugcauuauaaaagaagaagucuuagcauacguaguacaauuaccacuauacgguguaauagauacaccauguuggaaauuacacacaagcccacuaugcacaacuaacacaaaagaaggcucaaauauauguuuaacaagaacagaccgagguugguacugcgacaaugcaggaucaguaucauucuuuccacaagcagaaacauguaaaguucaauccaacagaguauucugcgacacaaugaacuccagaacacuaccuucagaaguaaaccucuguaacguagacauauuuaaucccaaguacgacugcaaaauaaugacaucgaaaacagacguaagcuccucagugauaacaucccucggcgccaucguauccuguuacgguaaaacuaaauguaccgccucaaacaaaaaccgcgguauuauaaaaacuuuuucuaauggcugcgauuacguaagcaacaaaggcgucgacacaguuuccguaggaaacacacuauacugcguaaacaaacaagaagguaaaucucuauacguaaaaggagaaccaauaauaaauuucuaugauccuuuaguauucccauccgaugaauuugacgccucuaucucacaagucaacgaaaaaauaaaucaaucauuagcauucauacgaaaaucagacgaacuacuacacaacguaaacgcaggaaaaucaacaaccaacauaaugauaaccacaauaauaauaguuauuauagugauacuauuauccuuaauugcagucggacuauuauuauacuguaaagcacgcuaaggacuaguguccaccugucccuccugggcugcuggauugucucguuuuccugccaaauaaacaggaucagcgcuuuacagaucuaaaaaaaaaaaaaaaaaaaaaaaaaaaaaaaaaaaaaaaaaaaaaaaaaaaaaaaaaaaaaaaaugcaucccccccccccccccccccccccccccccccaaaggcucuuuucagagccaccagaauu

SEQ ID NO: 5301 - RNA, 1931 nt, Artificial Sequence
  mRNA product Design i-1 comprising derived and/or modified sequence from HRSV(A2)__F-del_DSCav1_mut4 (opt11)
gggagagggcgcuuggcuugcaaggacccugagcugcggcauugaagcacacccaacccaacucgacugaagucagccucacugaaccggaucugagaaucuucucucucugggcuugccagggcucuccgaaccuagcuagcauccucuucaauuccaacuagaaagcuuaccauggaacuccucauccucaaagccaaugccaucaccacaauccugacagcaguaaccuucugcuucgcauccggacaaaacaucaccgaagaauuuuaccagucaaccugcuccgcugucucaaaaggcuaccucucagcccuucgcaccggcugguacaccucggucauaacaauagaacucuccaauaucaaagaaaacaaaugcaacggcacugacgccaagguaaaacucaucaaacaggaacucgauaaauacaagaacgccguaacagaacuacaacuacucaugcaaucaacaccggccaccggcuccgguuccgccauaugcuccggaguggccgugugcaagguccuccaccuugaaggggaaguuaacaaaaucaaaucagcccuccucuccacuaacaaagccguaguaucccuaagcaacgguguauccguccucaccuucaaaguacuagaccuaaagaauuauaucgacaaacaacuccuccccauacucaacaaacaauccugcuccauaagcaacaucgaaacagucaucgaguuccagcagaaaaacaaccgacuccucgaaauaacccgcgaguucucagucaacgccggagucaccacacccgucagcaccuacaugcugaccaacuccgaacuccucuccuuaaucaaugacaugcccaucaccaaugaccaaaagaaacucaugucaaacaacguccaaauaguacgccaacaauccuacuccaucaugugcaucauaaaagaagaaguacucgccuacgucguccaacucccccucuacggcguaaucgacacccccugcuggaaacuacacacaagcccccucugcaccacaaacacuaaagagggcuccaacaucugucuaacccgcaccgaucgaggcugguacugcgacaacgccggaucugucucauucuucccccaagccgaaaccugcaaaguccaauccaaccgcgucuucugcgacaccaugaacucgagaacccucccuuccgaagucaaccuaugcaacgucgacauuuucaaccccaaauacgacugcaaaaucaugaccucgaaaaccgacguaucauccagcgucaucaccagccuaggcgcaaucgugagcugcuacggcaaaaccaaaugcaccgcgagcaauaaaaaccgcgggaucaucaaaacuuucuccaacggcugcgacuacgucuccaacaagggagucgauaccgucuccguaggcaacacccucuacugcgucaacaaacaagaaggcaaaucacuauacguaaaaggcgagccaaucauaaacuucuacgacccucuaguuuucccauccgacgaguucgacgcuagcaucucccaagucaacgagaaaaucaaccaaucccucgcauucauccgcaaauccgacgaacuccuccacaacguaaacgcaggcaaaucaacuacuaauauaaugaucacaaccaucauaauagucauaaucguaauccuccuaucccucaucgccgucggacuacugcucuacugcaaagcccgcuaaggacuaguguccaccugucccuccugggcugcuggauugucucguuuuccugccaaauaaacaggaucagcgcuuuacagaucuaaaaaaaaaaaaaaaaaaaaaaaaaaaaaaaaaaaaaaaaaaaaaaaaaaaaaaaaaaaaaaaaugcaucccccccccccccccccccccccccccccccaaaggcucuuuucagagccaccagaauu

SEQ ID NO: 5302 - RNA, 1931 nt, Artificial Sequence
  mRNA product Design i-2 comprising derived and/or modified sequence from HRSV(A2)__F-del_DSCav1_mut4 (opt1)
gggagaggcgcugccuacggagguggcagccaucuccuucucggcaucaagcuuaccauggagcugcucauccugaaggccaacgccaucaccaccauccugacggcggugaccuucugcuucgccagcggccagaacaucaccgaggaguucuaccaguccacgugcagcgccgucuccaagggguaccucagcgcccugcggaccggcugguacaccuccgugaucaccaucgagcugagcaacaucaaggagaacaagugcaacgggaccgacgccaaggugaagcucaucaagcaggagcuggacaaguacaagaacgcggucacggagcugcagcuccugaugcaguccaccccggcaaccggcuccggcuccgccaucugcagcggcgucgccgugugcaaggugcugcaccucgagggggaggucaacaagaucaagagcgcccugcuguccaccaacaaggccguggugagccucuccaacggcgucagcgugcugaccuucaaggugcuggaccucaagaacuacaucgacaagcagcugcugcccauccugaacaagcagagcugcuccaucagcaacaucgagacggugaucgaguuccagcagaagaacaaccggcuccuggagaucacccgcgaguucagcgugaacgccggggucaccacccccguguccacguacaugcugaccaacagcgagcuccugucccugaucaacgacaugccgaucaccaacgaccagaagaagcucaugagcaacaacgugcagaucguccggcagcaguccuacagcaucaugugcaucaucaaggaggaggugcuggcguacgugguccagcugccccucuacggcgugaucgacacccccugcuggaagcugcacacgagcccccugugcaccaccaacaccaaggagggguccaacaucugccucacgcgcaccgaccggggcugguacugcgacaacgccggcagcgucuccuucuucccgcaggccgagaccugcaaggugcagagcaaccgcguguucugcgacaccaugaacucccggacgcugcccagcgagguaaaccucugcaacgucgacaucuucaaccccaaguacgacugcaagaucaugaccuccaagaccgacgugagcuccagcgugaucaccucccugggggccaucgucagcugcuacggcaagacgaagugcaccgccagcaacaagaaccgggggaucaucaagaccuucuccaacggcugcgacuacgugagcaacaagggcguggacaccguguccgucgggaacacccuguacugcgugaacaagcaggagggcaagagccucuacgugaagggggagcccaucaucaacuucuacgacccgcuggucuuccccuccgacgaguucgacgcgagcaucucccaggugaacgagaagaucaaccagagccuggccuucauccgcaaguccgacgagcugcuccacaacgugaacgccggcaagagcacgaccaacaucaugaucaccaccaucaucaucgucaucaucgugauccugcugucccucaucgccguggggcugcugcucuacugcaaggcccggugaggacuagugcaucacauuuaaaagcaucucagccuaccaugagaauaagagaaagaaaaugaagaucaauagcuuauucaucucuuuuucuuuuucguugguguaaagccaacacccugucuaaaaaacauaaauuucuuuaaucauuuugccucuuuucucugugcuucaauuaauaaaaaauggaaagaaccuagaucuaaaaaaaaaaaaaaaaaaaaaaaaaaaaaaaaaaaaaaaaaaaaaaaaaaaaaaaaaaaaaaaaugcaucccccccccccccccccccccccccccccccaaaggcucuuuucagagccaccagaauu

SEQ ID NO: 5303 - RNA, 1931 nt, Artificial Sequence
  mRNA product Design i-2 comprising derived and/or modified sequence from HRSV(A2)__F-del_DSCav1_mut4 (opt1)
gggagaggcgcugccuacggagguggcagccaucuccuucucggcaucaagcuuaccauggagcugcucauccugaaggccaacgccaucaccaccauccugacggcggugaccuucugcuucgccagcggccagaacaucaccgaggaguucuaccaguccacgugcagcgccgucuccaagggguaccucagcgcccugcgcaccggcugguacaccuccgugaucaccaucgagcugagcaacaucaaggagaacaagugcaacgggaccgacgccaaggugaagcucaucaagcaggagcuggacaaguacaagaacgcggucacggagcugcagcuccugaugcaguccacccccgccaccggcagcggguccgccaucugcagcggcguggccgugugcaagguccugcaccucgagggcgaggugaacaagaucaaguccgcgcugcugagcaccaacaaggccguggucucccucagcaacgggguguccgugcugacguucaagguccuggaccucaagaacuacaucgacaagcagcugcugccgauccucaacaagcagagcugcuccaucagcaacaucgagaccgugaucgaguuccagcagaagaacaaccggcugcuggagaucacccgcgaguucuccgugaacgccggcgucaccacgcccgugagcaccuacaugcucaccaacagcgagcugcugucccucaucaacgacaugcccaucaccaacgaccagaagaagcugaugagcaacaacgugcagaucguccggcagcaguccuacagcaucaugugcaucaucaaggaggaggugcuggccuacgugguccagcucccccuguacggggugaucgacacgccgugcuggaagcugcacaccagcccccucugcaccaccaacacgaaggagggcuccaacaucugccugacccgcaccgaccgggggugguacugcgacaacgccggcuccgugagcuucuucccccaggcggagaccugcaagguccaguccaaccgcguguucugcgacacgaugaacagccggacccuccccuccgaggucaaccugugcaacguggacaucuucaacccgaaguacgacugcaagaucaugaccagcaagaccgacguguccagcuccgucaucacgagccugggcgccaucguguccugcuacgggaagaccaagugcaccgccagcaacaagaaccggggcaucaucaagaccuucuccaacgggugcgacuacgugagcaacaagggcgucgacacggugagcgugggcaacacccucuacugcgucaacaagcaggaggggaagucccuguacgugaagggcgagcccaucaucaacuucuacgacccccugguguuccccagcgacgaguucgacgccuccaucagccaggucaacgagaagaucaaccagucccucgccuucauccgcaagagcgacgagcugcugcacaacgugaacgcggggaaguccaccaccaacaucaugaucaccacgaucaucaucgugaucaucgucauccuccugagccugaucgccgugggccuccugcuguacugcaaggcccggugaggacuagugcaucacauuuaaaagcaucucagccuaccaugagaauaagagaaagaaaaugaagaucaauagcuuauucaucucuuuuucuuuuucguugguguaaagccaacacccugucuaaaaaacauaaauuucuuuaaucauuuugccucuuuucucugugcuucaauuaauaaaaaauggaaagaaccuagaucuaaaaaaaaaaaaaaaaaaaaaaaaaaaaaaaaaaaaaaaaaaaaaaaaaaaaaaaaaaaaaaaaugcaucccccccccccccccccccccccccccccccaaaggcucuuuucagagccaccagaauu

SEQ ID NO: 5304 - RNA, 1931 nt, Artificial Sequence
  mRNA product Design i-2 comprising derived and/or modified sequence from HRSV(A2)__F-del_DSCav1_mut4 (opt2)
gggagaggcgcugccuacggagguggcagccaucuccuucucggcaucaagcuuaccauggagcuccucauccucaaggccaacgccaucaccaccauccucaccgccgucaccuucugcuucgccuccggccagaacaucaccgaggaguucuaccaguccaccugcuccgccgucuccaagggcuaccucuccgcccuccgcaccggcugguacaccuccgucaucaccaucgagcucuccaacaucaaggagaacaagugcaacggcaccgacgccaaggucaagcucaucaagcaggagcucgacaaguacaagaacgccgucaccgagcuccagcuccucaugcaguccacccccgccaccggcuccggcuccgccaucugcuccggcgucgccgucugcaagguccuccaccucgagggcgaggucaacaagaucaaguccgcccuccucuccaccaacaaggccgucgucucccucuccaacggcgucuccguccucaccuucaagguccucgaccucaagaacuacaucgacaagcagcuccuccccauccucaacaagcaguccugcuccaucuccaacaucgagaccgucaucgaguuccagcagaagaacaaccgccuccucgagaucacccgcgaguucuccgucaacgccggcgucaccacccccgucuccaccuacaugcucaccaacuccgagcuccucucccucaucaacgacaugcccaucaccaacgaccagaagaagcucauguccaacaacguccagaucguccgccagcaguccuacuccaucaugugcaucaucaaggaggagguccucgccuacgucguccagcucccccucuacggcgucaucgacacccccugcuggaagcuccacaccuccccccucugcaccaccaacaccaaggagggcuccaacaucugccucacccgcaccgaccgcggcugguacugcgacaacgccggcuccgucuccuucuucccccaggccgagaccugcaagguccaguccaaccgcgucuucugcgacaccaugaacucccgcacccuccccuccgaggucaaccucugcaacgucgacaucuucaaccccaaguacgacugcaagaucaugaccuccaagaccgacgucuccuccuccgucaucaccucccucggcgccaucgucuccugcuacggcaagaccaagugcaccgccuccaacaagaaccgcggcaucaucaagaccuucuccaacggcugcgacuacgucuccaacaagggcgucgacaccgucuccgucggcaacacccucuacugcgucaacaagcaggagggcaagucccucuacgucaagggcgagcccaucaucaacuucuacgacccccucgucuuccccuccgacgaguucgacgccuccaucucccaggucaacgagaagaucaaccagucccucgccuucauccgcaaguccgacgagcuccuccacaacgucaacgccggcaaguccaccaccaacaucaugaucaccaccaucaucaucgucaucaucgucauccuccucucccucaucgccgucggccuccuccucuacugcaaggcccgcugaggacuagugcaucacauuuaaaagcaucucagccuaccaugagaauaagagaaagaaaaugaagaucaauagcuuauucaucucuuuuucuuuuucguugguguaaagccaacacccugucuaaaaaacauaaauuucuuuaaucauuuugccucuuuucucugugcuucaauuaauaaaaaauggaaagaaccuagaucuaaaaaaaaaaaaaaaaaaaaaaaaaaaaaaaaaaaaaaaaaaaaaaaaaaaaaaaaaaaaaaaaugcaucccccccccccccccccccccccccccccccaaaggcucuuuucagagccaccagaauu

SEQ ID NO: 5305 - RNA, 1931 nt, Artificial Sequence
  mRNA product Design i-2 comprising derived and/or modified sequence from HRSV(A2)__F-del_DSCav1_mut4 (opt3)
gggagaggcgcugccuacggagguggcagccaucuccuucucggcaucaagcuuaccauggagcugcucauccuuaaggccaacgcuauuaccacaauacugacugcagugacguucugcuuugccagcggccagaauaucaccgaagaguucuaccaauccacauguucugcggucucaaaaggguauuugagugcuuuaagaacuggaugguacaccagcguuauuacaaucgaacuguccaacauuaaggagaauaaaugcaacgguaccgacgccaaggugaaacuaaucaagcaggaacucgauaaguauaaaaaugcaguaacugagcugcagcuucugaugcagucuacacccgccaccggcucggggucagcuauauguagcggaguggcagucugcaagguguugcaccucgagggcgaaguuaacaaaaucaagagugcccugcuguccacgaauaaagcuguggucucucucagcaacgguguguccguauuaacuuuuaagguucuggaccuuaagaauuacauugauaaacaauugcugccuauccuaaacaagcagucauguaguauuagcaauaucgagaccgugauagaguuccagcagaaaaacaauaggcuccuggaaauuacacgggaguuuucugucaacgccggggugacuaccccaguguccacauauaugcuuaccaauucagaacuguugagccucaucaacgacaugccgauuacgaacgaucaaaagaaacugaugaguaauaacguccagaucguucgccagcagucuuacuccaucaugugcauuauaaaggaggaaguguuagcguauguagugcaacugccccucuacggagucaucgacacuccuuguuggaaacuucauacaagcccacugugcaccacuaauacaaaggagggcucgaacauuuguuugacccgaacggaucguggcugguacugcgacaaugcagggucuguguccuucuuuccccaggccgaaaccuguaagguucagucaaacagaguguucugcgauacaaugaauaguagaacucugccuagcgaggucaaccucugcaauguggacaucuuuaacccaaaauaugauuguaagauaaugaccuccaaaacagacguaucuagcucaguuauuaccagucugggagcuaucguguccugcuacgguaagacuaaauguacagccagcaauaagaacaggggcaucauuaagaccuucucuaaugggugcgauuaugucucaaacaaaggaguggacacugucagugugggcaauacgcuuuacuguguuaacaagcaagaggguaaaagccuguaugugaagggggaacccaucauuaacuuuuacgacccuuugguauucccauccgaugaguuugacgcaucuauaucgcaggucaaugagaaaaucaaccagagccucgcuuucauucggaaguccgaugaacuguuacacaaugugaacgccggaaagucaacaaccaauaucaugaucacuaccauuauaaucguuauuaucgugauucugcuaagucucaucgcggucggccugcuuuuguauugcaaagcccgcugaggacuagugcaucacauuuaaaagcaucucagccuaccaugagaauaagagaaagaaaaugaagaucaauagcuuauucaucucuuuuucuuuuucguugguguaaagccaacacccugucuaaaaaacauaaauuucuuuaaucauuuugccucuuuucucugugcuucaauuaauaaaaaauggaaagaaccuagaucuaaaaaaaaaaaaaaaaaaaaaaaaaaaaaaaaaaaaaaaaaaaaaaaaaaaaaaaaaaaaaaaaugcaucccccccccccccccccccccccccccccccaaaggcucuuuucagagccaccagaauu

SEQ ID NO: 5306 - RNA, 1931 nt, Artificial Sequence
  mRNA product Design i-2 comprising derived and/or modified sequence from HRSV(A2)__F-del_DSCav1_mut4 (opt4)
gggagaggcgcugccuacggagguggcagccaucuccuucucggcaucaagcuuaccauggagcugcugauccugaaggccaacgccaucaccaccauccugaccgccgugaccuucugcuucgccagcggccagaacaucaccgaggaguucuaccagagcaccugcagcgccgugagcaagggcuaccugagcgcccugagaaccggcugguacaccagcgugaucaccaucgagcugagcaacaucaaggagaacaagugcaacggcaccgacgccaaggugaagcugaucaagcaggagcuggacaaguacaagaacgccgugaccgagcugcagcugcugaugcagagcacccccgccaccggcagcggcagcgccaucugcagcggcguggccgugugcaaggugcugcaccuggagggcgaggugaacaagaucaagagcgcccugcugagcaccaacaaggccguggugagccugagcaacggcgugagcgugcugaccuucaaggugcuggaccugaagaacuacaucgacaagcagcugcugcccauccugaacaagcagagcugcagcaucagcaacaucgagaccgugaucgaguuccagcagaagaacaacagacugcuggagaucaccagagaguucagcgugaacgccggcgugaccacccccgugagcaccuacaugcugaccaacagcgagcugcugagccugaucaacgacaugcccaucaccaacgaccagaagaagcugaugagcaacaacgugcagaucgugagacagcagagcuacagcaucaugugcaucaucaaggaggaggugcuggccuacguggugcagcugccccuguacggcgugaucgacacccccugcuggaagcugcacaccagcccccugugcaccaccaacaccaaggagggcagcaacaucugccugaccagaaccgacagaggcugguacugcgacaacgccggcagcgugagcuucuucccccaggccgagaccugcaaggugcagagcaacagaguguucugcgacaccaugaacagcagaacccugcccagcgaggugaaccugugcaacguggacaucuucaaccccaaguacgacugcaagaucaugaccagcaagaccgacgugagcagcagcgugaucaccagccugggcgccaucgugagcugcuacggcaagaccaagugcaccgccagcaacaagaacagaggcaucaucaagaccuucagcaacggcugcgacuacgugagcaacaagggcguggacaccgugagcgugggcaacacccuguacugcgugaacaagcaggagggcaagagccuguacgugaagggcgagcccaucaucaacuucuacgacccccugguguuccccagcgacgaguucgacgccagcaucagccaggugaacgagaagaucaaccagagccuggccuucaucagaaagagcgacgagcugcugcacaacgugaacgccggcaagagcaccaccaacaucaugaucaccaccaucaucaucgugaucaucgugauccugcugagccugaucgccgugggccugcugcuguacugcaaggccagaugaggacuagugcaucacauuuaaaagcaucucagccuaccaugagaauaagagaaagaaaaugaagaucaauagcuuauucaucucuuuuucuuuuucguugguguaaagccaacacccugucuaaaaaacauaaauuucuuuaaucauuuugccucuuuucucugugcuucaauuaauaaaaaauggaaagaaccuagaucuaaaaaaaaaaaaaaaaaaaaaaaaaaaaaaaaaaaaaaaaaaaaaaaaaaaaaaaaaaaaaaaaugcaucccccccccccccccccccccccccccccccaaaggcucuuuucagagccaccagaauu

SEQ ID NO: 5307 - RNA, 1931 nt, Artificial Sequence
  mRNA product Design i-2 comprising derived and/or modified sequence from HRSV(A2)__F-del_DSCav1_mut4 (opt5)
gggagaggcgcugccuacggagguggcagccaucuccuucucggcaucaagcuuaccauggagcugcucauccugaaggccaacgcuauuaccacaauccuuacggccgugaccuucugcuuugcgagcggccagaauauuacagaagaguucuaccaauccaccuguucugcugucagcaaaggguaucuguccgcccucagaacaggaugguacaccucuguuaucacaauugaacugagcaacaucaaggagaauaaaugcaacggcaccgacgccaaggugaaacuuaucaagcaggaacuggauaaguauaaaaaugcugugacggagcuccagcugcugaugcaguccacccccgccacagggucuggaagcgcuauuuguuccggcgucgccgugugcaagguucuccaccuggagggggaagugaacaaaaucaagagcgcgcuucugucuaccaauaaagccgucgugucccucagcaacggaguuucugugcugacauuuaagguccuugaccugaagaauuacauugauaaacaacuccugccuauccugaacaagcaguccuguagcauuucuaauaucgagaccgugauugaguuccagcagaaaaacaaucggcuccuggaaaucacgcgcgaguuuuccgugaacgcuggcgucacaaccccgguuagcacauauaugcuuaccaauuccgaacugcucucucugaucaacgacaugcccauuaccaacgaucaaaagaaacuuaugagcaauaacgugcagaucgugagacagcaguccuacagcauuaugugcaucauuaaggaggaaguccuggccuaugugguucaacucccucuguacggcgugaucgacacacccuguuggaaacugcauacgucuccucucugcaccacaaauaccaaggagggguccaacaucugucugacacggaccgaucgcggaugguacugcgacaaugcuggcagcgucucuuucuuuccccaggccgaaacguguaaggugcagagcaacagaguuuucugcgauacaaugaacuccagaacccugccuucugaggugaaucucugcaaugucgacauuuuuaacccgaaauaugauuguaagaucaugaccagcaaaacagacguguccagcucugucauuaccucccugggggcgaucgugagcugcuacggaaagacaaaauguacggccucuaauaagaaccggggcauuaucaagaccuucuccaaugggugcgauuauguuagcaacaaaggaguggacacagucuccgugggcaauacccuuuacuguguuaacaagcaagagggcaaaucucuguaugugaagggggaacccaucauuaacuuuuacgacccucucgucuuccccagcgaugaguuugacgcuuccaucucucaggugaaugagaaaauuaaccagagccuggccuucauccgcaaguccgaugaacugcuccacaaugugaacgcuggaaagagcacaaccaauauuaugaucacgaccauuaucaucguuauuaucgucauucugcuuucucugaucgccgugggccuccugcuguauugcaaagccagaugaggacuagugcaucacauuuaaaagcaucucagccuaccaugagaauaagagaaagaaaaugaagaucaauagcuuauucaucucuuuuucuuuuucguugguguaaagccaacacccugucuaaaaaacauaaauuucuuuaaucauuuugccucuuuucucugugcuucaauuaauaaaaaauggaaagaaccuagaucuaaaaaaaaaaaaaaaaaaaaaaaaaaaaaaaaaaaaaaaaaaaaaaaaaaaaaaaaaaaaaaaaugcaucccccccccccccccccccccccccccccccaaaggcucuuuucagagccaccagaauu

SEQ ID NO: 5308 - RNA, 1931 nt, Artificial Sequence
  mRNA product Design i-2 comprising derived and/or modified sequence from HRSV(A2)__F-del_DSCav1_mut4 (opt6)
gggagaggcgcugccuacggagguggcagccaucuccuucucggcaucaagcuuaccauggaacuuuuaauacuaaaagcuaacgccauaaccacuauacuaacagcagucacauucugcuucgcaucaggccaaaacauaaccgaagaauuuuaccaauccacuuguucagcagucuccaaaggauauuuauccgcacuucguacaggaugguauacaucaguaauaacaauagaacucuccaacauaaaagaaaauaaaugcaacggcaccgacgcaaaaguaaaacucaucaaacaagaauuagacaaauacaagaacgccguaacagaacuacaauuacuaaugcaaucaacacccgccacaggaucaggaucugcaauaugcucuggaguagcaguaugcaaaguauuacaccuagaaggagaaguaaacaaaaucaaaagcgcacuacuauccacaaacaaagcuguaguaucacuaucaaacggaguaucaguauuaacuuucaaaguacuugaucuaaaaaacuacauagacaaacaacuacuacccauauuaaacaaacaaucaugcucaauaagcaauauagaaacaguaauagaauuucaacaaaaaaacaacagacuacuagaaaucacaagggaauuuucaguaaaugccgguguuacaaccccaguaucaacauacaugcuaacuaacucagaacuacuauccuuaauaaacgauaugccaauaacaaacgaucaaaaaaaacuaauguccaacaacguacaaauaguaagacaacaaucauacucaaucaugugcauuauaaaagaagaagucuuagcauacguaguacaauuaccacuauacgguguaauagauacaccauguuggaaauuacacacaagcccacuaugcacaacuaacacaaaagaaggcucaaauauauguuuaacaagaacagaccgagguugguacugcgacaaugcaggaucaguaucauucuuuccacaagcagaaacauguaaaguucaauccaacagaguauucugcgacacaaugaacuccagaacacuaccuucagaaguaaaccucuguaacguagacauauuuaaucccaaguacgacugcaaaauaaugacaucgaaaacagacguaagcuccucagugauaacaucccucggcgccaucguauccuguuacgguaaaacuaaauguaccgccucaaacaaaaaccgcgguauuauaaaaacuuuuucuaauggcugcgauuacguaagcaacaaaggcgucgacacaguuuccguaggaaacacacuauacugcguaaacaaacaagaagguaaaucucuauacguaaaaggagaaccaauaauaaauuucuaugauccuuuaguauucccauccgaugaauuugacgccucuaucucacaagucaacgaaaaaauaaaucaaucauuagcauucauacgaaaaucagacgaacuacuacacaacguaaacgcaggaaaaucaacaaccaacauaaugauaaccacaauaauaauaguuauuauagugauacuauuauccuuaauugcagucggacuauuauuauacuguaaagcacgcuaaggacuagugcaucacauuuaaaagcaucucagccuaccaugagaauaagagaaagaaaaugaagaucaauagcuuauucaucucuuuuucuuuuucguugguguaaagccaacacccugucuaaaaaacauaaauuucuuuaaucauuuugccucuuuucucugugcuucaauuaauaaaaaauggaaagaaccuagaucuaaaaaaaaaaaaaaaaaaaaaaaaaaaaaaaaaaaaaaaaaaaaaaaaaaaaaaaaaaaaaaaaugcaucccccccccccccccccccccccccccccccaaaggcucuuuucagagccaccagaauu

SEQ ID NO: 5309 - RNA, 1931 nt, Artificial Sequence
  mRNA product Design i-2 comprising derived and/or modified sequence from HRSV(A2)__F-del_DSCav1_mut4 (opt11)
gggagaggcgcugccuacggagguggcagccaucuccuucucggcaucaagcuuaccauggaacuccucauccucaaagccaaugccaucaccacaauccugacagcaguaaccuucugcuucgcauccggacaaaacaucaccgaagaauuuuaccagucaaccugcuccgcugucucaaaaggcuaccucucagcccuucgcaccggcugguacaccucggucauaacaauagaacucuccaauaucaaagaaaacaaaugcaacggcacugacgccaagguaaaacucaucaaacaggaacucgauaaauacaagaacgccguaacagaacuacaacuacucaugcaaucaacaccggccaccggcuccgguuccgccauaugcuccggaguggccgugugcaagguccuccaccuugaaggggaaguuaacaaaaucaaaucagcccuccucuccacuaacaaagccguaguaucccuaagcaacgguguauccguccucaccuucaaaguacuagaccuaaagaauuauaucgacaaacaacuccuccccauacucaacaaacaauccugcuccauaagcaacaucgaaacagucaucgaguuccagcagaaaaacaaccgacuccucgaaauaacccgcgaguucucagucaacgccggagucaccacacccgucagcaccuacaugcugaccaacuccgaacuccucuccuuaaucaaugacaugcccaucaccaaugaccaaaagaaacucaugucaaacaacguccaaauaguacgccaacaauccuacuccaucaugugcaucauaaaagaagaaguacucgccuacgucguccaacucccccucuacggcguaaucgacacccccugcuggaaacuacacacaagcccccucugcaccacaaacacuaaagagggcuccaacaucugucuaacccgcaccgaucgaggcugguacugcgacaacgccggaucugucucauucuucccccaagccgaaaccugcaaaguccaauccaaccgcgucuucugcgacaccaugaacucgagaacccucccuuccgaagucaaccuaugcaacgucgacauuuucaaccccaaauacgacugcaaaaucaugaccucgaaaaccgacguaucauccagcgucaucaccagccuaggcgcaaucgugagcugcuacggcaaaaccaaaugcaccgcgagcaauaaaaaccgcgggaucaucaaaacuuucuccaacggcugcgacuacgucuccaacaagggagucgauaccgucuccguaggcaacacccucuacugcgucaacaaacaagaaggcaaaucacuauacguaaaaggcgagccaaucauaaacuucuacgacccucuaguuuucccauccgacgaguucgacgcuagcaucucccaagucaacgagaaaaucaaccaaucccucgcauucauccgcaaauccgacgaacuccuccacaacguaaacgcaggcaaaucaacuacuaauauaaugaucacaaccaucauaauagucauaaucguaauccuccuaucccucaucgccgucggacuacugcucuacugcaaagcccgcuaaggacuagugcaucacauuuaaaagcaucucagccuaccaugagaauaagagaaagaaaaugaagaucaauagcuuauucaucucuuuuucuuuuucguugguguaaagccaacacccugucuaaaaaacauaaauuucuuuaaucauuuugccucuuuucucugugcuucaauuaauaaaaaauggaaagaaccuagaucuaaaaaaaaaaaaaaaaaaaaaaaaaaaaaaaaaaaaaaaaaaaaaaaaaaaaaaaaaaaaaaaaugcaucccccccccccccccccccccccccccccccaaaggcucuuuucagagccaccagaauu

SEQ ID NO: 5310 - RNA, 1927 nt, Artificial Sequence
  mRNA product Design i-2 comprising derived and/or modified sequence from HRSV(A2)__F-del_DSCav1_mut4 (opt1)
ggggcgcugccuacggagguggcagccaucuccuucucggcaucaagcuuaccauggagcugcucauccugaaggccaacgccaucaccaccauccugacggcggugaccuucugcuucgccagcggccagaacaucaccgaggaguucuaccaguccacgugcagcgccgucuccaagggguaccucagcgcccugcggaccggcugguacaccuccgugaucaccaucgagcugagcaacaucaaggagaacaagugcaacgggaccgacgccaaggugaagcucaucaagcaggagcuggacaaguacaagaacgcggucacggagcugcagcuccugaugcaguccaccccggcaaccggcuccggcuccgccaucugcagcggcgucgccgugugcaaggugcugcaccucgagggggaggucaacaagaucaagagcgcccugcuguccaccaacaaggccguggugagccucuccaacggcgucagcgugcugaccuucaaggugcuggaccucaagaacuacaucgacaagcagcugcugcccauccugaacaagcagagcugcuccaucagcaacaucgagacggugaucgaguuccagcagaagaacaaccggcuccuggagaucacccgcgaguucagcgugaacgccggggucaccacccccguguccacguacaugcugaccaacagcgagcuccugucccugaucaacgacaugccgaucaccaacgaccagaagaagcucaugagcaacaacgugcagaucguccggcagcaguccuacagcaucaugugcaucaucaaggaggaggugcuggcguacgugguccagcugccccucuacggcgugaucgacacccccugcuggaagcugcacacgagcccccugugcaccaccaacaccaaggagggguccaacaucugccucacgcgcaccgaccggggcugguacugcgacaacgccggcagcgucuccuucuucccgcaggccgagaccugcaaggugcagagcaaccgcguguucugcgacaccaugaacucccggacgcugcccagcgagguaaaccucugcaacgucgacaucuucaaccccaaguacgacugcaagaucaugaccuccaagaccgacgugagcuccagcgugaucaccucccugggggccaucgucagcugcuacggcaagacgaagugcaccgccagcaacaagaaccgggggaucaucaagaccuucuccaacggcugcgacuacgugagcaacaagggcguggacaccguguccgucgggaacacccuguacugcgugaacaagcaggagggcaagagccucuacgugaagggggagcccaucaucaacuucuacgacccgcuggucuuccccuccgacgaguucgacgcgagcaucucccaggugaacgagaagaucaaccagagccuggccuucauccgcaaguccgacgagcugcuccacaacgugaacgccggcaagagcacgaccaacaucaugaucaccaccaucaucaucgucaucaucgugauccugcugucccucaucgccguggggcugcugcucuacugcaaggcccggugaggacuagugcaucacauuuaaaagcaucucagccuaccaugagaauaagagaaagaaaaugaagaucaauagcuuauucaucucuuuuucuuuuucguugguguaaagccaacacccugucuaaaaaacauaaauuucuuuaaucauuuugccucuuuucucugugcuucaauuaauaaaaaauggaaagaaccuagaucuaaaaaaaaaaaaaaaaaaaaaaaaaaaaaaaaaaaaaaaaaaaaaaaaaaaaaaaaaaaaaaaaugcaucccccccccccccccccccccccccccccccaaaggcucuuuucagagccaccagaauu

SEQ ID NO: 5311 - RNA, 1927 nt, Artificial Sequence
  mRNA product Design i-2 comprising derived and/or modified sequence from HRSV(A2)__F-del_DSCav1_mut4 (opt1)
ggggcgcugccuacggagguggcagccaucuccuucucggcaucaagcuuaccauggagcugcucauccugaaggccaacgccaucaccaccauccugacggcggugaccuucugcuucgccagcggccagaacaucaccgaggaguucuaccaguccacgugcagcgccgucuccaagggguaccucagcgcccugcgcaccggcugguacaccuccgugaucaccaucgagcugagcaacaucaaggagaacaagugcaacgggaccgacgccaaggugaagcucaucaagcaggagcuggacaaguacaagaacgcggucacggagcugcagcuccugaugcaguccacccccgccaccggcagcggguccgccaucugcagcggcguggccgugugcaagguccugcaccucgagggcgaggugaacaagaucaaguccgcgcugcugagcaccaacaaggccguggucucccucagcaacgggguguccgugcugacguucaagguccuggaccucaagaacuacaucgacaagcagcugcugccgauccucaacaagcagagcugcuccaucagcaacaucgagaccgugaucgaguuccagcagaagaacaaccggcugcuggagaucacccgcgaguucuccgugaacgccggcgucaccacgcccgugagcaccuacaugcucaccaacagcgagcugcugucccucaucaacgacaugcccaucaccaacgaccagaagaagcugaugagcaacaacgugcagaucguccggcagcaguccuacagcaucaugugcaucaucaaggaggaggugcuggccuacgugguccagcucccccuguacggggugaucgacacgccgugcuggaagcugcacaccagcccccucugcaccaccaacacgaaggagggcuccaacaucugccugacccgcaccgaccgggggugguacugcgacaacgccggcuccgugagcuucuucccccaggcggagaccugcaagguccaguccaaccgcguguucugcgacacgaugaacagccggacccuccccuccgaggucaaccugugcaacguggacaucuucaacccgaaguacgacugcaagaucaugaccagcaagaccgacguguccagcuccgucaucacgagccugggcgccaucguguccugcuacgggaagaccaagugcaccgccagcaacaagaaccggggcaucaucaagaccuucuccaacgggugcgacuacgugagcaacaagggcgucgacacggugagcgugggcaacacccucuacugcgucaacaagcaggaggggaagucccuguacgugaagggcgagcccaucaucaacuucuacgacccccugguguuccccagcgacgaguucgacgccuccaucagccaggucaacgagaagaucaaccagucccucgccuucauccgcaagagcgacgagcugcugcacaacgugaacgcggggaaguccaccaccaacaucaugaucaccacgaucaucaucgugaucaucgucauccuccugagccugaucgccgugggccuccugcuguacugcaaggcccggugaggacuagugcaucacauuuaaaagcaucucagccuaccaugagaauaagagaaagaaaaugaagaucaauagcuuauucaucucuuuuucuuuuucguugguguaaagccaacacccugucuaaaaaacauaaauuucuuuaaucauuuugccucuuuucucugugcuucaauuaauaaaaaauggaaagaaccuagaucuaaaaaaaaaaaaaaaaaaaaaaaaaaaaaaaaaaaaaaaaaaaaaaaaaaaaaaaaaaaaaaaaugcaucccccccccccccccccccccccccccccccaaaggcucuuuucagagccaccagaauu

SEQ ID NO: 5312 - RNA, 1927 nt, Artificial Sequence
  mRNA product Design i-2 comprising derived and/or modified sequence from HRSV(A2)__F-del_DSCav1_mut4 (opt2)
ggggcgcugccuacggagguggcagccaucuccuucucggcaucaagcuuaccauggagcuccucauccucaaggccaacgccaucaccaccauccucaccgccgucaccuucugcuucgccuccggccagaacaucaccgaggaguucuaccaguccaccugcuccgccgucuccaagggcuaccucuccgcccuccgcaccggcugguacaccuccgucaucaccaucgagcucuccaacaucaaggagaacaagugcaacggcaccgacgccaaggucaagcucaucaagcaggagcucgacaaguacaagaacgccgucaccgagcuccagcuccucaugcaguccacccccgccaccggcuccggcuccgccaucugcuccggcgucgccgucugcaagguccuccaccucgagggcgaggucaacaagaucaaguccgcccuccucuccaccaacaaggccgucgucucccucuccaacggcgucuccguccucaccuucaagguccucgaccucaagaacuacaucgacaagcagcuccuccccauccucaacaagcaguccugcuccaucuccaacaucgagaccgucaucgaguuccagcagaagaacaaccgccuccucgagaucacccgcgaguucuccgucaacgccggcgucaccacccccgucuccaccuacaugcucaccaacuccgagcuccucucccucaucaacgacaugcccaucaccaacgaccagaagaagcucauguccaacaacguccagaucguccgccagcaguccuacuccaucaugugcaucaucaaggaggagguccucgccuacgucguccagcucccccucuacggcgucaucgacacccccugcuggaagcuccacaccuccccccucugcaccaccaacaccaaggagggcuccaacaucugccucacccgcaccgaccgcggcugguacugcgacaacgccggcuccgucuccuucuucccccaggccgagaccugcaagguccaguccaaccgcgucuucugcgacaccaugaacucccgcacccuccccuccgaggucaaccucugcaacgucgacaucuucaaccccaaguacgacugcaagaucaugaccuccaagaccgacgucuccuccuccgucaucaccucccucggcgccaucgucuccugcuacggcaagaccaagugcaccgccuccaacaagaaccgcggcaucaucaagaccuucuccaacggcugcgacuacgucuccaacaagggcgucgacaccgucuccgucggcaacacccucuacugcgucaacaagcaggagggcaagucccucuacgucaagggcgagcccaucaucaacuucuacgacccccucgucuuccccuccgacgaguucgacgccuccaucucccaggucaacgagaagaucaaccagucccucgccuucauccgcaaguccgacgagcuccuccacaacgucaacgccggcaaguccaccaccaacaucaugaucaccaccaucaucaucgucaucaucgucauccuccucucccucaucgccgucggccuccuccucuacugcaaggcccgcugaggacuagugcaucacauuuaaaagcaucucagccuaccaugagaauaagagaaagaaaaugaagaucaauagcuuauucaucucuuuuucuuuuucguugguguaaagccaacacccugucuaaaaaacauaaauuucuuuaaucauuuugccucuuuucucugugcuucaauuaauaaaaaauggaaagaaccuagaucuaaaaaaaaaaaaaaaaaaaaaaaaaaaaaaaaaaaaaaaaaaaaaaaaaaaaaaaaaaaaaaaaugcaucccccccccccccccccccccccccccccccaaaggcucuuuucagagccaccagaauu

SEQ ID NO: 5313 - RNA, 1927 nt, Artificial Sequence
  mRNA product Design i-2 comprising derived and/or modified sequence from HRSV(A2)__F-del_DSCav1_mut4 (opt3)
ggggcgcugccuacggagguggcagccaucuccuucucggcaucaagcuuaccauggagcugcucauccuuaaggccaacgcuauuaccacaauacugacugcagugacguucugcuuugccagcggccagaauaucaccgaagaguucuaccaauccacauguucugcggucucaaaaggguauuugagugcuuuaagaacuggaugguacaccagcguuauuacaaucgaacuguccaacauuaaggagaauaaaugcaacgguaccgacgccaaggugaaacuaaucaagcaggaacucgauaaguauaaaaaugcaguaacugagcugcagcuucugaugcagucuacacccgccaccggcucggggucagcuauauguagcggaguggcagucugcaagguguugcaccucgagggcgaaguuaacaaaaucaagagugcccugcuguccacgaauaaagcuguggucucucucagcaacgguguguccguauuaacuuuuaagguucuggaccuuaagaauuacauugauaaacaauugcugccuauccuaaacaagcagucauguaguauuagcaauaucgagaccgugauagaguuccagcagaaaaacaauaggcuccuggaaauuacacgggaguuuucugucaacgccggggugacuaccccaguguccacauauaugcuuaccaauucagaacuguugagccucaucaacgacaugccgauuacgaacgaucaaaagaaacugaugaguaauaacguccagaucguucgccagcagucuuacuccaucaugugcauuauaaaggaggaaguguuagcguauguagugcaacugccccucuacggagucaucgacacuccuuguuggaaacuucauacaagcccacugugcaccacuaauacaaaggagggcucgaacauuuguuugacccgaacggaucguggcugguacugcgacaaugcagggucuguguccuucuuuccccaggccgaaaccuguaagguucagucaaacagaguguucugcgauacaaugaauaguagaacucugccuagcgaggucaaccucugcaauguggacaucuuuaacccaaaauaugauuguaagauaaugaccuccaaaacagacguaucuagcucaguuauuaccagucugggagcuaucguguccugcuacgguaagacuaaauguacagccagcaauaagaacaggggcaucauuaagaccuucucuaaugggugcgauuaugucucaaacaaaggaguggacacugucagugugggcaauacgcuuuacuguguuaacaagcaagaggguaaaagccuguaugugaagggggaacccaucauuaacuuuuacgacccuuugguauucccauccgaugaguuugacgcaucuauaucgcaggucaaugagaaaaucaaccagagccucgcuuucauucggaaguccgaugaacuguuacacaaugugaacgccggaaagucaacaaccaauaucaugaucacuaccauuauaaucguuauuaucgugauucugcuaagucucaucgcggucggccugcuuuuguauugcaaagcccgcugaggacuagugcaucacauuuaaaagcaucucagccuaccaugagaauaagagaaagaaaaugaagaucaauagcuuauucaucucuuuuucuuuuucguugguguaaagccaacacccugucuaaaaaacauaaauuucuuuaaucauuuugccucuuuucucugugcuucaauuaauaaaaaauggaaagaaccuagaucuaaaaaaaaaaaaaaaaaaaaaaaaaaaaaaaaaaaaaaaaaaaaaaaaaaaaaaaaaaaaaaaaugcaucccccccccccccccccccccccccccccccaaaggcucuuuucagagccaccagaauu

SEQ ID NO: 5314 - RNA, 1927 nt, Artificial Sequence
  mRNA product Design i-2 comprising derived and/or modified sequence from HRSV(A2)__F-del_DSCav1_mut4 (opt4)
ggggcgcugccuacggagguggcagccaucuccuucucggcaucaagcuuaccauggagcugcugauccugaaggccaacgccaucaccaccauccugaccgccgugaccuucugcuucgccagcggccagaacaucaccgaggaguucuaccagagcaccugcagcgccgugagcaagggcuaccugagcgcccugagaaccggcugguacaccagcgugaucaccaucgagcugagcaacaucaaggagaacaagugcaacggcaccgacgccaaggugaagcugaucaagcaggagcuggacaaguacaagaacgccgugaccgagcugcagcugcugaugcagagcacccccgccaccggcagcggcagcgccaucugcagcggcguggccgugugcaaggugcugcaccuggagggcgaggugaacaagaucaagagcgcccugcugagcaccaacaaggccguggugagccugagcaacggcgugagcgugcugaccuucaaggugcuggaccugaagaacuacaucgacaagcagcugcugcccauccugaacaagcagagcugcagcaucagcaacaucgagaccgugaucgaguuccagcagaagaacaacagacugcuggagaucaccagagaguucagcgugaacgccggcgugaccacccccgugagcaccuacaugcugaccaacagcgagcugcugagccugaucaacgacaugcccaucaccaacgaccagaagaagcugaugagcaacaacgugcagaucgugagacagcagagcuacagcaucaugugcaucaucaaggaggaggugcuggccuacguggugcagcugccccuguacggcgugaucgacacccccugcuggaagcugcacaccagcccccugugcaccaccaacaccaaggagggcagcaacaucugccugaccagaaccgacagaggcugguacugcgacaacgccggcagcgugagcuucuucccccaggccgagaccugcaaggugcagagcaacagaguguucugcgacaccaugaacagcagaacccugcccagcgaggugaaccugugcaacguggacaucuucaaccccaaguacgacugcaagaucaugaccagcaagaccgacgugagcagcagcgugaucaccagccugggcgccaucgugagcugcuacggcaagaccaagugcaccgccagcaacaagaacagaggcaucaucaagaccuucagcaacggcugcgacuacgugagcaacaagggcguggacaccgugagcgugggcaacacccuguacugcgugaacaagcaggagggcaagagccuguacgugaagggcgagcccaucaucaacuucuacgacccccugguguuccccagcgacgaguucgacgccagcaucagccaggugaacgagaagaucaaccagagccuggccuucaucagaaagagcgacgagcugcugcacaacgugaacgccggcaagagcaccaccaacaucaugaucaccaccaucaucaucgugaucaucgugauccugcugagccugaucgccgugggccugcugcuguacugcaaggccagaugaggacuagugcaucacauuuaaaagcaucucagccuaccaugagaauaagagaaagaaaaugaagaucaauagcuuauucaucucuuuuucuuuuucguugguguaaagccaacacccugucuaaaaaacauaaauuucuuuaaucauuuugccucuuuucucugugcuucaauuaauaaaaaauggaaagaaccuagaucuaaaaaaaaaaaaaaaaaaaaaaaaaaaaaaaaaaaaaaaaaaaaaaaaaaaaaaaaaaaaaaaaugcaucccccccccccccccccccccccccccccccaaaggcucuuuucagagccaccagaauu

SEQ ID NO: 5315 - RNA, 1927 nt, Artificial Sequence
  mRNA product Design i-2 comprising derived and/or modified sequence from HRSV(A2)__F-del_DSCav1_mut4 (opt5)
ggggcgcugccuacggagguggcagccaucuccuucucggcaucaagcuuaccauggagcugcucauccugaaggccaacgcuauuaccacaauccuuacggccgugaccuucugcuuugcgagcggccagaauauuacagaagaguucuaccaauccaccuguucugcugucagcaaaggguaucuguccgcccucagaacaggaugguacaccucuguuaucacaauugaacugagcaacaucaaggagaauaaaugcaacggcaccgacgccaaggugaaacuuaucaagcaggaacuggauaaguauaaaaaugcugugacggagcuccagcugcugaugcaguccacccccgccacagggucuggaagcgcuauuuguuccggcgucgccgugugcaagguucuccaccuggagggggaagugaacaaaaucaagagcgcgcuucugucuaccaauaaagccgucgugucccucagcaacggaguuucugugcugacauuuaagguccuugaccugaagaauuacauugauaaacaacuccugccuauccugaacaagcaguccuguagcauuucuaauaucgagaccgugauugaguuccagcagaaaaacaaucggcuccuggaaaucacgcgcgaguuuuccgugaacgcuggcgucacaaccccgguuagcacauauaugcuuaccaauuccgaacugcucucucugaucaacgacaugcccauuaccaacgaucaaaagaaacuuaugagcaauaacgugcagaucgugagacagcaguccuacagcauuaugugcaucauuaaggaggaaguccuggccuaugugguucaacucccucuguacggcgugaucgacacacccuguuggaaacugcauacgucuccucucugcaccacaaauaccaaggagggguccaacaucugucugacacggaccgaucgcggaugguacugcgacaaugcuggcagcgucucuuucuuuccccaggccgaaacguguaaggugcagagcaacagaguuuucugcgauacaaugaacuccagaacccugccuucugaggugaaucucugcaaugucgacauuuuuaacccgaaauaugauuguaagaucaugaccagcaaaacagacguguccagcucugucauuaccucccugggggcgaucgugagcugcuacggaaagacaaaauguacggccucuaauaagaaccggggcauuaucaagaccuucuccaaugggugcgauuauguuagcaacaaaggaguggacacagucuccgugggcaauacccuuuacuguguuaacaagcaagagggcaaaucucuguaugugaagggggaacccaucauuaacuuuuacgacccucucgucuuccccagcgaugaguuugacgcuuccaucucucaggugaaugagaaaauuaaccagagccuggccuucauccgcaaguccgaugaacugcuccacaaugugaacgcuggaaagagcacaaccaauauuaugaucacgaccauuaucaucguuauuaucgucauucugcuuucucugaucgccgugggccuccugcuguauugcaaagccagaugaggacuagugcaucacauuuaaaagcaucucagccuaccaugagaauaagagaaagaaaaugaagaucaauagcuuauucaucucuuuuucuuuuucguugguguaaagccaacacccugucuaaaaaacauaaauuucuuuaaucauuuugccucuuuucucugugcuucaauuaauaaaaaauggaaagaaccuagaucuaaaaaaaaaaaaaaaaaaaaaaaaaaaaaaaaaaaaaaaaaaaaaaaaaaaaaaaaaaaaaaaaugcaucccccccccccccccccccccccccccccccaaaggcucuuuucagagccaccagaauu

SEQ ID NO: 5316 - RNA, 1927 nt, Artificial Sequence
  mRNA product Design i-2 comprising derived and/or modified sequence from HRSV(A2)__F-del_DSCav1_mut4 (opt6)
ggggcgcugccuacggagguggcagccaucuccuucucggcaucaagcuuaccauggaacuuuuaauacuaaaagcuaacgccauaaccacuauacuaacagcagucacauucugcuucgcaucaggccaaaacauaaccgaagaauuuuaccaauccacuuguucagcagucuccaaaggauauuuauccgcacuucguacaggaugguauacaucaguaauaacaauagaacucuccaacauaaaagaaaauaaaugcaacggcaccgacgcaaaaguaaaacucaucaaacaagaauuagacaaauacaagaacgccguaacagaacuacaauuacuaaugcaaucaacacccgccacaggaucaggaucugcaauaugcucuggaguagcaguaugcaaaguauuacaccuagaaggagaaguaaacaaaaucaaaagcgcacuacuauccacaaacaaagcuguaguaucacuaucaaacggaguaucaguauuaacuuucaaaguacuugaucuaaaaaacuacauagacaaacaacuacuacccauauuaaacaaacaaucaugcucaauaagcaauauagaaacaguaauagaauuucaacaaaaaaacaacagacuacuagaaaucacaagggaauuuucaguaaaugccgguguuacaaccccaguaucaacauacaugcuaacuaacucagaacuacuauccuuaauaaacgauaugccaauaacaaacgaucaaaaaaaacuaauguccaacaacguacaaauaguaagacaacaaucauacucaaucaugugcauuauaaaagaagaagucuuagcauacguaguacaauuaccacuauacgguguaauagauacaccauguuggaaauuacacacaagcccacuaugcacaacuaacacaaaagaaggcucaaauauauguuuaacaagaacagaccgagguugguacugcgacaaugcaggaucaguaucauucuuuccacaagcagaaacauguaaaguucaauccaacagaguauucugcgacacaaugaacuccagaacacuaccuucagaaguaaaccucuguaacguagacauauuuaaucccaaguacgacugcaaaauaaugacaucgaaaacagacguaagcuccucagugauaacaucccucggcgccaucguauccuguuacgguaaaacuaaauguaccgccucaaacaaaaaccgcgguauuauaaaaacuuuuucuaauggcugcgauuacguaagcaacaaaggcgucgacacaguuuccguaggaaacacacuauacugcguaaacaaacaagaagguaaaucucuauacguaaaaggagaaccaauaauaaauuucuaugauccuuuaguauucccauccgaugaauuugacgccucuaucucacaagucaacgaaaaaauaaaucaaucauuagcauucauacgaaaaucagacgaacuacuacacaacguaaacgcaggaaaaucaacaaccaacauaaugauaaccacaauaauaauaguuauuauagugauacuauuauccuuaauugcagucggacuauuauuauacuguaaagcacgcuaaggacuagugcaucacauuuaaaagcaucucagccuaccaugagaauaagagaaagaaaaugaagaucaauagcuuauucaucucuuuuucuuuuucguugguguaaagccaacacccugucuaaaaaacauaaauuucuuuaaucauuuugccucuuuucucugugcuucaauuaauaaaaaauggaaagaaccuagaucuaaaaaaaaaaaaaaaaaaaaaaaaaaaaaaaaaaaaaaaaaaaaaaaaaaaaaaaaaaaaaaaaugcaucccccccccccccccccccccccccccccccaaaggcucuuuucagagccaccagaauu

SEQ ID NO: 5317 - RNA, 1927 nt, Artificial Sequence
  mRNA product Design i-2 comprising derived and/or modified sequence from HRSV(A2)__F-del_DSCav1_mut4 (opt11)
ggggcgcugccuacggagguggcagccaucuccuucucggcaucaagcuuaccauggaacuccucauccucaaagccaaugccaucaccacaauccugacagcaguaaccuucugcuucgcauccggacaaaacaucaccgaagaauuuuaccagucaaccugcuccgcugucucaaaaggcuaccucucagcccuucgcaccggcugguacaccucggucauaacaauagaacucuccaauaucaaagaaaacaaaugcaacggcacugacgccaagguaaaacucaucaaacaggaacucgauaaauacaagaacgccguaacagaacuacaacuacucaugcaaucaacaccggccaccggcuccgguuccgccauaugcuccggaguggccgugugcaagguccuccaccuugaaggggaaguuaacaaaaucaaaucagcccuccucuccacuaacaaagccguaguaucccuaagcaacgguguauccguccucaccuucaaaguacuagaccuaaagaauuauaucgacaaacaacuccuccccauacucaacaaacaauccugcuccauaagcaacaucgaaacagucaucgaguuccagcagaaaaacaaccgacuccucgaaauaacccgcgaguucucagucaacgccggagucaccacacccgucagcaccuacaugcugaccaacuccgaacuccucuccuuaaucaaugacaugcccaucaccaaugaccaaaagaaacucaugucaaacaacguccaaauaguacgccaacaauccuacuccaucaugugcaucauaaaagaagaaguacucgccuacgucguccaacucccccucuacggcguaaucgacacccccugcuggaaacuacacacaagcccccucugcaccacaaacacuaaagagggcuccaacaucugucuaacccgcaccgaucgaggcugguacugcgacaacgccggaucugucucauucuucccccaagccgaaaccugcaaaguccaauccaaccgcgucuucugcgacaccaugaacucgagaacccucccuuccgaagucaaccuaugcaacgucgacauuuucaaccccaaauacgacugcaaaaucaugaccucgaaaaccgacguaucauccagcgucaucaccagccuaggcgcaaucgugagcugcuacggcaaaaccaaaugcaccgcgagcaauaaaaaccgcgggaucaucaaaacuuucuccaacggcugcgacuacgucuccaacaagggagucgauaccgucuccguaggcaacacccucuacugcgucaacaaacaagaaggcaaaucacuauacguaaaaggcgagccaaucauaaacuucuacgacccucuaguuuucccauccgacgaguucgacgcuagcaucucccaagucaacgagaaaaucaaccaaucccucgcauucauccgcaaauccgacgaacuccuccacaacguaaacgcaggcaaaucaacuacuaauauaaugaucacaaccaucauaauagucauaaucguaauccuccuaucccucaucgccgucggacuacugcucuacugcaaagcccgcuaaggacuagugcaucacauuuaaaagcaucucagccuaccaugagaauaagagaaagaaaaugaagaucaauagcuuauucaucucuuuuucuuuuucguugguguaaagccaacacccugucuaaaaaacauaaauuucuuuaaucauuuugccucuuuucucugugcuucaauuaauaaaaaauggaaagaaccuagaucuaaaaaaaaaaaaaaaaaaaaaaaaaaaaaaaaaaaaaaaaaaaaaaaaaaaaaaaaaaaaaaaaugcaucccccccccccccccccccccccccccccccaaaggcucuuuucagagccaccagaauu

SEQ ID NO: 5318 - RNA, 1762 nt, Artificial Sequence
  mRNA product Design i-3 comprising derived and/or modified sequence from HRSV(A2)__F-del_DSCav1_mut4 (opt1) R7459
gggagaaagcuuaccauggagcugcucauccugaaggccaacgccaucaccaccauccugacggcggugaccuucugcuucgccagcggccagaacaucaccgaggaguucuaccaguccacgugcagcgccgucuccaagggguaccucagcgcccugcggaccggcugguacaccuccgugaucaccaucgagcugagcaacaucaaggagaacaagugcaacgggaccgacgccaaggugaagcucaucaagcaggagcuggacaaguacaagaacgcggucacggagcugcagcuccugaugcaguccaccccggcaaccggcuccggcuccgccaucugcagcggcgucgccgugugcaaggugcugcaccucgagggggaggucaacaagaucaagagcgcccugcuguccaccaacaaggccguggugagccucuccaacggcgucagcgugcugaccuucaaggugcuggaccucaagaacuacaucgacaagcagcugcugcccauccugaacaagcagagcugcuccaucagcaacaucgagacggugaucgaguuccagcagaagaacaaccggcuccuggagaucacccgcgaguucagcgugaacgccggggucaccacccccguguccacguacaugcugaccaacagcgagcuccugucccugaucaacgacaugccgaucaccaacgaccagaagaagcucaugagcaacaacgugcagaucguccggcagcaguccuacagcaucaugugcaucaucaaggaggaggugcuggcguacgugguccagcugccccucuacggcgugaucgacacccccugcuggaagcugcacacgagcccccugugcaccaccaacaccaaggagggguccaacaucugccucacgcgcaccgaccggggcugguacugcgacaacgccggcagcgucuccuucuucccgcaggccgagaccugcaaggugcagagcaaccgcguguucugcgacaccaugaacucccggacgcugcccagcgagguaaaccucugcaacgucgacaucuucaaccccaaguacgacugcaagaucaugaccuccaagaccgacgugagcuccagcgugaucaccucccugggggccaucgucagcugcuacggcaagacgaagugcaccgccagcaacaagaaccgggggaucaucaagaccuucuccaacggcugcgacuacgugagcaacaagggcguggacaccguguccgucgggaacacccuguacugcgugaacaagcaggagggcaagagccucuacgugaagggggagcccaucaucaacuucuacgacccgcuggucuuccccuccgacgaguucgacgcgagcaucucccaggugaacgagaagaucaaccagagccuggccuucauccgcaaguccgacgagcugcuccacaacgugaacgccggcaagagcacgaccaacaucaugaucaccaccaucaucaucgucaucaucgugauccugcugucccucaucgccguggggcugcugcucuacugcaaggcccggugaggacuaguuauaagacugacuagcccgaugggccucccaacgggcccuccuccccuccuugcaccgagauuaauaaaaaaaaaaaaaaaaaaaaaaaaaaaaaaaaaaaaaaaaaaaaaaaaaaaaaaaaaaaaaaaaugcaucccccccccccccccccccccccccccccccaaaggcucuuuucagagccaccagaauu

SEQ ID NO: 5319 - RNA, 1762 nt, Artificial Sequence
  mRNA product Design i-3 comprising derived and/or modified sequence from HRSV(A2)__F-del_DSCav1_mut4 (opt1)
gggagaaagcuuaccauggagcugcucauccugaaggccaacgccaucaccaccauccugacggcggugaccuucugcuucgccagcggccagaacaucaccgaggaguucuaccaguccacgugcagcgccgucuccaagggguaccucagcgcccugcgcaccggcugguacaccuccgugaucaccaucgagcugagcaacaucaaggagaacaagugcaacgggaccgacgccaaggugaagcucaucaagcaggagcuggacaaguacaagaacgcggucacggagcugcagcuccugaugcaguccacccccgccaccggcagcggguccgccaucugcagcggcguggccgugugcaagguccugcaccucgagggcgaggugaacaagaucaaguccgcgcugcugagcaccaacaaggccguggucucccucagcaacgggguguccgugcugacguucaagguccuggaccucaagaacuacaucgacaagcagcugcugccgauccucaacaagcagagcugcuccaucagcaacaucgagaccgugaucgaguuccagcagaagaacaaccggcugcuggagaucacccgcgaguucuccgugaacgccggcgucaccacgcccgugagcaccuacaugcucaccaacagcgagcugcugucccucaucaacgacaugcccaucaccaacgaccagaagaagcugaugagcaacaacgugcagaucguccggcagcaguccuacagcaucaugugcaucaucaaggaggaggugcuggccuacgugguccagcucccccuguacggggugaucgacacgccgugcuggaagcugcacaccagcccccucugcaccaccaacacgaaggagggcuccaacaucugccugacccgcaccgaccgggggugguacugcgacaacgccggcuccgugagcuucuucccccaggcggagaccugcaagguccaguccaaccgcguguucugcgacacgaugaacagccggacccuccccuccgaggucaaccugugcaacguggacaucuucaacccgaaguacgacugcaagaucaugaccagcaagaccgacguguccagcuccgucaucacgagccugggcgccaucguguccugcuacgggaagaccaagugcaccgccagcaacaagaaccggggcaucaucaagaccuucuccaacgggugcgacuacgugagcaacaagggcgucgacacggugagcgugggcaacacccucuacugcgucaacaagcaggaggggaagucccuguacgugaagggcgagcccaucaucaacuucuacgacccccugguguuccccagcgacgaguucgacgccuccaucagccaggucaacgagaagaucaaccagucccucgccuucauccgcaagagcgacgagcugcugcacaacgugaacgcggggaaguccaccaccaacaucaugaucaccacgaucaucaucgugaucaucgucauccuccugagccugaucgccgugggccuccugcuguacugcaaggcccggugaggacuaguuauaagacugacuagcccgaugggccucccaacgggcccuccuccccuccuugcaccgagauuaauaaaaaaaaaaaaaaaaaaaaaaaaaaaaaaaaaaaaaaaaaaaaaaaaaaaaaaaaaaaaaaaaugcaucccccccccccccccccccccccccccccccaaaggcucuuuucagagccaccagaauu

SEQ ID NO: 5320 - RNA, 1762 nt, Artificial Sequence
  mRNA product Design i-3 comprising derived and/or modified sequence from HRSV(A2)__F-del_DSCav1_mut4 (opt2)
gggagaaagcuuaccauggagcuccucauccucaaggccaacgccaucaccaccauccucaccgccgucaccuucugcuucgccuccggccagaacaucaccgaggaguucuaccaguccaccugcuccgccgucuccaagggcuaccucuccgcccuccgcaccggcugguacaccuccgucaucaccaucgagcucuccaacaucaaggagaacaagugcaacggcaccgacgccaaggucaagcucaucaagcaggagcucgacaaguacaagaacgccgucaccgagcuccagcuccucaugcaguccacccccgccaccggcuccggcuccgccaucugcuccggcgucgccgucugcaagguccuccaccucgagggcgaggucaacaagaucaaguccgcccuccucuccaccaacaaggccgucgucucccucuccaacggcgucuccguccucaccuucaagguccucgaccucaagaacuacaucgacaagcagcuccuccccauccucaacaagcaguccugcuccaucuccaacaucgagaccgucaucgaguuccagcagaagaacaaccgccuccucgagaucacccgcgaguucuccgucaacgccggcgucaccacccccgucuccaccuacaugcucaccaacuccgagcuccucucccucaucaacgacaugcccaucaccaacgaccagaagaagcucauguccaacaacguccagaucguccgccagcaguccuacuccaucaugugcaucaucaaggaggagguccucgccuacgucguccagcucccccucuacggcgucaucgacacccccugcuggaagcuccacaccuccccccucugcaccaccaacaccaaggagggcuccaacaucugccucacccgcaccgaccgcggcugguacugcgacaacgccggcuccgucuccuucuucccccaggccgagaccugcaagguccaguccaaccgcgucuucugcgacaccaugaacucccgcacccuccccuccgaggucaaccucugcaacgucgacaucuucaaccccaaguacgacugcaagaucaugaccuccaagaccgacgucuccuccuccgucaucaccucccucggcgccaucgucuccugcuacggcaagaccaagugcaccgccuccaacaagaaccgcggcaucaucaagaccuucuccaacggcugcgacuacgucuccaacaagggcgucgacaccgucuccgucggcaacacccucuacugcgucaacaagcaggagggcaagucccucuacgucaagggcgagcccaucaucaacuucuacgacccccucgucuuccccuccgacgaguucgacgccuccaucucccaggucaacgagaagaucaaccagucccucgccuucauccgcaaguccgacgagcuccuccacaacgucaacgccggcaaguccaccaccaacaucaugaucaccaccaucaucaucgucaucaucgucauccuccucucccucaucgccgucggccuccuccucuacugcaaggcccgcugaggacuaguuauaagacugacuagcccgaugggccucccaacgggcccuccuccccuccuugcaccgagauuaauaaaaaaaaaaaaaaaaaaaaaaaaaaaaaaaaaaaaaaaaaaaaaaaaaaaaaaaaaaaaaaaaugcaucccccccccccccccccccccccccccccccaaaggcucuuuucagagccaccagaauu

SEQ ID NO: 5321 - RNA, 1762 nt, Artificial Sequence
  mRNA product Design i-3 comprising derived and/or modified sequence from HRSV(A2)__F-del_DSCav1_mut4 (opt3)
gggagaaagcuuaccauggagcugcucauccuuaaggccaacgcuauuaccacaauacugacugcagugacguucugcuuugccagcggccagaauaucaccgaagaguucuaccaauccacauguucugcggucucaaaaggguauuugagugcuuuaagaacuggaugguacaccagcguuauuacaaucgaacuguccaacauuaaggagaauaaaugcaacgguaccgacgccaaggugaaacuaaucaagcaggaacucgauaaguauaaaaaugcaguaacugagcugcagcuucugaugcagucuacacccgccaccggcucggggucagcuauauguagcggaguggcagucugcaagguguugcaccucgagggcgaaguuaacaaaaucaagagugcccugcuguccacgaauaaagcuguggucucucucagcaacgguguguccguauuaacuuuuaagguucuggaccuuaagaauuacauugauaaacaauugcugccuauccuaaacaagcagucauguaguauuagcaauaucgagaccgugauagaguuccagcagaaaaacaauaggcuccuggaaauuacacgggaguuuucugucaacgccggggugacuaccccaguguccacauauaugcuuaccaauucagaacuguugagccucaucaacgacaugccgauuacgaacgaucaaaagaaacugaugaguaauaacguccagaucguucgccagcagucuuacuccaucaugugcauuauaaaggaggaaguguuagcguauguagugcaacugccccucuacggagucaucgacacuccuuguuggaaacuucauacaagcccacugugcaccacuaauacaaaggagggcucgaacauuuguuugacccgaacggaucguggcugguacugcgacaaugcagggucuguguccuucuuuccccaggccgaaaccuguaagguucagucaaacagaguguucugcgauacaaugaauaguagaacucugccuagcgaggucaaccucugcaauguggacaucuuuaacccaaaauaugauuguaagauaaugaccuccaaaacagacguaucuagcucaguuauuaccagucugggagcuaucguguccugcuacgguaagacuaaauguacagccagcaauaagaacaggggcaucauuaagaccuucucuaaugggugcgauuaugucucaaacaaaggaguggacacugucagugugggcaauacgcuuuacuguguuaacaagcaagaggguaaaagccuguaugugaagggggaacccaucauuaacuuuuacgacccuuugguauucccauccgaugaguuugacgcaucuauaucgcaggucaaugagaaaaucaaccagagccucgcuuucauucggaaguccgaugaacuguuacacaaugugaacgccggaaagucaacaaccaauaucaugaucacuaccauuauaaucguuauuaucgugauucugcuaagucucaucgcggucggccugcuuuuguauugcaaagcccgcugaggacuaguuauaagacugacuagcccgaugggccucccaacgggcccuccuccccuccuugcaccgagauuaauaaaaaaaaaaaaaaaaaaaaaaaaaaaaaaaaaaaaaaaaaaaaaaaaaaaaaaaaaaaaaaaaugcaucccccccccccccccccccccccccccccccaaaggcucuuuucagagccaccagaauu

SEQ ID NO: 5322 - RNA, 1762 nt, Artificial Sequence
  mRNA product Design i-3 comprising derived and/or modified sequence from HRSV(A2)__F-del_DSCav1_mut4 (opt4)
gggagaaagcuuaccauggagcugcugauccugaaggccaacgccaucaccaccauccugaccgccgugaccuucugcuucgccagcggccagaacaucaccgaggaguucuaccagagcaccugcagcgccgugagcaagggcuaccugagcgcccugagaaccggcugguacaccagcgugaucaccaucgagcugagcaacaucaaggagaacaagugcaacggcaccgacgccaaggugaagcugaucaagcaggagcuggacaaguacaagaacgccgugaccgagcugcagcugcugaugcagagcacccccgccaccggcagcggcagcgccaucugcagcggcguggccgugugcaaggugcugcaccuggagggcgaggugaacaagaucaagagcgcccugcugagcaccaacaaggccguggugagccugagcaacggcgugagcgugcugaccuucaaggugcuggaccugaagaacuacaucgacaagcagcugcugcccauccugaacaagcagagcugcagcaucagcaacaucgagaccgugaucgaguuccagcagaagaacaacagacugcuggagaucaccagagaguucagcgugaacgccggcgugaccacccccgugagcaccuacaugcugaccaacagcgagcugcugagccugaucaacgacaugcccaucaccaacgaccagaagaagcugaugagcaacaacgugcagaucgugagacagcagagcuacagcaucaugugcaucaucaaggaggaggugcuggccuacguggugcagcugccccuguacggcgugaucgacacccccugcuggaagcugcacaccagcccccugugcaccaccaacaccaaggagggcagcaacaucugccugaccagaaccgacagaggcugguacugcgacaacgccggcagcgugagcuucuucccccaggccgagaccugcaaggugcagagcaacagaguguucugcgacaccaugaacagcagaacccugcccagcgaggugaaccugugcaacguggacaucuucaaccccaaguacgacugcaagaucaugaccagcaagaccgacgugagcagcagcgugaucaccagccugggcgccaucgugagcugcuacggcaagaccaagugcaccgccagcaacaagaacagaggcaucaucaagaccuucagcaacggcugcgacuacgugagcaacaagggcguggacaccgugagcgugggcaacacccuguacugcgugaacaagcaggagggcaagagccuguacgugaagggcgagcccaucaucaacuucuacgacccccugguguuccccagcgacgaguucgacgccagcaucagccaggugaacgagaagaucaaccagagccuggccuucaucagaaagagcgacgagcugcugcacaacgugaacgccggcaagagcaccaccaacaucaugaucaccaccaucaucaucgugaucaucgugauccugcugagccugaucgccgugggccugcugcuguacugcaaggccagaugaggacuaguuauaagacugacuagcccgaugggccucccaacgggcccuccuccccuccuugcaccgagauuaauaaaaaaaaaaaaaaaaaaaaaaaaaaaaaaaaaaaaaaaaaaaaaaaaaaaaaaaaaaaaaaaaugcaucccccccccccccccccccccccccccccccaaaggcucuuuucagagccaccagaauu

SEQ ID NO: 5323 - RNA, 1762 nt, Artificial Sequence
  mRNA product Design i-3 comprising derived and/or modified sequence from HRSV(A2)__F-del_DSCav1_mut4 (opt5)
gggagaaagcuuaccauggagcugcucauccugaaggccaacgcuauuaccacaauccuuacggccgugaccuucugcuuugcgagcggccagaauauuacagaagaguucuaccaauccaccuguucugcugucagcaaaggguaucuguccgcccucagaacaggaugguacaccucuguuaucacaauugaacugagcaacaucaaggagaauaaaugcaacggcaccgacgccaaggugaaacuuaucaagcaggaacuggauaaguauaaaaaugcugugacggagcuccagcugcugaugcaguccacccccgccacagggucuggaagcgcuauuuguuccggcgucgccgugugcaagguucuccaccuggagggggaagugaacaaaaucaagagcgcgcuucugucuaccaauaaagccgucgugucccucagcaacggaguuucugugcugacauuuaagguccuugaccugaagaauuacauugauaaacaacuccugccuauccugaacaagcaguccuguagcauuucuaauaucgagaccgugauugaguuccagcagaaaaacaaucggcuccuggaaaucacgcgcgaguuuuccgugaacgcuggcgucacaaccccgguuagcacauauaugcuuaccaauuccgaacugcucucucugaucaacgacaugcccauuaccaacgaucaaaagaaacuuaugagcaauaacgugcagaucgugagacagcaguccuacagcauuaugugcaucauuaaggaggaaguccuggccuaugugguucaacucccucuguacggcgugaucgacacacccuguuggaaacugcauacgucuccucucugcaccacaaauaccaaggagggguccaacaucugucugacacggaccgaucgcggaugguacugcgacaaugcuggcagcgucucuuucuuuccccaggccgaaacguguaaggugcagagcaacagaguuuucugcgauacaaugaacuccagaacccugccuucugaggugaaucucugcaaugucgacauuuuuaacccgaaauaugauuguaagaucaugaccagcaaaacagacguguccagcucugucauuaccucccugggggcgaucgugagcugcuacggaaagacaaaauguacggccucuaauaagaaccggggcauuaucaagaccuucuccaaugggugcgauuauguuagcaacaaaggaguggacacagucuccgugggcaauacccuuuacuguguuaacaagcaagagggcaaaucucuguaugugaagggggaacccaucauuaacuuuuacgacccucucgucuuccccagcgaugaguuugacgcuuccaucucucaggugaaugagaaaauuaaccagagccuggccuucauccgcaaguccgaugaacugcuccacaaugugaacgcuggaaagagcacaaccaauauuaugaucacgaccauuaucaucguuauuaucgucauucugcuuucucugaucgccgugggccuccugcuguauugcaaagccagaugaggacuaguuauaagacugacuagcccgaugggccucccaacgggcccuccuccccuccuugcaccgagauuaauaaaaaaaaaaaaaaaaaaaaaaaaaaaaaaaaaaaaaaaaaaaaaaaaaaaaaaaaaaaaaaaaugcaucccccccccccccccccccccccccccccccaaaggcucuuuucagagccaccagaauu

SEQ ID NO: 5324 - RNA, 1762 nt, Artificial Sequence
  mRNA product Design i-3 comprising derived and/or modified sequence from HRSV(A2)__F-del_DSCav1_mut4 (opt6)
gggagaaagcuuaccauggaacuuuuaauacuaaaagcuaacgccauaaccacuauacuaacagcagucacauucugcuucgcaucaggccaaaacauaaccgaagaauuuuaccaauccacuuguucagcagucuccaaaggauauuuauccgcacuucguacaggaugguauacaucaguaauaacaauagaacucuccaacauaaaagaaaauaaaugcaacggcaccgacgcaaaaguaaaacucaucaaacaagaauuagacaaauacaagaacgccguaacagaacuacaauuacuaaugcaaucaacacccgccacaggaucaggaucugcaauaugcucuggaguagcaguaugcaaaguauuacaccuagaaggagaaguaaacaaaaucaaaagcgcacuacuauccacaaacaaagcuguaguaucacuaucaaacggaguaucaguauuaacuuucaaaguacuugaucuaaaaaacuacauagacaaacaacuacuacccauauuaaacaaacaaucaugcucaauaagcaauauagaaacaguaauagaauuucaacaaaaaaacaacagacuacuagaaaucacaagggaauuuucaguaaaugccgguguuacaaccccaguaucaacauacaugcuaacuaacucagaacuacuauccuuaauaaacgauaugccaauaacaaacgaucaaaaaaaacuaauguccaacaacguacaaauaguaagacaacaaucauacucaaucaugugcauuauaaaagaagaagucuuagcauacguaguacaauuaccacuauacgguguaauagauacaccauguuggaaauuacacacaagcccacuaugcacaacuaacacaaaagaaggcucaaauauauguuuaacaagaacagaccgagguugguacugcgacaaugcaggaucaguaucauucuuuccacaagcagaaacauguaaaguucaauccaacagaguauucugcgacacaaugaacuccagaacacuaccuucagaaguaaaccucuguaacguagacauauuuaaucccaaguacgacugcaaaauaaugacaucgaaaacagacguaagcuccucagugauaacaucccucggcgccaucguauccuguuacgguaaaacuaaauguaccgccucaaacaaaaaccgcgguauuauaaaaacuuuuucuaauggcugcgauuacguaagcaacaaaggcgucgacacaguuuccguaggaaacacacuauacugcguaaacaaacaagaagguaaaucucuauacguaaaaggagaaccaauaauaaauuucuaugauccuuuaguauucccauccgaugaauuugacgccucuaucucacaagucaacgaaaaaauaaaucaaucauuagcauucauacgaaaaucagacgaacuacuacacaacguaaacgcaggaaaaucaacaaccaacauaaugauaaccacaauaauaauaguuauuauagugauacuauuauccuuaauugcagucggacuauuauuauacuguaaagcacgcuaaggacuaguuauaagacugacuagcccgaugggccucccaacgggcccuccuccccuccuugcaccgagauuaauaaaaaaaaaaaaaaaaaaaaaaaaaaaaaaaaaaaaaaaaaaaaaaaaaaaaaaaaaaaaaaaaugcaucccccccccccccccccccccccccccccccaaaggcucuuuucagagccaccagaauu

SEQ ID NO: 5325 - RNA, 1762 nt, Artificial Sequence
  mRNA product Design i-3 comprising derived and/or modified sequence from HRSV(A2)__F-del_DSCav1_mut4 (opt11)
gggagaaagcuuaccauggaacuccucauccucaaagccaaugccaucaccacaauccugacagcaguaaccuucugcuucgcauccggacaaaacaucaccgaagaauuuuaccagucaaccugcuccgcugucucaaaaggcuaccucucagcccuucgcaccggcugguacaccucggucauaacaauagaacucuccaauaucaaagaaaacaaaugcaacggcacugacgccaagguaaaacucaucaaacaggaacucgauaaauacaagaacgccguaacagaacuacaacuacucaugcaaucaacaccggccaccggcuccgguuccgccauaugcuccggaguggccgugugcaagguccuccaccuugaaggggaaguuaacaaaaucaaaucagcccuccucuccacuaacaaagccguaguaucccuaagcaacgguguauccguccucaccuucaaaguacuagaccuaaagaauuauaucgacaaacaacuccuccccauacucaacaaacaauccugcuccauaagcaacaucgaaacagucaucgaguuccagcagaaaaacaaccgacuccucgaaauaacccgcgaguucucagucaacgccggagucaccacacccgucagcaccuacaugcugaccaacuccgaacuccucuccuuaaucaaugacaugcccaucaccaaugaccaaaagaaacucaugucaaacaacguccaaauaguacgccaacaauccuacuccaucaugugcaucauaaaagaagaaguacucgccuacgucguccaacucccccucuacggcguaaucgacacccccugcuggaaacuacacacaagcccccucugcaccacaaacacuaaagagggcuccaacaucugucuaacccgcaccgaucgaggcugguacugcgacaacgccggaucugucucauucuucccccaagccgaaaccugcaaaguccaauccaaccgcgucuucugcgacaccaugaacucgagaacccucccuuccgaagucaaccuaugcaacgucgacauuuucaaccccaaauacgacugcaaaaucaugaccucgaaaaccgacguaucauccagcgucaucaccagccuaggcgcaaucgugagcugcuacggcaaaaccaaaugcaccgcgagcaauaaaaaccgcgggaucaucaaaacuuucuccaacggcugcgacuacgucuccaacaagggagucgauaccgucuccguaggcaacacccucuacugcgucaacaaacaagaaggcaaaucacuauacguaaaaggcgagccaaucauaaacuucuacgacccucuaguuuucccauccgacgaguucgacgcuagcaucucccaagucaacgagaaaaucaaccaaucccucgcauucauccgcaaauccgacgaacuccuccacaacguaaacgcaggcaaaucaacuacuaauauaaugaucacaaccaucauaauagucauaaucguaauccuccuaucccucaucgccgucggacuacugcucuacugcaaagcccgcuaaggacuaguuauaagacugacuagcccgaugggccucccaacgggcccuccuccccuccuugcaccgagauuaauaaaaaaaaaaaaaaaaaaaaaaaaaaaaaaaaaaaaaaaaaaaaaaaaaaaaaaaaaaaaaaaaugcaucccccccccccccccccccccccccccccccaaaggcucuuuucagagccaccagaauu

SEQ ID NO: 5326 - protein, 536 aa, Artificial Sequence
  derived and/or modified protein sequence (artificial) from HRSV(A2)__F_DSCav1_mut5
MELLILKANAITTILTAVTFCFASGQNITEEFYQSTCSAVSKGYLSALRTGWYTSVITIELSNIKENKCNGTDAKVKLIKQELDKYKNAVTELQLLMQSTPATGSGSAIASGVAVCKVLHLEGEVNKIKSALLSTNKAVVSLSGCGVSVLTFKVLDLKNYIDKQLLPILNKQSCSISNIETVIEFQQKNNRLLEITREFSVNAGVTTPVSTYMLTNSELLSLINDMPITNDQKKLMSNNVQIVRQQSYSIMCIIKEEVLAYVVQLPLYGVIDTPCWKLHTSPLCTTNTKEGSNICLTRTDRGWYCDNAGSVSFFPQAETCKVQSNRVFCDTMNSRTLPSEVNLCNVDIFNPKYDCKIMTSKTDVSSSVITSLGAIVSCYGKTKCTASNKCRGIIKTFSNGCDYVSNKGVDTVSVGNTLYYVNKQEGKSLYVKGEPIINFYDPLVFPSDEFDASISQVNEKINQSLAFIRKSDELLHNVNAGKSTTNIMITTIIIVIIVILLSLIAVGLLLYCKARSTPVTLSKDQLSGINNIAFSN

SEQ ID NO: 5327 - RNA, 1611 nt, Artificial Sequence
  derived and/or modified CDS sequence (opt1) from HRSV(A2)__F_DSCav1_mut5
auggagcugcucauccugaaggccaacgccaucaccaccauccugacggcggugaccuucugcuucgccagcggccagaacaucaccgaggaguucuaccaguccacgugcagcgccgucuccaagggguaccucagcgcccugcggaccggcugguacaccuccgugaucaccaucgagcugagcaacaucaaggagaacaagugcaacgggaccgacgccaaggugaagcucaucaagcaggagcuggacaaguacaagaacgcggucacggagcugcagcuccugaugcaguccaccccggcaaccggcuccggcuccgccaucgcgagcggcgucgccgugugcaaggugcugcaccucgagggggaggucaacaagaucaagagcgcccugcuguccaccaacaaggccguggugagccucuccggcugcggcgucagcgugcugaccuucaaggugcuggaccucaagaacuacaucgacaagcagcugcugcccauccugaacaagcagagcugcuccaucagcaacaucgagacggugaucgaguuccagcagaagaacaaccggcuccuggagaucacccgcgaguucagcgugaacgccggggucaccacccccguguccacguacaugcugaccaacagcgagcuccugucccugaucaacgacaugccgaucaccaacgaccagaagaagcucaugagcaacaacgugcagaucguccggcagcaguccuacagcaucaugugcaucaucaaggaggaggugcuggcguacgugguccagcugccccucuacggcgugaucgacacccccugcuggaagcugcacacgagcccccugugcaccaccaacaccaaggagggguccaacaucugccucacgcgcaccgaccggggcugguacugcgacaacgccggcagcgucuccuucuucccgcaggccgagaccugcaaggugcagagcaaccgcguguucugcgacaccaugaacucccggacgcugcccagcgagguaaaccucugcaacgucgacaucuucaaccccaaguacgacugcaagaucaugaccuccaagaccgacgugagcuccagcgugaucaccucccugggggccaucgucagcugcuacggcaagacgaagugcaccgccagcaacaagugccgggggaucaucaagaccuucuccaacggcugcgacuacgugagcaacaagggcguggacaccguguccgucgggaacacccuguacuacgugaacaagcaggagggcaagagccucuacgugaagggggagcccaucaucaacuucuacgacccgcuggucuuccccuccgacgaguucgacgcgagcaucucccaggugaacgagaagaucaaccagagccuggccuucauccgcaaguccgacgagcugcuccacaacgugaacgccggcaagagcacgaccaacaucaugaucaccaccaucaucaucgucaucaucgugauccugcugucccucaucgccguggggcugcugcucuacugcaaggcccggagcacgcccgucacccuguccaaggaccagcugagcggcaucaacaacaucgcguucuccaacuga

SEQ ID NO: 5328 - RNA, 1611 nt, Artificial Sequence
  derived and/or modified CDS sequence (opt1) from HRSV(A2)__F_DSCav1_mut5
auggagcugcucauccugaaggccaacgccaucaccaccauccugacggcggugaccuucugcuucgccagcggccagaacaucaccgaggaguucuaccaguccacgugcagcgccgucuccaagggguaccucagcgcccugcgcaccggcugguacaccuccgugaucaccaucgagcugagcaacaucaaggagaacaagugcaacgggaccgacgccaaggugaagcucaucaagcaggagcuggacaaguacaagaacgcggucacggagcugcagcuccugaugcaguccacccccgccaccggcagcggguccgccaucgccagcggcguggcggugugcaagguccugcaccucgagggcgaggugaacaagaucaaguccgcccugcugagcaccaacaaggccguggucucccucagcgggugcggcguguccgugcugacguucaagguccuggaccucaagaacuacaucgacaagcagcugcugccgauccucaacaagcagagcugcuccaucagcaacaucgagaccgugaucgaguuccagcagaagaacaaccggcugcuggagaucacccgcgaguucuccgugaacgccggggucaccacgcccgugagcaccuacaugcucaccaacagcgagcugcugucccucaucaacgacaugcccaucaccaacgaccagaagaagcugaugagcaacaacgugcagaucguccggcagcaguccuacagcaucaugugcaucaucaaggaggaggugcuggccuacgugguccagcucccccuguacggcgugaucgacacgccgugcuggaagcugcacaccagcccccucugcaccaccaacacgaaggagggguccaacaucugccugacccgcaccgaccggggcugguacugcgacaacgcgggcuccgugagcuucuucccccaggccgagaccugcaagguccaguccaaccgcguguucugcgacacgaugaacagccggacccuccccuccgaggucaaccugugcaacguggacaucuucaacccgaaguacgacugcaagaucaugaccagcaagaccgacguguccagcuccgucaucacgagccugggggccaucguguccugcuacggcaagaccaagugcaccgccagcaacaagugccgggggaucaucaagaccuucuccaacggcugcgacuacgugagcaacaagggcgucgacacggugagcguggggaacacccucuacuacgucaacaagcaggagggcaagucccuguacgugaagggggagcccaucaucaacuucuacgacccccugguguuccccagcgacgaguucgacgccuccaucagccaggucaacgagaagaucaaccagucccucgcguucauccgcaagagcgacgagcugcugcacaacgugaacgccggcaaguccaccaccaacaucaugaucaccacgaucaucaucgugaucaucgucauccuccugagccugaucgccguggggcuccugcuguacugcaaggcccgguccaccccggugacccugagcaaggaccagcucuccggcaucaacaacaucgccuucagcaacuga

SEQ ID NO: 5329 - RNA, 1611 nt, Artificial Sequence
  derived and/or modified CDS sequence (opt2) from HRSV(A2)__F_DSCav1_mut5
auggagcuccucauccucaaggccaacgccaucaccaccauccucaccgccgucaccuucugcuucgccuccggccagaacaucaccgaggaguucuaccaguccaccugcuccgccgucuccaagggcuaccucuccgcccuccgcaccggcugguacaccuccgucaucaccaucgagcucuccaacaucaaggagaacaagugcaacggcaccgacgccaaggucaagcucaucaagcaggagcucgacaaguacaagaacgccgucaccgagcuccagcuccucaugcaguccacccccgccaccggcuccggcuccgccaucgccuccggcgucgccgucugcaagguccuccaccucgagggcgaggucaacaagaucaaguccgcccuccucuccaccaacaaggccgucgucucccucuccggcugcggcgucuccguccucaccuucaagguccucgaccucaagaacuacaucgacaagcagcuccuccccauccucaacaagcaguccugcuccaucuccaacaucgagaccgucaucgaguuccagcagaagaacaaccgccuccucgagaucacccgcgaguucuccgucaacgccggcgucaccacccccgucuccaccuacaugcucaccaacuccgagcuccucucccucaucaacgacaugcccaucaccaacgaccagaagaagcucauguccaacaacguccagaucguccgccagcaguccuacuccaucaugugcaucaucaaggaggagguccucgccuacgucguccagcucccccucuacggcgucaucgacacccccugcuggaagcuccacaccuccccccucugcaccaccaacaccaaggagggcuccaacaucugccucacccgcaccgaccgcggcugguacugcgacaacgccggcuccgucuccuucuucccccaggccgagaccugcaagguccaguccaaccgcgucuucugcgacaccaugaacucccgcacccuccccuccgaggucaaccucugcaacgucgacaucuucaaccccaaguacgacugcaagaucaugaccuccaagaccgacgucuccuccuccgucaucaccucccucggcgccaucgucuccugcuacggcaagaccaagugcaccgccuccaacaagugccgcggcaucaucaagaccuucuccaacggcugcgacuacgucuccaacaagggcgucgacaccgucuccgucggcaacacccucuacuacgucaacaagcaggagggcaagucccucuacgucaagggcgagcccaucaucaacuucuacgacccccucgucuuccccuccgacgaguucgacgccuccaucucccaggucaacgagaagaucaaccagucccucgccuucauccgcaaguccgacgagcuccuccacaacgucaacgccggcaaguccaccaccaacaucaugaucaccaccaucaucaucgucaucaucgucauccuccucucccucaucgccgucggccuccuccucuacugcaaggcccgcuccacccccgucacccucuccaaggaccagcucuccggcaucaacaacaucgccuucuccaacuga

SEQ ID NO: 5330 - RNA, 1611 nt, Artificial Sequence
  derived and/or modified CDS sequence (opt3) from HRSV(A2)__F_DSCav1_mut5
auggagcugcucauccuuaaggccaacgcuauuaccacaauacugacugcagugacguucugcuuugccagcggccagaauaucaccgaagaguucuaccaauccacauguucugcggucucaaaaggguauuugagugcuuuaagaacuggaugguacaccagcguuauuacaaucgaacuguccaacauuaaggagaauaaaugcaacgguaccgacgccaaggugaaacuaaucaagcaggaacucgauaaguauaaaaaugcaguaacugagcugcagcuucugaugcagucuacacccgccaccggcucggggucagcuauagcaagcggaguggccgucuguaagguguugcaccucgagggcgaaguuaacaaaaucaagagugcucugcuguccacgaauaaagccguggucucucucagcgguugcgggguguccguauuaacuuuuaagguucuggaccuuaagaacuacauugauaaacaauugcugccuauccuaaauaagcagucauguaguauuagcaacaucgagaccgugauagaguuccagcagaaaaauaacaggcuccuggaaauuacacgggaguuuucugucaaugcgggagugacuaccccaguguccacauauaugcuuaccaacucagaacuguugagccucaucaaugacaugccgauuacgaacgaucaaaagaaacugaugaguaacaauguccagaucguucgccagcagucuuacuccaucaugugcauuauaaaggaggaaguguuagcauauguagugcaacugccccucuacggcgucaucgacacuccuuguuggaaacuucauacaagcccacugugcaccacuaacacaaaggagggcucgaauauuuguuugacccgaacggaucgugggugguacugcgacaacgccggaucuguguccuucuuuccccaggcugaaaccuguaagguucagucaaauagaguguucugcgauacaaugaacaguagaacucugccuagcgaggucaaucucugcaacguggacaucuuuaauccaaaauaugauuguaagauaaugaccuccaaaacagacguaucuagcucaguuauuaccagucugggugccaucguguccugcuacggcaagacuaaauguacagcaagcaacaagugcagggggaucauuaagaccuucucuaauggaugugauuaugucucaaacaaaggcguggacacugucaguguggguaauacgcuuuacuauguuaacaagcaagaggggaaaagccuguacgugaagggagaacccaucauuaauuuuuaugacccuuugguauucccauccgaugaguuugacgcuucuauaucgcaggucaacgagaaaaucaaccagagccucgccuucauucggaaguccgaugaacuguuacacaaugugaacgcgggcaagucaacaaccaauaucaugaucacuaccauuauaaucguuauuaucgugauucugcuaagucucaucgccgucggccugcuuuuguacugcaaagcacgcucuacaccggugacccugagcaaggaccagcucuccgggauaaacaauaucgcuuucucaaacuga

SEQ ID NO: 5331 - RNA, 1611 nt, Artificial Sequence
  derived and/or modified CDS sequence (opt4) from HRSV(A2)__F_DSCav1_mut5
auggagcugcugauccugaaggccaacgccaucaccaccauccugaccgccgugaccuucugcuucgccagcggccagaacaucaccgaggaguucuaccagagcaccugcagcgccgugagcaagggcuaccugagcgcccugagaaccggcugguacaccagcgugaucaccaucgagcugagcaacaucaaggagaacaagugcaacggcaccgacgccaaggugaagcugaucaagcaggagcuggacaaguacaagaacgccgugaccgagcugcagcugcugaugcagagcacccccgccaccggcagcggcagcgccaucgccagcggcguggccgugugcaaggugcugcaccuggagggcgaggugaacaagaucaagagcgcccugcugagcaccaacaaggccguggugagccugagcggcugcggcgugagcgugcugaccuucaaggugcuggaccugaagaacuacaucgacaagcagcugcugcccauccugaacaagcagagcugcagcaucagcaacaucgagaccgugaucgaguuccagcagaagaacaacagacugcuggagaucaccagagaguucagcgugaacgccggcgugaccacccccgugagcaccuacaugcugaccaacagcgagcugcugagccugaucaacgacaugcccaucaccaacgaccagaagaagcugaugagcaacaacgugcagaucgugagacagcagagcuacagcaucaugugcaucaucaaggaggaggugcuggccuacguggugcagcugccccuguacggcgugaucgacacccccugcuggaagcugcacaccagcccccugugcaccaccaacaccaaggagggcagcaacaucugccugaccagaaccgacagaggcugguacugcgacaacgccggcagcgugagcuucuucccccaggccgagaccugcaaggugcagagcaacagaguguucugcgacaccaugaacagcagaacccugcccagcgaggugaaccugugcaacguggacaucuucaaccccaaguacgacugcaagaucaugaccagcaagaccgacgugagcagcagcgugaucaccagccugggcgccaucgugagcugcuacggcaagaccaagugcaccgccagcaacaagugcagaggcaucaucaagaccuucagcaacggcugcgacuacgugagcaacaagggcguggacaccgugagcgugggcaacacccuguacuacgugaacaagcaggagggcaagagccuguacgugaagggcgagcccaucaucaacuucuacgacccccugguguuccccagcgacgaguucgacgccagcaucagccaggugaacgagaagaucaaccagagccuggccuucaucagaaagagcgacgagcugcugcacaacgugaacgccggcaagagcaccaccaacaucaugaucaccaccaucaucaucgugaucaucgugauccugcugagccugaucgccgugggccugcugcuguacugcaaggccagaagcacccccgugacccugagcaaggaccagcugagcggcaucaacaacaucgccuucagcaacuga

SEQ ID NO: 5332 - RNA, 1611 nt, Artificial Sequence
  derived and/or modified CDS sequence (opt5) from HRSV(A2)__F_DSCav1_mut5
auggagcugcucauccugaaggccaacgcuauuaccacaauccuuacggccgugaccuucugcuuugcgagcggccagaauauuacagaagaguucuaccaauccaccuguucugcugucagcaaaggguaucuguccgcccucagaacaggaugguacaccucuguuaucacaauugaacugagcaacaucaaggagaauaaaugcaacggcaccgacgccaaggugaaacuuaucaagcaggaacuggauaaguauaaaaaugcugugacggagcuccagcugcugaugcaguccacccccgccacagggucuggaagcgcuauugccuccggcgucgcgguguguaagguucuccaccuggagggggaagugaacaaaaucaagagcgcccuucugucuaccaauaaagcugucgugucccucagcggaugcggcguuucugugcugacauuuaagguccuugaccugaagaacuacauugauaaacaacuccugccuauccugaauaagcaguccuguagcauuucuaacaucgagaccgugauugaguuccagcagaaaaauaaccggcuccuggaaaucacgcgcgaguuuuccgugaaugccggcgucacaaccccgguuagcacauauaugcuuaccaacuccgaacugcucucucugaucaaugacaugcccauuaccaacgaucaaaagaaacuuaugagcaacaaugugcagaucgugagacagcaguccuacagcauuaugugcaucauuaaggaggaaguccuggcuuaugugguucaacucccucuguacggggugaucgacacacccuguuggaaacugcauacgucuccucucugcaccacaaacaccaaggagggauccaauaucugucugacacggaccgaucgcggcugguacugcgacaacgccgggagcgucucuuucuuuccccaggcggaaacguguaaggugcagagcaauagaguuuucugcgauacaaugaacuccagaacccugccuucugaggugaaucucugcaacgucgacauuuuuaauccgaaauaugauuguaagaucaugaccagcaaaacagacguguccagcucugucauuaccucccugggagccaucgugagcugcuacggcaagacaaaauguacggcuucuaacaagugccgggggauuaucaagaccuucuccaauggaugugauuauguuagcaacaaaggcguggacacagucuccgugggcaauacccuuuacuauguuaacaagcaagaggggaaaucucuguacgugaagggagaacccaucauuaauuuuuaugacccucucgucuuccccagcgaugaguuugacgccuccaucucucaggugaacgagaaaauuaaccagagccuggcuuucauccgcaaguccgaugaacugcuccacaaugugaacgccggcaagagcacaaccaauauuaugaucacgaccauuaucaucguuauuaucgucauucugcuuucucugaucgccguggggcuccugcuguacugcaaagcuagauccacaccugugacccuuagcaaggaccagcucucuggaauuaacaauaucgcguucuccaacuga

SEQ ID NO: 5333 - RNA, 1611 nt, Artificial Sequence
  derived and/or modified CDS sequence (opt6) from HRSV(A2)__F_DSCav1_mut5
auggaacuauuaauacuuaaagccaacgcaauaacaacaauucucacugcugucaccuucugcuucgccucaggccaaaacauaacggaagaauuuuaccaaucaacaugcucugcaguauccaaaggcuaccuaucugcucuaagaacagguugguauacaucaguaauaaccauagaacuaucaaacauaaaagaaaauaaaugcaacggaacagacgcaaaaguuaaacucauaaaacaagaacuagacaaauauaaaaacgcaguuaccgaacuacaacuacuuaugcaauccacucccgccacuggaucaggaucagcaauagcaucaggagucgcaguauguaaagucuuacaccucgaaggcgaagucaauaaaaucaaauccgcauuacuauccacaaacaaagcagucguaucccuaagcggaugcggaguaucaguacuaacauuuaaaguacuagaccuaaaaaauuacaucgauaaacaacuauuaccuauauuaaacaaacaauccugcuccauuucaaauaucgaaaccguaauagaauuucaacaaaaaaacaacagauuacuagaaauaacaagagaauuuuccguaaaugcuggcguaacaacaccaguauccacauacaugcucacaaacuccgaacuacuaucacuaauaaaugacaugcccauaacaaacgaucaaaaaaaacuaaugucaaauaauguacaaauaguaagacaacaaagcuacuccaucauguguauaauaaaagaagaaguacuagcauacguaguucaacuaccacuuuacggcguaaucgacaccccuugcuggaaacuacacaccuccccucuaugcaccacaaacacaaaagaagguuccaacauaugccuuaccagaacagacagaggcugguauugcgacaacgcaggaucaguuucauuuuuuccacaagcugaaacaugcaaaguacaaucaaacagagucuucugcgacacaaugaacucaagaacucuacccucagaaguaaaccuauguaacguagacauuuucaaccccaaauacgacugcaaaauuaugacaucaaaaacagacguuucaucaucaguuaucaccucauuaggagcaauaguaagcugcuacggaaaaacaaaaugcaccgccucaaauaaaugcagaggaauaauaaaaacuuucuccaacggaugcgacuacguuucaaacaaagguguagacacuguaucaguaggaaacacacuauauuacguaaauaaacaagaaggaaaaucacuuuaugucaaaggagaaccaauaaucaauuucuacgacccauuaguauucccaucagacgaauuugaugcuucaauaucacaaguaaacgaaaaaauaaaucaaucacucgcauuuauacgaaaaucagacgaacuacuacacaauguaaacgcaggcaaaucaacaacaaacauaaugauaacaacaauaaucauuguaauaauaguaauacuucuaucucuaauagcaguaggauuacuccucuacugcaaagcaagaucaaccccuguaacacuaucaaaagaccaacuuucagguauaaauaauauagcuuuuuccaauuaa

SEQ ID NO: 5334 - RNA, 1611 nt, Artificial Sequence
  derived and/or modified CDS sequence (opt11) from HRSV(A2)__F_DSCav1_mut5
auggagcuccuaauccucaaagccaacgcgaucacuacaauccucacagccgucaccuucugcuucgccuccggccaaaacaucaccgaggaguucuaccaaucaaccugcuccgccguaucaaaaggauaccuaagcgcccuacggaccggcugguacacaucugucaucaccaucgaacuaucaaacaucaaagaaaacaaaugcaacggaaccgacgcaaaagucaaacugauuaaacaagaacuagacaaauacaaaaacgcagucaccgaacugcaauuacucaugcaaagcacaccggccaccggcucaggcagcgccaucgccuccggcgucgccgucugcaaaguucuccaccucgagggcgaagucaacaaaauaaaaucugcccuccucuccaccaacaaagccgucgucucccucagcggcugcggagucuccguccucaccuucaaaguucucgaucucaagaacuauauugacaaacaacuucuacccauacucaacaaacaaagcugcagcauauccaacaucgaaaccgucaucgaguuccaacaaaagaacaaccgccuccucgaaauaacccgcgaguucagcguuaacgccggagucacuaccccugucuccaccuacaugcucaccaacuccgaacuccuaucacuaaucaacgacaugcccauaaccaacgaccagaagaaacucauguccaacaacguccaaauuguccgacaacaaagcuacuccauaaugugcauaauaaaagaggaaguccucgccuacgucguacaacugccccuuuauggcguaaucgacacacccugcuggaaacuccacacgucaccccucugcaccaccaacacaaaagaaggcucgaacaucugccuaacacggacugaccgcggcugguacugcgacaacgccggcuccgucagcuucuucccacaagccgaaaccugcaaaguacaauccaaccgaguauucugcgacaccaugaacuccagaacccuccccucagaggucaaccugugcaacguagacaucuucaaccccaaauacgacugcaaaauaaugaccucaaaaacagacgucuccucuuccguaaucaccagccucggagccaucgucagcugcuacggcaaaaccaaaugcaccgccucaaacaaaugccgcggcaucaucaaaacauucucaaacggcugcgacuacgucuccaacaaaggcgucgacacaguaagcguaggcaacacacuguacuacgucaacaaacaagagggaaaaucacucuacgucaaaggagaacccauaaucaacuucuacgacccccucguuuuccccagcgacgaguucgacgccagcauaucccaagucaacgagaaaauuaaccaaucccuagcauucauccgaaaaucugacgaacugcuccacaacgucaacgcgggaaaaucaacaaccaacauaaugauaaccacaaucauaauagucaucaucguaauccuccucagccuaaucgcugucggccuccuccucuacugcaaagcccguuccaccccagucacacuuuccaaggaccaacuaagcggaauaaacaacaucgcguucucaaacuaa

SEQ ID NO: 5335 - RNA, 1887 nt, Artificial Sequence
  mRNA product Design a-1 comprising derived and/or modified sequence from HRSV(A2)__F_DSCav1_mut5 (opt1)
gggagagucccgcagucggcguccagcggcucugcuuguucgugugugugucguugcaggccuuauucaagcuuaccauggagcugcucauccugaaggccaacgccaucaccaccauccugacggcggugaccuucugcuucgccagcggccagaacaucaccgaggaguucuaccaguccacgugcagcgccgucuccaagggguaccucagcgcccugcggaccggcugguacaccuccgugaucaccaucgagcugagcaacaucaaggagaacaagugcaacgggaccgacgccaaggugaagcucaucaagcaggagcuggacaaguacaagaacgcggucacggagcugcagcuccugaugcaguccaccccggcaaccggcuccggcuccgccaucgcgagcggcgucgccgugugcaaggugcugcaccucgagggggaggucaacaagaucaagagcgcccugcuguccaccaacaaggccguggugagccucuccggcugcggcgucagcgugcugaccuucaaggugcuggaccucaagaacuacaucgacaagcagcugcugcccauccugaacaagcagagcugcuccaucagcaacaucgagacggugaucgaguuccagcagaagaacaaccggcuccuggagaucacccgcgaguucagcgugaacgccggggucaccacccccguguccacguacaugcugaccaacagcgagcuccugucccugaucaacgacaugccgaucaccaacgaccagaagaagcucaugagcaacaacgugcagaucguccggcagcaguccuacagcaucaugugcaucaucaaggaggaggugcuggcguacgugguccagcugccccucuacggcgugaucgacacccccugcuggaagcugcacacgagcccccugugcaccaccaacaccaaggagggguccaacaucugccucacgcgcaccgaccggggcugguacugcgacaacgccggcagcgucuccuucuucccgcaggccgagaccugcaaggugcagagcaaccgcguguucugcgacaccaugaacucccggacgcugcccagcgagguaaaccucugcaacgucgacaucuucaaccccaaguacgacugcaagaucaugaccuccaagaccgacgugagcuccagcgugaucaccucccugggggccaucgucagcugcuacggcaagacgaagugcaccgccagcaacaagugccgggggaucaucaagaccuucuccaacggcugcgacuacgugagcaacaagggcguggacaccguguccgucgggaacacccuguacuacgugaacaagcaggagggcaagagccucuacgugaagggggagcccaucaucaacuucuacgacccgcuggucuuccccuccgacgaguucgacgcgagcaucucccaggugaacgagaagaucaaccagagccuggccuucauccgcaaguccgacgagcugcuccacaacgugaacgccggcaagagcacgaccaacaucaugaucaccaccaucaucaucgucaucaucgugauccugcugucccucaucgccguggggcugcugcucuacugcaaggcccggagcacgcccgucacccuguccaaggaccagcugagcggcaucaacaacaucgcguucuccaacugaggacuagucccuguucccagagcccacuuuuuuuucuuuuuuugaaauaaaauagccugucuuucagaucuaaaaaaaaaaaaaaaaaaaaaaaaaaaaaaaaaaaaaaaaaaaaaaaaaaaaaaaaaaaaaaaaugcaucccccccccccccccccccccccccccccccaaaggcucuuuucagagccaccagaauu

SEQ ID NO: 5336 - RNA, 1887 nt, Artificial Sequence
  mRNA product Design a-1 comprising derived and/or modified sequence from HRSV(A2)__F_DSCav1_mut5 (opt1)
gggagagucccgcagucggcguccagcggcucugcuuguucgugugugugucguugcaggccuuauucaagcuuaccauggagcugcucauccugaaggccaacgccaucaccaccauccugacggcggugaccuucugcuucgccagcggccagaacaucaccgaggaguucuaccaguccacgugcagcgccgucuccaagggguaccucagcgcccugcgcaccggcugguacaccuccgugaucaccaucgagcugagcaacaucaaggagaacaagugcaacgggaccgacgccaaggugaagcucaucaagcaggagcuggacaaguacaagaacgcggucacggagcugcagcuccugaugcaguccacccccgccaccggcagcggguccgccaucgccagcggcguggcggugugcaagguccugcaccucgagggcgaggugaacaagaucaaguccgcccugcugagcaccaacaaggccguggucucccucagcgggugcggcguguccgugcugacguucaagguccuggaccucaagaacuacaucgacaagcagcugcugccgauccucaacaagcagagcugcuccaucagcaacaucgagaccgugaucgaguuccagcagaagaacaaccggcugcuggagaucacccgcgaguucuccgugaacgccggggucaccacgcccgugagcaccuacaugcucaccaacagcgagcugcugucccucaucaacgacaugcccaucaccaacgaccagaagaagcugaugagcaacaacgugcagaucguccggcagcaguccuacagcaucaugugcaucaucaaggaggaggugcuggccuacgugguccagcucccccuguacggcgugaucgacacgccgugcuggaagcugcacaccagcccccucugcaccaccaacacgaaggagggguccaacaucugccugacccgcaccgaccggggcugguacugcgacaacgcgggcuccgugagcuucuucccccaggccgagaccugcaagguccaguccaaccgcguguucugcgacacgaugaacagccggacccuccccuccgaggucaaccugugcaacguggacaucuucaacccgaaguacgacugcaagaucaugaccagcaagaccgacguguccagcuccgucaucacgagccugggggccaucguguccugcuacggcaagaccaagugcaccgccagcaacaagugccgggggaucaucaagaccuucuccaacggcugcgacuacgugagcaacaagggcgucgacacggugagcguggggaacacccucuacuacgucaacaagcaggagggcaagucccuguacgugaagggggagcccaucaucaacuucuacgacccccugguguuccccagcgacgaguucgacgccuccaucagccaggucaacgagaagaucaaccagucccucgcguucauccgcaagagcgacgagcugcugcacaacgugaacgccggcaaguccaccaccaacaucaugaucaccacgaucaucaucgugaucaucgucauccuccugagccugaucgccguggggcuccugcuguacugcaaggcccgguccaccccggugacccugagcaaggaccagcucuccggcaucaacaacaucgccuucagcaacugaggacuagucccuguucccagagcccacuuuuuuuucuuuuuuugaaauaaaauagccugucuuucagaucuaaaaaaaaaaaaaaaaaaaaaaaaaaaaaaaaaaaaaaaaaaaaaaaaaaaaaaaaaaaaaaaaugcaucccccccccccccccccccccccccccccccaaaggcucuuuucagagccaccagaauu

SEQ ID NO: 5337 - RNA, 1887 nt, Artificial Sequence
  mRNA product Design a-1 comprising derived and/or modified sequence from HRSV(A2)__F_DSCav1_mut5 (opt2)
gggagagucccgcagucggcguccagcggcucugcuuguucgugugugugucguugcaggccuuauucaagcuuaccauggagcuccucauccucaaggccaacgccaucaccaccauccucaccgccgucaccuucugcuucgccuccggccagaacaucaccgaggaguucuaccaguccaccugcuccgccgucuccaagggcuaccucuccgcccuccgcaccggcugguacaccuccgucaucaccaucgagcucuccaacaucaaggagaacaagugcaacggcaccgacgccaaggucaagcucaucaagcaggagcucgacaaguacaagaacgccgucaccgagcuccagcuccucaugcaguccacccccgccaccggcuccggcuccgccaucgccuccggcgucgccgucugcaagguccuccaccucgagggcgaggucaacaagaucaaguccgcccuccucuccaccaacaaggccgucgucucccucuccggcugcggcgucuccguccucaccuucaagguccucgaccucaagaacuacaucgacaagcagcuccuccccauccucaacaagcaguccugcuccaucuccaacaucgagaccgucaucgaguuccagcagaagaacaaccgccuccucgagaucacccgcgaguucuccgucaacgccggcgucaccacccccgucuccaccuacaugcucaccaacuccgagcuccucucccucaucaacgacaugcccaucaccaacgaccagaagaagcucauguccaacaacguccagaucguccgccagcaguccuacuccaucaugugcaucaucaaggaggagguccucgccuacgucguccagcucccccucuacggcgucaucgacacccccugcuggaagcuccacaccuccccccucugcaccaccaacaccaaggagggcuccaacaucugccucacccgcaccgaccgcggcugguacugcgacaacgccggcuccgucuccuucuucccccaggccgagaccugcaagguccaguccaaccgcgucuucugcgacaccaugaacucccgcacccuccccuccgaggucaaccucugcaacgucgacaucuucaaccccaaguacgacugcaagaucaugaccuccaagaccgacgucuccuccuccgucaucaccucccucggcgccaucgucuccugcuacggcaagaccaagugcaccgccuccaacaagugccgcggcaucaucaagaccuucuccaacggcugcgacuacgucuccaacaagggcgucgacaccgucuccgucggcaacacccucuacuacgucaacaagcaggagggcaagucccucuacgucaagggcgagcccaucaucaacuucuacgacccccucgucuuccccuccgacgaguucgacgccuccaucucccaggucaacgagaagaucaaccagucccucgccuucauccgcaaguccgacgagcuccuccacaacgucaacgccggcaaguccaccaccaacaucaugaucaccaccaucaucaucgucaucaucgucauccuccucucccucaucgccgucggccuccuccucuacugcaaggcccgcuccacccccgucacccucuccaaggaccagcucuccggcaucaacaacaucgccuucuccaacugaggacuagucccuguucccagagcccacuuuuuuuucuuuuuuugaaauaaaauagccugucuuucagaucuaaaaaaaaaaaaaaaaaaaaaaaaaaaaaaaaaaaaaaaaaaaaaaaaaaaaaaaaaaaaaaaaugcaucccccccccccccccccccccccccccccccaaaggcucuuuucagagccaccagaauu

SEQ ID NO: 5338 - RNA, 1887 nt, Artificial Sequence
  mRNA product Design a-1 comprising derived and/or modified sequence from HRSV(A2)__F_DSCav1_mut5 (opt3)
gggagagucccgcagucggcguccagcggcucugcuuguucgugugugugucguugcaggccuuauucaagcuuaccauggagcugcucauccuuaaggccaacgcuauuaccacaauacugacugcagugacguucugcuuugccagcggccagaauaucaccgaagaguucuaccaauccacauguucugcggucucaaaaggguauuugagugcuuuaagaacuggaugguacaccagcguuauuacaaucgaacuguccaacauuaaggagaauaaaugcaacgguaccgacgccaaggugaaacuaaucaagcaggaacucgauaaguauaaaaaugcaguaacugagcugcagcuucugaugcagucuacacccgccaccggcucggggucagcuauagcaagcggaguggccgucuguaagguguugcaccucgagggcgaaguuaacaaaaucaagagugcucugcuguccacgaauaaagccguggucucucucagcgguugcgggguguccguauuaacuuuuaagguucuggaccuuaagaacuacauugauaaacaauugcugccuauccuaaauaagcagucauguaguauuagcaacaucgagaccgugauagaguuccagcagaaaaauaacaggcuccuggaaauuacacgggaguuuucugucaaugcgggagugacuaccccaguguccacauauaugcuuaccaacucagaacuguugagccucaucaaugacaugccgauuacgaacgaucaaaagaaacugaugaguaacaauguccagaucguucgccagcagucuuacuccaucaugugcauuauaaaggaggaaguguuagcauauguagugcaacugccccucuacggcgucaucgacacuccuuguuggaaacuucauacaagcccacugugcaccacuaacacaaaggagggcucgaauauuuguuugacccgaacggaucgugggugguacugcgacaacgccggaucuguguccuucuuuccccaggcugaaaccuguaagguucagucaaauagaguguucugcgauacaaugaacaguagaacucugccuagcgaggucaaucucugcaacguggacaucuuuaauccaaaauaugauuguaagauaaugaccuccaaaacagacguaucuagcucaguuauuaccagucugggugccaucguguccugcuacggcaagacuaaauguacagcaagcaacaagugcagggggaucauuaagaccuucucuaauggaugugauuaugucucaaacaaaggcguggacacugucaguguggguaauacgcuuuacuauguuaacaagcaagaggggaaaagccuguacgugaagggagaacccaucauuaauuuuuaugacccuuugguauucccauccgaugaguuugacgcuucuauaucgcaggucaacgagaaaaucaaccagagccucgccuucauucggaaguccgaugaacuguuacacaaugugaacgcgggcaagucaacaaccaauaucaugaucacuaccauuauaaucguuauuaucgugauucugcuaagucucaucgccgucggccugcuuuuguacugcaaagcacgcucuacaccggugacccugagcaaggaccagcucuccgggauaaacaauaucgcuuucucaaacugaggacuagucccuguucccagagcccacuuuuuuuucuuuuuuugaaauaaaauagccugucuuucagaucuaaaaaaaaaaaaaaaaaaaaaaaaaaaaaaaaaaaaaaaaaaaaaaaaaaaaaaaaaaaaaaaaugcaucccccccccccccccccccccccccccccccaaaggcucuuuucagagccaccagaauu

SEQ ID NO: 5339 - RNA, 1887 nt, Artificial Sequence
  mRNA product Design a-1 comprising derived and/or modified sequence from HRSV(A2)__F_DSCav1_mut5 (opt4)
gggagagucccgcagucggcguccagcggcucugcuuguucgugugugugucguugcaggccuuauucaagcuuaccauggagcugcugauccugaaggccaacgccaucaccaccauccugaccgccgugaccuucugcuucgccagcggccagaacaucaccgaggaguucuaccagagcaccugcagcgccgugagcaagggcuaccugagcgcccugagaaccggcugguacaccagcgugaucaccaucgagcugagcaacaucaaggagaacaagugcaacggcaccgacgccaaggugaagcugaucaagcaggagcuggacaaguacaagaacgccgugaccgagcugcagcugcugaugcagagcacccccgccaccggcagcggcagcgccaucgccagcggcguggccgugugcaaggugcugcaccuggagggcgaggugaacaagaucaagagcgcccugcugagcaccaacaaggccguggugagccugagcggcugcggcgugagcgugcugaccuucaaggugcuggaccugaagaacuacaucgacaagcagcugcugcccauccugaacaagcagagcugcagcaucagcaacaucgagaccgugaucgaguuccagcagaagaacaacagacugcuggagaucaccagagaguucagcgugaacgccggcgugaccacccccgugagcaccuacaugcugaccaacagcgagcugcugagccugaucaacgacaugcccaucaccaacgaccagaagaagcugaugagcaacaacgugcagaucgugagacagcagagcuacagcaucaugugcaucaucaaggaggaggugcuggccuacguggugcagcugccccuguacggcgugaucgacacccccugcuggaagcugcacaccagcccccugugcaccaccaacaccaaggagggcagcaacaucugccugaccagaaccgacagaggcugguacugcgacaacgccggcagcgugagcuucuucccccaggccgagaccugcaaggugcagagcaacagaguguucugcgacaccaugaacagcagaacccugcccagcgaggugaaccugugcaacguggacaucuucaaccccaaguacgacugcaagaucaugaccagcaagaccgacgugagcagcagcgugaucaccagccugggcgccaucgugagcugcuacggcaagaccaagugcaccgccagcaacaagugcagaggcaucaucaagaccuucagcaacggcugcgacuacgugagcaacaagggcguggacaccgugagcgugggcaacacccuguacuacgugaacaagcaggagggcaagagccuguacgugaagggcgagcccaucaucaacuucuacgacccccugguguuccccagcgacgaguucgacgccagcaucagccaggugaacgagaagaucaaccagagccuggccuucaucagaaagagcgacgagcugcugcacaacgugaacgccggcaagagcaccaccaacaucaugaucaccaccaucaucaucgugaucaucgugauccugcugagccugaucgccgugggccugcugcuguacugcaaggccagaagcacccccgugacccugagcaaggaccagcugagcggcaucaacaacaucgccuucagcaacugaggacuagucccuguucccagagcccacuuuuuuuucuuuuuuugaaauaaaauagccugucuuucagaucuaaaaaaaaaaaaaaaaaaaaaaaaaaaaaaaaaaaaaaaaaaaaaaaaaaaaaaaaaaaaaaaaugcaucccccccccccccccccccccccccccccccaaaggcucuuuucagagccaccagaauu

SEQ ID NO: 5340 - RNA, 1887 nt, Artificial Sequence
  mRNA product Design a-1 comprising derived and/or modified sequence from HRSV(A2)__F_DSCav1_mut5 (opt5)
gggagagucccgcagucggcguccagcggcucugcuuguucgugugugugucguugcaggccuuauucaagcuuaccauggagcugcucauccugaaggccaacgcuauuaccacaauccuuacggccgugaccuucugcuuugcgagcggccagaauauuacagaagaguucuaccaauccaccuguucugcugucagcaaaggguaucuguccgcccucagaacaggaugguacaccucuguuaucacaauugaacugagcaacaucaaggagaauaaaugcaacggcaccgacgccaaggugaaacuuaucaagcaggaacuggauaaguauaaaaaugcugugacggagcuccagcugcugaugcaguccacccccgccacagggucuggaagcgcuauugccuccggcgucgcgguguguaagguucuccaccuggagggggaagugaacaaaaucaagagcgcccuucugucuaccaauaaagcugucgugucccucagcggaugcggcguuucugugcugacauuuaagguccuugaccugaagaacuacauugauaaacaacuccugccuauccugaauaagcaguccuguagcauuucuaacaucgagaccgugauugaguuccagcagaaaaauaaccggcuccuggaaaucacgcgcgaguuuuccgugaaugccggcgucacaaccccgguuagcacauauaugcuuaccaacuccgaacugcucucucugaucaaugacaugcccauuaccaacgaucaaaagaaacuuaugagcaacaaugugcagaucgugagacagcaguccuacagcauuaugugcaucauuaaggaggaaguccuggcuuaugugguucaacucccucuguacggggugaucgacacacccuguuggaaacugcauacgucuccucucugcaccacaaacaccaaggagggauccaauaucugucugacacggaccgaucgcggcugguacugcgacaacgccgggagcgucucuuucuuuccccaggcggaaacguguaaggugcagagcaauagaguuuucugcgauacaaugaacuccagaacccugccuucugaggugaaucucugcaacgucgacauuuuuaauccgaaauaugauuguaagaucaugaccagcaaaacagacguguccagcucugucauuaccucccugggagccaucgugagcugcuacggcaagacaaaauguacggcuucuaacaagugccgggggauuaucaagaccuucuccaauggaugugauuauguuagcaacaaaggcguggacacagucuccgugggcaauacccuuuacuauguuaacaagcaagaggggaaaucucuguacgugaagggagaacccaucauuaauuuuuaugacccucucgucuuccccagcgaugaguuugacgccuccaucucucaggugaacgagaaaauuaaccagagccuggcuuucauccgcaaguccgaugaacugcuccacaaugugaacgccggcaagagcacaaccaauauuaugaucacgaccauuaucaucguuauuaucgucauucugcuuucucugaucgccguggggcuccugcuguacugcaaagcuagauccacaccugugacccuuagcaaggaccagcucucuggaauuaacaauaucgcguucuccaacugaggacuagucccuguucccagagcccacuuuuuuuucuuuuuuugaaauaaaauagccugucuuucagaucuaaaaaaaaaaaaaaaaaaaaaaaaaaaaaaaaaaaaaaaaaaaaaaaaaaaaaaaaaaaaaaaaugcaucccccccccccccccccccccccccccccccaaaggcucuuuucagagccaccagaauu

SEQ ID NO: 5341 - RNA, 1887 nt, Artificial Sequence
  mRNA product Design a-1 comprising derived and/or modified sequence from HRSV(A2)__F_DSCav1_mut5 (opt6)
gggagagucccgcagucggcguccagcggcucugcuuguucgugugugugucguugcaggccuuauucaagcuuaccauggaacuauuaauacuuaaagccaacgcaauaacaacaauucucacugcugucaccuucugcuucgccucaggccaaaacauaacggaagaauuuuaccaaucaacaugcucugcaguauccaaaggcuaccuaucugcucuaagaacagguugguauacaucaguaauaaccauagaacuaucaaacauaaaagaaaauaaaugcaacggaacagacgcaaaaguuaaacucauaaaacaagaacuagacaaauauaaaaacgcaguuaccgaacuacaacuacuuaugcaauccacucccgccacuggaucaggaucagcaauagcaucaggagucgcaguauguaaagucuuacaccucgaaggcgaagucaauaaaaucaaauccgcauuacuauccacaaacaaagcagucguaucccuaagcggaugcggaguaucaguacuaacauuuaaaguacuagaccuaaaaaauuacaucgauaaacaacuauuaccuauauuaaacaaacaauccugcuccauuucaaauaucgaaaccguaauagaauuucaacaaaaaaacaacagauuacuagaaauaacaagagaauuuuccguaaaugcuggcguaacaacaccaguauccacauacaugcucacaaacuccgaacuacuaucacuaauaaaugacaugcccauaacaaacgaucaaaaaaaacuaaugucaaauaauguacaaauaguaagacaacaaagcuacuccaucauguguauaauaaaagaagaaguacuagcauacguaguucaacuaccacuuuacggcguaaucgacaccccuugcuggaaacuacacaccuccccucuaugcaccacaaacacaaaagaagguuccaacauaugccuuaccagaacagacagaggcugguauugcgacaacgcaggaucaguuucauuuuuuccacaagcugaaacaugcaaaguacaaucaaacagagucuucugcgacacaaugaacucaagaacucuacccucagaaguaaaccuauguaacguagacauuuucaaccccaaauacgacugcaaaauuaugacaucaaaaacagacguuucaucaucaguuaucaccucauuaggagcaauaguaagcugcuacggaaaaacaaaaugcaccgccucaaauaaaugcagaggaauaauaaaaacuuucuccaacggaugcgacuacguuucaaacaaagguguagacacuguaucaguaggaaacacacuauauuacguaaauaaacaagaaggaaaaucacuuuaugucaaaggagaaccaauaaucaauuucuacgacccauuaguauucccaucagacgaauuugaugcuucaauaucacaaguaaacgaaaaaauaaaucaaucacucgcauuuauacgaaaaucagacgaacuacuacacaauguaaacgcaggcaaaucaacaacaaacauaaugauaacaacaauaaucauuguaauaauaguaauacuucuaucucuaauagcaguaggauuacuccucuacugcaaagcaagaucaaccccuguaacacuaucaaaagaccaacuuucagguauaaauaauauagcuuuuuccaauuaaggacuagucccuguucccagagcccacuuuuuuuucuuuuuuugaaauaaaauagccugucuuucagaucuaaaaaaaaaaaaaaaaaaaaaaaaaaaaaaaaaaaaaaaaaaaaaaaaaaaaaaaaaaaaaaaaugcaucccccccccccccccccccccccccccccccaaaggcucuuuucagagccaccagaauu

SEQ ID NO: 5342 - RNA, 1887 nt, Artificial Sequence
  mRNA product Design a-1 comprising derived and/or modified sequence from HRSV(A2)__F_DSCav1_mut5 (opt11)
gggagagucccgcagucggcguccagcggcucugcuuguucgugugugugucguugcaggccuuauucaagcuuaccauggagcuccuaauccucaaagccaacgcgaucacuacaauccucacagccgucaccuucugcuucgccuccggccaaaacaucaccgaggaguucuaccaaucaaccugcuccgccguaucaaaaggauaccuaagcgcccuacggaccggcugguacacaucugucaucaccaucgaacuaucaaacaucaaagaaaacaaaugcaacggaaccgacgcaaaagucaaacugauuaaacaagaacuagacaaauacaaaaacgcagucaccgaacugcaauuacucaugcaaagcacaccggccaccggcucaggcagcgccaucgccuccggcgucgccgucugcaaaguucuccaccucgagggcgaagucaacaaaauaaaaucugcccuccucuccaccaacaaagccgucgucucccucagcggcugcggagucuccguccucaccuucaaaguucucgaucucaagaacuauauugacaaacaacuucuacccauacucaacaaacaaagcugcagcauauccaacaucgaaaccgucaucgaguuccaacaaaagaacaaccgccuccucgaaauaacccgcgaguucagcguuaacgccggagucacuaccccugucuccaccuacaugcucaccaacuccgaacuccuaucacuaaucaacgacaugcccauaaccaacgaccagaagaaacucauguccaacaacguccaaauuguccgacaacaaagcuacuccauaaugugcauaauaaaagaggaaguccucgccuacgucguacaacugccccuuuauggcguaaucgacacacccugcuggaaacuccacacgucaccccucugcaccaccaacacaaaagaaggcucgaacaucugccuaacacggacugaccgcggcugguacugcgacaacgccggcuccgucagcuucuucccacaagccgaaaccugcaaaguacaauccaaccgaguauucugcgacaccaugaacuccagaacccuccccucagaggucaaccugugcaacguagacaucuucaaccccaaauacgacugcaaaauaaugaccucaaaaacagacgucuccucuuccguaaucaccagccucggagccaucgucagcugcuacggcaaaaccaaaugcaccgccucaaacaaaugccgcggcaucaucaaaacauucucaaacggcugcgacuacgucuccaacaaaggcgucgacacaguaagcguaggcaacacacuguacuacgucaacaaacaagagggaaaaucacucuacgucaaaggagaacccauaaucaacuucuacgacccccucguuuuccccagcgacgaguucgacgccagcauaucccaagucaacgagaaaauuaaccaaucccuagcauucauccgaaaaucugacgaacugcuccacaacgucaacgcgggaaaaucaacaaccaacauaaugauaaccacaaucauaauagucaucaucguaauccuccucagccuaaucgcugucggccuccuccucuacugcaaagcccguuccaccccagucacacuuuccaaggaccaacuaagcggaauaaacaacaucgcguucucaaacuaaggacuagucccuguucccagagcccacuuuuuuuucuuuuuuugaaauaaaauagccugucuuucagaucuaaaaaaaaaaaaaaaaaaaaaaaaaaaaaaaaaaaaaaaaaaaaaaaaaaaaaaaaaaaaaaaaugcaucccccccccccccccccccccccccccccccaaaggcucuuuucagagccaccagaauu

SEQ ID NO: 5343 - RNA, 1906 nt, Artificial Sequence
  mRNA product Design a-2 comprising derived and/or modified sequence from HRSV(A2)__F_DSCav1_mut5 (opt1)
gggagaguccgcucagccagguugcagaagcggcuuagcguguguccuaaucuucucucugcguguagguaggccugugccgcaaacaagcuuaccauggagcugcucauccugaaggccaacgccaucaccaccauccugacggcggugaccuucugcuucgccagcggccagaacaucaccgaggaguucuaccaguccacgugcagcgccgucuccaagggguaccucagcgcccugcggaccggcugguacaccuccgugaucaccaucgagcugagcaacaucaaggagaacaagugcaacgggaccgacgccaaggugaagcucaucaagcaggagcuggacaaguacaagaacgcggucacggagcugcagcuccugaugcaguccaccccggcaaccggcuccggcuccgccaucgcgagcggcgucgccgugugcaaggugcugcaccucgagggggaggucaacaagaucaagagcgcccugcuguccaccaacaaggccguggugagccucuccggcugcggcgucagcgugcugaccuucaaggugcuggaccucaagaacuacaucgacaagcagcugcugcccauccugaacaagcagagcugcuccaucagcaacaucgagacggugaucgaguuccagcagaagaacaaccggcuccuggagaucacccgcgaguucagcgugaacgccggggucaccacccccguguccacguacaugcugaccaacagcgagcuccugucccugaucaacgacaugccgaucaccaacgaccagaagaagcucaugagcaacaacgugcagaucguccggcagcaguccuacagcaucaugugcaucaucaaggaggaggugcuggcguacgugguccagcugccccucuacggcgugaucgacacccccugcuggaagcugcacacgagcccccugugcaccaccaacaccaaggagggguccaacaucugccucacgcgcaccgaccggggcugguacugcgacaacgccggcagcgucuccuucuucccgcaggccgagaccugcaaggugcagagcaaccgcguguucugcgacaccaugaacucccggacgcugcccagcgagguaaaccucugcaacgucgacaucuucaaccccaaguacgacugcaagaucaugaccuccaagaccgacgugagcuccagcgugaucaccucccugggggccaucgucagcugcuacggcaagacgaagugcaccgccagcaacaagugccgggggaucaucaagaccuucuccaacggcugcgacuacgugagcaacaagggcguggacaccguguccgucgggaacacccuguacuacgugaacaagcaggagggcaagagccucuacgugaagggggagcccaucaucaacuucuacgacccgcuggucuuccccuccgacgaguucgacgcgagcaucucccaggugaacgagaagaucaaccagagccuggccuucauccgcaaguccgacgagcugcuccacaacgugaacgccggcaagagcacgaccaacaucaugaucaccaccaucaucaucgucaucaucgugauccugcugucccucaucgccguggggcugcugcucuacugcaaggcccggagcacgcccgucacccuguccaaggaccagcugagcggcaucaacaacaucgcguucuccaacugaggacuagucccuguucccagagcccacuuuuuuuucuuuuuuugaaauaaaauagccugucuuucagaucuaaaaaaaaaaaaaaaaaaaaaaaaaaaaaaaaaaaaaaaaaaaaaaaaaaaaaaaaaaaaaaaaugcaucccccccccccccccccccccccccccccccaaaggcucuuuucagagccaccagaauu

SEQ ID NO: 5344 - RNA, 1906 nt, Artificial Sequence
  mRNA product Design a-2 comprising derived and/or modified sequence from HRSV(A2)__F_DSCav1_mut5 (opt1)
gggagaguccgcucagccagguugcagaagcggcuuagcguguguccuaaucuucucucugcguguagguaggccugugccgcaaacaagcuuaccauggagcugcucauccugaaggccaacgccaucaccaccauccugacggcggugaccuucugcuucgccagcggccagaacaucaccgaggaguucuaccaguccacgugcagcgccgucuccaagggguaccucagcgcccugcgcaccggcugguacaccuccgugaucaccaucgagcugagcaacaucaaggagaacaagugcaacgggaccgacgccaaggugaagcucaucaagcaggagcuggacaaguacaagaacgcggucacggagcugcagcuccugaugcaguccacccccgccaccggcagcggguccgccaucgccagcggcguggcggugugcaagguccugcaccucgagggcgaggugaacaagaucaaguccgcccugcugagcaccaacaaggccguggucucccucagcgggugcggcguguccgugcugacguucaagguccuggaccucaagaacuacaucgacaagcagcugcugccgauccucaacaagcagagcugcuccaucagcaacaucgagaccgugaucgaguuccagcagaagaacaaccggcugcuggagaucacccgcgaguucuccgugaacgccggggucaccacgcccgugagcaccuacaugcucaccaacagcgagcugcugucccucaucaacgacaugcccaucaccaacgaccagaagaagcugaugagcaacaacgugcagaucguccggcagcaguccuacagcaucaugugcaucaucaaggaggaggugcuggccuacgugguccagcucccccuguacggcgugaucgacacgccgugcuggaagcugcacaccagcccccucugcaccaccaacacgaaggagggguccaacaucugccugacccgcaccgaccggggcugguacugcgacaacgcgggcuccgugagcuucuucccccaggccgagaccugcaagguccaguccaaccgcguguucugcgacacgaugaacagccggacccuccccuccgaggucaaccugugcaacguggacaucuucaacccgaaguacgacugcaagaucaugaccagcaagaccgacguguccagcuccgucaucacgagccugggggccaucguguccugcuacggcaagaccaagugcaccgccagcaacaagugccgggggaucaucaagaccuucuccaacggcugcgacuacgugagcaacaagggcgucgacacggugagcguggggaacacccucuacuacgucaacaagcaggagggcaagucccuguacgugaagggggagcccaucaucaacuucuacgacccccugguguuccccagcgacgaguucgacgccuccaucagccaggucaacgagaagaucaaccagucccucgcguucauccgcaagagcgacgagcugcugcacaacgugaacgccggcaaguccaccaccaacaucaugaucaccacgaucaucaucgugaucaucgucauccuccugagccugaucgccguggggcuccugcuguacugcaaggcccgguccaccccggugacccugagcaaggaccagcucuccggcaucaacaacaucgccuucagcaacugaggacuagucccuguucccagagcccacuuuuuuuucuuuuuuugaaauaaaauagccugucuuucagaucuaaaaaaaaaaaaaaaaaaaaaaaaaaaaaaaaaaaaaaaaaaaaaaaaaaaaaaaaaaaaaaaaugcaucccccccccccccccccccccccccccccccaaaggcucuuuucagagccaccagaauu

SEQ ID NO: 5345 - RNA, 1906 nt, Artificial Sequence
  mRNA product Design a-2 comprising derived and/or modified sequence from HRSV(A2)__F_DSCav1_mut5 (opt2)
gggagaguccgcucagccagguugcagaagcggcuuagcguguguccuaaucuucucucugcguguagguaggccugugccgcaaacaagcuuaccauggagcuccucauccucaaggccaacgccaucaccaccauccucaccgccgucaccuucugcuucgccuccggccagaacaucaccgaggaguucuaccaguccaccugcuccgccgucuccaagggcuaccucuccgcccuccgcaccggcugguacaccuccgucaucaccaucgagcucuccaacaucaaggagaacaagugcaacggcaccgacgccaaggucaagcucaucaagcaggagcucgacaaguacaagaacgccgucaccgagcuccagcuccucaugcaguccacccccgccaccggcuccggcuccgccaucgccuccggcgucgccgucugcaagguccuccaccucgagggcgaggucaacaagaucaaguccgcccuccucuccaccaacaaggccgucgucucccucuccggcugcggcgucuccguccucaccuucaagguccucgaccucaagaacuacaucgacaagcagcuccuccccauccucaacaagcaguccugcuccaucuccaacaucgagaccgucaucgaguuccagcagaagaacaaccgccuccucgagaucacccgcgaguucuccgucaacgccggcgucaccacccccgucuccaccuacaugcucaccaacuccgagcuccucucccucaucaacgacaugcccaucaccaacgaccagaagaagcucauguccaacaacguccagaucguccgccagcaguccuacuccaucaugugcaucaucaaggaggagguccucgccuacgucguccagcucccccucuacggcgucaucgacacccccugcuggaagcuccacaccuccccccucugcaccaccaacaccaaggagggcuccaacaucugccucacccgcaccgaccgcggcugguacugcgacaacgccggcuccgucuccuucuucccccaggccgagaccugcaagguccaguccaaccgcgucuucugcgacaccaugaacucccgcacccuccccuccgaggucaaccucugcaacgucgacaucuucaaccccaaguacgacugcaagaucaugaccuccaagaccgacgucuccuccuccgucaucaccucccucggcgccaucgucuccugcuacggcaagaccaagugcaccgccuccaacaagugccgcggcaucaucaagaccuucuccaacggcugcgacuacgucuccaacaagggcgucgacaccgucuccgucggcaacacccucuacuacgucaacaagcaggagggcaagucccucuacgucaagggcgagcccaucaucaacuucuacgacccccucgucuuccccuccgacgaguucgacgccuccaucucccaggucaacgagaagaucaaccagucccucgccuucauccgcaaguccgacgagcuccuccacaacgucaacgccggcaaguccaccaccaacaucaugaucaccaccaucaucaucgucaucaucgucauccuccucucccucaucgccgucggccuccuccucuacugcaaggcccgcuccacccccgucacccucuccaaggaccagcucuccggcaucaacaacaucgccuucuccaacugaggacuagucccuguucccagagcccacuuuuuuuucuuuuuuugaaauaaaauagccugucuuucagaucuaaaaaaaaaaaaaaaaaaaaaaaaaaaaaaaaaaaaaaaaaaaaaaaaaaaaaaaaaaaaaaaaugcaucccccccccccccccccccccccccccccccaaaggcucuuuucagagccaccagaauu

SEQ ID NO: 5346 - RNA, 1906 nt, Artificial Sequence
  mRNA product Design a-2 comprising derived and/or modified sequence from HRSV(A2)__F_DSCav1_mut5 (opt3)
gggagaguccgcucagccagguugcagaagcggcuuagcguguguccuaaucuucucucugcguguagguaggccugugccgcaaacaagcuuaccauggagcugcucauccuuaaggccaacgcuauuaccacaauacugacugcagugacguucugcuuugccagcggccagaauaucaccgaagaguucuaccaauccacauguucugcggucucaaaaggguauuugagugcuuuaagaacuggaugguacaccagcguuauuacaaucgaacuguccaacauuaaggagaauaaaugcaacgguaccgacgccaaggugaaacuaaucaagcaggaacucgauaaguauaaaaaugcaguaacugagcugcagcuucugaugcagucuacacccgccaccggcucggggucagcuauagcaagcggaguggccgucuguaagguguugcaccucgagggcgaaguuaacaaaaucaagagugcucugcuguccacgaauaaagccguggucucucucagcgguugcgggguguccguauuaacuuuuaagguucuggaccuuaagaacuacauugauaaacaauugcugccuauccuaaauaagcagucauguaguauuagcaacaucgagaccgugauagaguuccagcagaaaaauaacaggcuccuggaaauuacacgggaguuuucugucaaugcgggagugacuaccccaguguccacauauaugcuuaccaacucagaacuguugagccucaucaaugacaugccgauuacgaacgaucaaaagaaacugaugaguaacaauguccagaucguucgccagcagucuuacuccaucaugugcauuauaaaggaggaaguguuagcauauguagugcaacugccccucuacggcgucaucgacacuccuuguuggaaacuucauacaagcccacugugcaccacuaacacaaaggagggcucgaauauuuguuugacccgaacggaucgugggugguacugcgacaacgccggaucuguguccuucuuuccccaggcugaaaccuguaagguucagucaaauagaguguucugcgauacaaugaacaguagaacucugccuagcgaggucaaucucugcaacguggacaucuuuaauccaaaauaugauuguaagauaaugaccuccaaaacagacguaucuagcucaguuauuaccagucugggugccaucguguccugcuacggcaagacuaaauguacagcaagcaacaagugcagggggaucauuaagaccuucucuaauggaugugauuaugucucaaacaaaggcguggacacugucaguguggguaauacgcuuuacuauguuaacaagcaagaggggaaaagccuguacgugaagggagaacccaucauuaauuuuuaugacccuuugguauucccauccgaugaguuugacgcuucuauaucgcaggucaacgagaaaaucaaccagagccucgccuucauucggaaguccgaugaacuguuacacaaugugaacgcgggcaagucaacaaccaauaucaugaucacuaccauuauaaucguuauuaucgugauucugcuaagucucaucgccgucggccugcuuuuguacugcaaagcacgcucuacaccggugacccugagcaaggaccagcucuccgggauaaacaauaucgcuuucucaaacugaggacuagucccuguucccagagcccacuuuuuuuucuuuuuuugaaauaaaauagccugucuuucagaucuaaaaaaaaaaaaaaaaaaaaaaaaaaaaaaaaaaaaaaaaaaaaaaaaaaaaaaaaaaaaaaaaugcaucccccccccccccccccccccccccccccccaaaggcucuuuucagagccaccagaauu

SEQ ID NO: 5347 - RNA, 1906 nt, Artificial Sequence
  mRNA product Design a-2 comprising derived and/or modified sequence from HRSV(A2)__F_DSCav1_mut5 (opt4)
gggagaguccgcucagccagguugcagaagcggcuuagcguguguccuaaucuucucucugcguguagguaggccugugccgcaaacaagcuuaccauggagcugcugauccugaaggccaacgccaucaccaccauccugaccgccgugaccuucugcuucgccagcggccagaacaucaccgaggaguucuaccagagcaccugcagcgccgugagcaagggcuaccugagcgcccugagaaccggcugguacaccagcgugaucaccaucgagcugagcaacaucaaggagaacaagugcaacggcaccgacgccaaggugaagcugaucaagcaggagcuggacaaguacaagaacgccgugaccgagcugcagcugcugaugcagagcacccccgccaccggcagcggcagcgccaucgccagcggcguggccgugugcaaggugcugcaccuggagggcgaggugaacaagaucaagagcgcccugcugagcaccaacaaggccguggugagccugagcggcugcggcgugagcgugcugaccuucaaggugcuggaccugaagaacuacaucgacaagcagcugcugcccauccugaacaagcagagcugcagcaucagcaacaucgagaccgugaucgaguuccagcagaagaacaacagacugcuggagaucaccagagaguucagcgugaacgccggcgugaccacccccgugagcaccuacaugcugaccaacagcgagcugcugagccugaucaacgacaugcccaucaccaacgaccagaagaagcugaugagcaacaacgugcagaucgugagacagcagagcuacagcaucaugugcaucaucaaggaggaggugcuggccuacguggugcagcugccccuguacggcgugaucgacacccccugcuggaagcugcacaccagcccccugugcaccaccaacaccaaggagggcagcaacaucugccugaccagaaccgacagaggcugguacugcgacaacgccggcagcgugagcuucuucccccaggccgagaccugcaaggugcagagcaacagaguguucugcgacaccaugaacagcagaacccugcccagcgaggugaaccugugcaacguggacaucuucaaccccaaguacgacugcaagaucaugaccagcaagaccgacgugagcagcagcgugaucaccagccugggcgccaucgugagcugcuacggcaagaccaagugcaccgccagcaacaagugcagaggcaucaucaagaccuucagcaacggcugcgacuacgugagcaacaagggcguggacaccgugagcgugggcaacacccuguacuacgugaacaagcaggagggcaagagccuguacgugaagggcgagcccaucaucaacuucuacgacccccugguguuccccagcgacgaguucgacgccagcaucagccaggugaacgagaagaucaaccagagccuggccuucaucagaaagagcgacgagcugcugcacaacgugaacgccggcaagagcaccaccaacaucaugaucaccaccaucaucaucgugaucaucgugauccugcugagccugaucgccgugggccugcugcuguacugcaaggccagaagcacccccgugacccugagcaaggaccagcugagcggcaucaacaacaucgccuucagcaacugaggacuagucccuguucccagagcccacuuuuuuuucuuuuuuugaaauaaaauagccugucuuucagaucuaaaaaaaaaaaaaaaaaaaaaaaaaaaaaaaaaaaaaaaaaaaaaaaaaaaaaaaaaaaaaaaaugcaucccccccccccccccccccccccccccccccaaaggcucuuuucagagccaccagaauu

SEQ ID NO: 5348 - RNA, 1906 nt, Artificial Sequence
  mRNA product Design a-2 comprising derived and/or modified sequence from HRSV(A2)__F_DSCav1_mut5 (opt5)
gggagaguccgcucagccagguugcagaagcggcuuagcguguguccuaaucuucucucugcguguagguaggccugugccgcaaacaagcuuaccauggagcugcucauccugaaggccaacgcuauuaccacaauccuuacggccgugaccuucugcuuugcgagcggccagaauauuacagaagaguucuaccaauccaccuguucugcugucagcaaaggguaucuguccgcccucagaacaggaugguacaccucuguuaucacaauugaacugagcaacaucaaggagaauaaaugcaacggcaccgacgccaaggugaaacuuaucaagcaggaacuggauaaguauaaaaaugcugugacggagcuccagcugcugaugcaguccacccccgccacagggucuggaagcgcuauugccuccggcgucgcgguguguaagguucuccaccuggagggggaagugaacaaaaucaagagcgcccuucugucuaccaauaaagcugucgugucccucagcggaugcggcguuucugugcugacauuuaagguccuugaccugaagaacuacauugauaaacaacuccugccuauccugaauaagcaguccuguagcauuucuaacaucgagaccgugauugaguuccagcagaaaaauaaccggcuccuggaaaucacgcgcgaguuuuccgugaaugccggcgucacaaccccgguuagcacauauaugcuuaccaacuccgaacugcucucucugaucaaugacaugcccauuaccaacgaucaaaagaaacuuaugagcaacaaugugcagaucgugagacagcaguccuacagcauuaugugcaucauuaaggaggaaguccuggcuuaugugguucaacucccucuguacggggugaucgacacacccuguuggaaacugcauacgucuccucucugcaccacaaacaccaaggagggauccaauaucugucugacacggaccgaucgcggcugguacugcgacaacgccgggagcgucucuuucuuuccccaggcggaaacguguaaggugcagagcaauagaguuuucugcgauacaaugaacuccagaacccugccuucugaggugaaucucugcaacgucgacauuuuuaauccgaaauaugauuguaagaucaugaccagcaaaacagacguguccagcucugucauuaccucccugggagccaucgugagcugcuacggcaagacaaaauguacggcuucuaacaagugccgggggauuaucaagaccuucuccaauggaugugauuauguuagcaacaaaggcguggacacagucuccgugggcaauacccuuuacuauguuaacaagcaagaggggaaaucucuguacgugaagggagaacccaucauuaauuuuuaugacccucucgucuuccccagcgaugaguuugacgccuccaucucucaggugaacgagaaaauuaaccagagccuggcuuucauccgcaaguccgaugaacugcuccacaaugugaacgccggcaagagcacaaccaauauuaugaucacgaccauuaucaucguuauuaucgucauucugcuuucucugaucgccguggggcuccugcuguacugcaaagcuagauccacaccugugacccuuagcaaggaccagcucucuggaauuaacaauaucgcguucuccaacugaggacuagucccuguucccagagcccacuuuuuuuucuuuuuuugaaauaaaauagccugucuuucagaucuaaaaaaaaaaaaaaaaaaaaaaaaaaaaaaaaaaaaaaaaaaaaaaaaaaaaaaaaaaaaaaaaugcaucccccccccccccccccccccccccccccccaaaggcucuuuucagagccaccagaauu

SEQ ID NO: 5349 - RNA, 1906 nt, Artificial Sequence
  mRNA product Design a-2 comprising derived and/or modified sequence from HRSV(A2)__F_DSCav1_mut5 (opt6)
gggagaguccgcucagccagguugcagaagcggcuuagcguguguccuaaucuucucucugcguguagguaggccugugccgcaaacaagcuuaccauggaacuauuaauacuuaaagccaacgcaauaacaacaauucucacugcugucaccuucugcuucgccucaggccaaaacauaacggaagaauuuuaccaaucaacaugcucugcaguauccaaaggcuaccuaucugcucuaagaacagguugguauacaucaguaauaaccauagaacuaucaaacauaaaagaaaauaaaugcaacggaacagacgcaaaaguuaaacucauaaaacaagaacuagacaaauauaaaaacgcaguuaccgaacuacaacuacuuaugcaauccacucccgccacuggaucaggaucagcaauagcaucaggagucgcaguauguaaagucuuacaccucgaaggcgaagucaauaaaaucaaauccgcauuacuauccacaaacaaagcagucguaucccuaagcggaugcggaguaucaguacuaacauuuaaaguacuagaccuaaaaaauuacaucgauaaacaacuauuaccuauauuaaacaaacaauccugcuccauuucaaauaucgaaaccguaauagaauuucaacaaaaaaacaacagauuacuagaaauaacaagagaauuuuccguaaaugcuggcguaacaacaccaguauccacauacaugcucacaaacuccgaacuacuaucacuaauaaaugacaugcccauaacaaacgaucaaaaaaaacuaaugucaaauaauguacaaauaguaagacaacaaagcuacuccaucauguguauaauaaaagaagaaguacuagcauacguaguucaacuaccacuuuacggcguaaucgacaccccuugcuggaaacuacacaccuccccucuaugcaccacaaacacaaaagaagguuccaacauaugccuuaccagaacagacagaggcugguauugcgacaacgcaggaucaguuucauuuuuuccacaagcugaaacaugcaaaguacaaucaaacagagucuucugcgacacaaugaacucaagaacucuacccucagaaguaaaccuauguaacguagacauuuucaaccccaaauacgacugcaaaauuaugacaucaaaaacagacguuucaucaucaguuaucaccucauuaggagcaauaguaagcugcuacggaaaaacaaaaugcaccgccucaaauaaaugcagaggaauaauaaaaacuuucuccaacggaugcgacuacguuucaaacaaagguguagacacuguaucaguaggaaacacacuauauuacguaaauaaacaagaaggaaaaucacuuuaugucaaaggagaaccaauaaucaauuucuacgacccauuaguauucccaucagacgaauuugaugcuucaauaucacaaguaaacgaaaaaauaaaucaaucacucgcauuuauacgaaaaucagacgaacuacuacacaauguaaacgcaggcaaaucaacaacaaacauaaugauaacaacaauaaucauuguaauaauaguaauacuucuaucucuaauagcaguaggauuacuccucuacugcaaagcaagaucaaccccuguaacacuaucaaaagaccaacuuucagguauaaauaauauagcuuuuuccaauuaaggacuagucccuguucccagagcccacuuuuuuuucuuuuuuugaaauaaaauagccugucuuucagaucuaaaaaaaaaaaaaaaaaaaaaaaaaaaaaaaaaaaaaaaaaaaaaaaaaaaaaaaaaaaaaaaaugcaucccccccccccccccccccccccccccccccaaaggcucuuuucagagccaccagaauu

SEQ ID NO: 5350 - RNA, 1906 nt, Artificial Sequence
  mRNA product Design a-2 comprising derived and/or modified sequence from HRSV(A2)__F_DSCav1_mut5 (opt11)
gggagaguccgcucagccagguugcagaagcggcuuagcguguguccuaaucuucucucugcguguagguaggccugugccgcaaacaagcuuaccauggagcuccuaauccucaaagccaacgcgaucacuacaauccucacagccgucaccuucugcuucgccuccggccaaaacaucaccgaggaguucuaccaaucaaccugcuccgccguaucaaaaggauaccuaagcgcccuacggaccggcugguacacaucugucaucaccaucgaacuaucaaacaucaaagaaaacaaaugcaacggaaccgacgcaaaagucaaacugauuaaacaagaacuagacaaauacaaaaacgcagucaccgaacugcaauuacucaugcaaagcacaccggccaccggcucaggcagcgccaucgccuccggcgucgccgucugcaaaguucuccaccucgagggcgaagucaacaaaauaaaaucugcccuccucuccaccaacaaagccgucgucucccucagcggcugcggagucuccguccucaccuucaaaguucucgaucucaagaacuauauugacaaacaacuucuacccauacucaacaaacaaagcugcagcauauccaacaucgaaaccgucaucgaguuccaacaaaagaacaaccgccuccucgaaauaacccgcgaguucagcguuaacgccggagucacuaccccugucuccaccuacaugcucaccaacuccgaacuccuaucacuaaucaacgacaugcccauaaccaacgaccagaagaaacucauguccaacaacguccaaauuguccgacaacaaagcuacuccauaaugugcauaauaaaagaggaaguccucgccuacgucguacaacugccccuuuauggcguaaucgacacacccugcuggaaacuccacacgucaccccucugcaccaccaacacaaaagaaggcucgaacaucugccuaacacggacugaccgcggcugguacugcgacaacgccggcuccgucagcuucuucccacaagccgaaaccugcaaaguacaauccaaccgaguauucugcgacaccaugaacuccagaacccuccccucagaggucaaccugugcaacguagacaucuucaaccccaaauacgacugcaaaauaaugaccucaaaaacagacgucuccucuuccguaaucaccagccucggagccaucgucagcugcuacggcaaaaccaaaugcaccgccucaaacaaaugccgcggcaucaucaaaacauucucaaacggcugcgacuacgucuccaacaaaggcgucgacacaguaagcguaggcaacacacuguacuacgucaacaaacaagagggaaaaucacucuacgucaaaggagaacccauaaucaacuucuacgacccccucguuuuccccagcgacgaguucgacgccagcauaucccaagucaacgagaaaauuaaccaaucccuagcauucauccgaaaaucugacgaacugcuccacaacgucaacgcgggaaaaucaacaaccaacauaaugauaaccacaaucauaauagucaucaucguaauccuccucagccuaaucgcugucggccuccuccucuacugcaaagcccguuccaccccagucacacuuuccaaggaccaacuaagcggaauaaacaacaucgcguucucaaacuaaggacuagucccuguucccagagcccacuuuuuuuucuuuuuuugaaauaaaauagccugucuuucagaucuaaaaaaaaaaaaaaaaaaaaaaaaaaaaaaaaaaaaaaaaaaaaaaaaaaaaaaaaaaaaaaaaugcaucccccccccccccccccccccccccccccccaaaggcucuuuucagagccaccagaauu

SEQ ID NO: 5351 - RNA, 1984 nt, Artificial Sequence
  mRNA product Design a-3 comprising derived and/or modified sequence from HRSV(A2)__F_DSCav1_mut5 (opt1)
gggagagggcgcuuggcuugcaaggacccugagcugcggcauugaagcacacccaacccaacucgacugaagucagccucacugaaccggaucugagaaucuucucucucugggcuugccagggcucuccgaaccuagcuagcauccucuucaauuccaacuagaaagcuuaccauggagcugcucauccugaaggccaacgccaucaccaccauccugacggcggugaccuucugcuucgccagcggccagaacaucaccgaggaguucuaccaguccacgugcagcgccgucuccaagggguaccucagcgcccugcggaccggcugguacaccuccgugaucaccaucgagcugagcaacaucaaggagaacaagugcaacgggaccgacgccaaggugaagcucaucaagcaggagcuggacaaguacaagaacgcggucacggagcugcagcuccugaugcaguccaccccggcaaccggcuccggcuccgccaucgcgagcggcgucgccgugugcaaggugcugcaccucgagggggaggucaacaagaucaagagcgcccugcuguccaccaacaaggccguggugagccucuccggcugcggcgucagcgugcugaccuucaaggugcuggaccucaagaacuacaucgacaagcagcugcugcccauccugaacaagcagagcugcuccaucagcaacaucgagacggugaucgaguuccagcagaagaacaaccggcuccuggagaucacccgcgaguucagcgugaacgccggggucaccacccccguguccacguacaugcugaccaacagcgagcuccugucccugaucaacgacaugccgaucaccaacgaccagaagaagcucaugagcaacaacgugcagaucguccggcagcaguccuacagcaucaugugcaucaucaaggaggaggugcuggcguacgugguccagcugccccucuacggcgugaucgacacccccugcuggaagcugcacacgagcccccugugcaccaccaacaccaaggagggguccaacaucugccucacgcgcaccgaccggggcugguacugcgacaacgccggcagcgucuccuucuucccgcaggccgagaccugcaaggugcagagcaaccgcguguucugcgacaccaugaacucccggacgcugcccagcgagguaaaccucugcaacgucgacaucuucaaccccaaguacgacugcaagaucaugaccuccaagaccgacgugagcuccagcgugaucaccucccugggggccaucgucagcugcuacggcaagacgaagugcaccgccagcaacaagugccgggggaucaucaagaccuucuccaacggcugcgacuacgugagcaacaagggcguggacaccguguccgucgggaacacccuguacuacgugaacaagcaggagggcaagagccucuacgugaagggggagcccaucaucaacuucuacgacccgcuggucuuccccuccgacgaguucgacgcgagcaucucccaggugaacgagaagaucaaccagagccuggccuucauccgcaaguccgacgagcugcuccacaacgugaacgccggcaagagcacgaccaacaucaugaucaccaccaucaucaucgucaucaucgugauccugcugucccucaucgccguggggcugcugcucuacugcaaggcccggagcacgcccgucacccuguccaaggaccagcugagcggcaucaacaacaucgcguucuccaacugaggacuagucccuguucccagagcccacuuuuuuuucuuuuuuugaaauaaaauagccugucuuucagaucuaaaaaaaaaaaaaaaaaaaaaaaaaaaaaaaaaaaaaaaaaaaaaaaaaaaaaaaaaaaaaaaaugcaucccccccccccccccccccccccccccccccaaaggcucuuuucagagccaccagaauu

SEQ ID NO: 5352 - RNA, 1984 nt, Artificial Sequence
  mRNA product Design a-3 comprising derived and/or modified sequence from HRSV(A2)__F_DSCav1_mut5 (opt1)
gggagagggcgcuuggcuugcaaggacccugagcugcggcauugaagcacacccaacccaacucgacugaagucagccucacugaaccggaucugagaaucuucucucucugggcuugccagggcucuccgaaccuagcuagcauccucuucaauuccaacuagaaagcuuaccauggagcugcucauccugaaggccaacgccaucaccaccauccugacggcggugaccuucugcuucgccagcggccagaacaucaccgaggaguucuaccaguccacgugcagcgccgucuccaagggguaccucagcgcccugcgcaccggcugguacaccuccgugaucaccaucgagcugagcaacaucaaggagaacaagugcaacgggaccgacgccaaggugaagcucaucaagcaggagcuggacaaguacaagaacgcggucacggagcugcagcuccugaugcaguccacccccgccaccggcagcggguccgccaucgccagcggcguggcggugugcaagguccugcaccucgagggcgaggugaacaagaucaaguccgcccugcugagcaccaacaaggccguggucucccucagcgggugcggcguguccgugcugacguucaagguccuggaccucaagaacuacaucgacaagcagcugcugccgauccucaacaagcagagcugcuccaucagcaacaucgagaccgugaucgaguuccagcagaagaacaaccggcugcuggagaucacccgcgaguucuccgugaacgccggggucaccacgcccgugagcaccuacaugcucaccaacagcgagcugcugucccucaucaacgacaugcccaucaccaacgaccagaagaagcugaugagcaacaacgugcagaucguccggcagcaguccuacagcaucaugugcaucaucaaggaggaggugcuggccuacgugguccagcucccccuguacggcgugaucgacacgccgugcuggaagcugcacaccagcccccucugcaccaccaacacgaaggagggguccaacaucugccugacccgcaccgaccggggcugguacugcgacaacgcgggcuccgugagcuucuucccccaggccgagaccugcaagguccaguccaaccgcguguucugcgacacgaugaacagccggacccuccccuccgaggucaaccugugcaacguggacaucuucaacccgaaguacgacugcaagaucaugaccagcaagaccgacguguccagcuccgucaucacgagccugggggccaucguguccugcuacggcaagaccaagugcaccgccagcaacaagugccgggggaucaucaagaccuucuccaacggcugcgacuacgugagcaacaagggcgucgacacggugagcguggggaacacccucuacuacgucaacaagcaggagggcaagucccuguacgugaagggggagcccaucaucaacuucuacgacccccugguguuccccagcgacgaguucgacgccuccaucagccaggucaacgagaagaucaaccagucccucgcguucauccgcaagagcgacgagcugcugcacaacgugaacgccggcaaguccaccaccaacaucaugaucaccacgaucaucaucgugaucaucgucauccuccugagccugaucgccguggggcuccugcuguacugcaaggcccgguccaccccggugacccugagcaaggaccagcucuccggcaucaacaacaucgccuucagcaacugaggacuagucccuguucccagagcccacuuuuuuuucuuuuuuugaaauaaaauagccugucuuucagaucuaaaaaaaaaaaaaaaaaaaaaaaaaaaaaaaaaaaaaaaaaaaaaaaaaaaaaaaaaaaaaaaaugcaucccccccccccccccccccccccccccccccaaaggcucuuuucagagccaccagaauu

SEQ ID NO: 5353 - RNA, 1984 nt, Artificial Sequence
  mRNA product Design a-3 comprising derived and/or modified sequence from HRSV(A2)__F_DSCav1_mut5 (opt2)
gggagagggcgcuuggcuugcaaggacccugagcugcggcauugaagcacacccaacccaacucgacugaagucagccucacugaaccggaucugagaaucuucucucucugggcuugccagggcucuccgaaccuagcuagcauccucuucaauuccaacuagaaagcuuaccauggagcuccucauccucaaggccaacgccaucaccaccauccucaccgccgucaccuucugcuucgccuccggccagaacaucaccgaggaguucuaccaguccaccugcuccgccgucuccaagggcuaccucuccgcccuccgcaccggcugguacaccuccgucaucaccaucgagcucuccaacaucaaggagaacaagugcaacggcaccgacgccaaggucaagcucaucaagcaggagcucgacaaguacaagaacgccgucaccgagcuccagcuccucaugcaguccacccccgccaccggcuccggcuccgccaucgccuccggcgucgccgucugcaagguccuccaccucgagggcgaggucaacaagaucaaguccgcccuccucuccaccaacaaggccgucgucucccucuccggcugcggcgucuccguccucaccuucaagguccucgaccucaagaacuacaucgacaagcagcuccuccccauccucaacaagcaguccugcuccaucuccaacaucgagaccgucaucgaguuccagcagaagaacaaccgccuccucgagaucacccgcgaguucuccgucaacgccggcgucaccacccccgucuccaccuacaugcucaccaacuccgagcuccucucccucaucaacgacaugcccaucaccaacgaccagaagaagcucauguccaacaacguccagaucguccgccagcaguccuacuccaucaugugcaucaucaaggaggagguccucgccuacgucguccagcucccccucuacggcgucaucgacacccccugcuggaagcuccacaccuccccccucugcaccaccaacaccaaggagggcuccaacaucugccucacccgcaccgaccgcggcugguacugcgacaacgccggcuccgucuccuucuucccccaggccgagaccugcaagguccaguccaaccgcgucuucugcgacaccaugaacucccgcacccuccccuccgaggucaaccucugcaacgucgacaucuucaaccccaaguacgacugcaagaucaugaccuccaagaccgacgucuccuccuccgucaucaccucccucggcgccaucgucuccugcuacggcaagaccaagugcaccgccuccaacaagugccgcggcaucaucaagaccuucuccaacggcugcgacuacgucuccaacaagggcgucgacaccgucuccgucggcaacacccucuacuacgucaacaagcaggagggcaagucccucuacgucaagggcgagcccaucaucaacuucuacgacccccucgucuuccccuccgacgaguucgacgccuccaucucccaggucaacgagaagaucaaccagucccucgccuucauccgcaaguccgacgagcuccuccacaacgucaacgccggcaaguccaccaccaacaucaugaucaccaccaucaucaucgucaucaucgucauccuccucucccucaucgccgucggccuccuccucuacugcaaggcccgcuccacccccgucacccucuccaaggaccagcucuccggcaucaacaacaucgccuucuccaacugaggacuagucccuguucccagagcccacuuuuuuuucuuuuuuugaaauaaaauagccugucuuucagaucuaaaaaaaaaaaaaaaaaaaaaaaaaaaaaaaaaaaaaaaaaaaaaaaaaaaaaaaaaaaaaaaaugcaucccccccccccccccccccccccccccccccaaaggcucuuuucagagccaccagaauu

SEQ ID NO: 5354 - RNA, 1984 nt, Artificial Sequence
  mRNA product Design a-3 comprising derived and/or modified sequence from HRSV(A2)__F_DSCav1_mut5 (opt3)
gggagagggcgcuuggcuugcaaggacccugagcugcggcauugaagcacacccaacccaacucgacugaagucagccucacugaaccggaucugagaaucuucucucucugggcuugccagggcucuccgaaccuagcuagcauccucuucaauuccaacuagaaagcuuaccauggagcugcucauccuuaaggccaacgcuauuaccacaauacugacugcagugacguucugcuuugccagcggccagaauaucaccgaagaguucuaccaauccacauguucugcggucucaaaaggguauuugagugcuuuaagaacuggaugguacaccagcguuauuacaaucgaacuguccaacauuaaggagaauaaaugcaacgguaccgacgccaaggugaaacuaaucaagcaggaacucgauaaguauaaaaaugcaguaacugagcugcagcuucugaugcagucuacacccgccaccggcucggggucagcuauagcaagcggaguggccgucuguaagguguugcaccucgagggcgaaguuaacaaaaucaagagugcucugcuguccacgaauaaagccguggucucucucagcgguugcgggguguccguauuaacuuuuaagguucuggaccuuaagaacuacauugauaaacaauugcugccuauccuaaauaagcagucauguaguauuagcaacaucgagaccgugauagaguuccagcagaaaaauaacaggcuccuggaaauuacacgggaguuuucugucaaugcgggagugacuaccccaguguccacauauaugcuuaccaacucagaacuguugagccucaucaaugacaugccgauuacgaacgaucaaaagaaacugaugaguaacaauguccagaucguucgccagcagucuuacuccaucaugugcauuauaaaggaggaaguguuagcauauguagugcaacugccccucuacggcgucaucgacacuccuuguuggaaacuucauacaagcccacugugcaccacuaacacaaaggagggcucgaauauuuguuugacccgaacggaucgugggugguacugcgacaacgccggaucuguguccuucuuuccccaggcugaaaccuguaagguucagucaaauagaguguucugcgauacaaugaacaguagaacucugccuagcgaggucaaucucugcaacguggacaucuuuaauccaaaauaugauuguaagauaaugaccuccaaaacagacguaucuagcucaguuauuaccagucugggugccaucguguccugcuacggcaagacuaaauguacagcaagcaacaagugcagggggaucauuaagaccuucucuaauggaugugauuaugucucaaacaaaggcguggacacugucaguguggguaauacgcuuuacuauguuaacaagcaagaggggaaaagccuguacgugaagggagaacccaucauuaauuuuuaugacccuuugguauucccauccgaugaguuugacgcuucuauaucgcaggucaacgagaaaaucaaccagagccucgccuucauucggaaguccgaugaacuguuacacaaugugaacgcgggcaagucaacaaccaauaucaugaucacuaccauuauaaucguuauuaucgugauucugcuaagucucaucgccgucggccugcuuuuguacugcaaagcacgcucuacaccggugacccugagcaaggaccagcucuccgggauaaacaauaucgcuuucucaaacugaggacuagucccuguucccagagcccacuuuuuuuucuuuuuuugaaauaaaauagccugucuuucagaucuaaaaaaaaaaaaaaaaaaaaaaaaaaaaaaaaaaaaaaaaaaaaaaaaaaaaaaaaaaaaaaaaugcaucccccccccccccccccccccccccccccccaaaggcucuuuucagagccaccagaauu

SEQ ID NO: 5355 - RNA, 1984 nt, Artificial Sequence
  mRNA product Design a-3 comprising derived and/or modified sequence from HRSV(A2)__F_DSCav1_mut5 (opt4)
gggagagggcgcuuggcuugcaaggacccugagcugcggcauugaagcacacccaacccaacucgacugaagucagccucacugaaccggaucugagaaucuucucucucugggcuugccagggcucuccgaaccuagcuagcauccucuucaauuccaacuagaaagcuuaccauggagcugcugauccugaaggccaacgccaucaccaccauccugaccgccgugaccuucugcuucgccagcggccagaacaucaccgaggaguucuaccagagcaccugcagcgccgugagcaagggcuaccugagcgcccugagaaccggcugguacaccagcgugaucaccaucgagcugagcaacaucaaggagaacaagugcaacggcaccgacgccaaggugaagcugaucaagcaggagcuggacaaguacaagaacgccgugaccgagcugcagcugcugaugcagagcacccccgccaccggcagcggcagcgccaucgccagcggcguggccgugugcaaggugcugcaccuggagggcgaggugaacaagaucaagagcgcccugcugagcaccaacaaggccguggugagccugagcggcugcggcgugagcgugcugaccuucaaggugcuggaccugaagaacuacaucgacaagcagcugcugcccauccugaacaagcagagcugcagcaucagcaacaucgagaccgugaucgaguuccagcagaagaacaacagacugcuggagaucaccagagaguucagcgugaacgccggcgugaccacccccgugagcaccuacaugcugaccaacagcgagcugcugagccugaucaacgacaugcccaucaccaacgaccagaagaagcugaugagcaacaacgugcagaucgugagacagcagagcuacagcaucaugugcaucaucaaggaggaggugcuggccuacguggugcagcugccccuguacggcgugaucgacacccccugcuggaagcugcacaccagcccccugugcaccaccaacaccaaggagggcagcaacaucugccugaccagaaccgacagaggcugguacugcgacaacgccggcagcgugagcuucuucccccaggccgagaccugcaaggugcagagcaacagaguguucugcgacaccaugaacagcagaacccugcccagcgaggugaaccugugcaacguggacaucuucaaccccaaguacgacugcaagaucaugaccagcaagaccgacgugagcagcagcgugaucaccagccugggcgccaucgugagcugcuacggcaagaccaagugcaccgccagcaacaagugcagaggcaucaucaagaccuucagcaacggcugcgacuacgugagcaacaagggcguggacaccgugagcgugggcaacacccuguacuacgugaacaagcaggagggcaagagccuguacgugaagggcgagcccaucaucaacuucuacgacccccugguguuccccagcgacgaguucgacgccagcaucagccaggugaacgagaagaucaaccagagccuggccuucaucagaaagagcgacgagcugcugcacaacgugaacgccggcaagagcaccaccaacaucaugaucaccaccaucaucaucgugaucaucgugauccugcugagccugaucgccgugggccugcugcuguacugcaaggccagaagcacccccgugacccugagcaaggaccagcugagcggcaucaacaacaucgccuucagcaacugaggacuagucccuguucccagagcccacuuuuuuuucuuuuuuugaaauaaaauagccugucuuucagaucuaaaaaaaaaaaaaaaaaaaaaaaaaaaaaaaaaaaaaaaaaaaaaaaaaaaaaaaaaaaaaaaaugcaucccccccccccccccccccccccccccccccaaaggcucuuuucagagccaccagaauu

SEQ ID NO: 5356 - RNA, 1984 nt, Artificial Sequence
  mRNA product Design a-3 comprising derived and/or modified sequence from HRSV(A2)__F_DSCav1_mut5 (opt5)
gggagagggcgcuuggcuugcaaggacccugagcugcggcauugaagcacacccaacccaacucgacugaagucagccucacugaaccggaucugagaaucuucucucucugggcuugccagggcucuccgaaccuagcuagcauccucuucaauuccaacuagaaagcuuaccauggagcugcucauccugaaggccaacgcuauuaccacaauccuuacggccgugaccuucugcuuugcgagcggccagaauauuacagaagaguucuaccaauccaccuguucugcugucagcaaaggguaucuguccgcccucagaacaggaugguacaccucuguuaucacaauugaacugagcaacaucaaggagaauaaaugcaacggcaccgacgccaaggugaaacuuaucaagcaggaacuggauaaguauaaaaaugcugugacggagcuccagcugcugaugcaguccacccccgccacagggucuggaagcgcuauugccuccggcgucgcgguguguaagguucuccaccuggagggggaagugaacaaaaucaagagcgcccuucugucuaccaauaaagcugucgugucccucagcggaugcggcguuucugugcugacauuuaagguccuugaccugaagaacuacauugauaaacaacuccugccuauccugaauaagcaguccuguagcauuucuaacaucgagaccgugauugaguuccagcagaaaaauaaccggcuccuggaaaucacgcgcgaguuuuccgugaaugccggcgucacaaccccgguuagcacauauaugcuuaccaacuccgaacugcucucucugaucaaugacaugcccauuaccaacgaucaaaagaaacuuaugagcaacaaugugcagaucgugagacagcaguccuacagcauuaugugcaucauuaaggaggaaguccuggcuuaugugguucaacucccucuguacggggugaucgacacacccuguuggaaacugcauacgucuccucucugcaccacaaacaccaaggagggauccaauaucugucugacacggaccgaucgcggcugguacugcgacaacgccgggagcgucucuuucuuuccccaggcggaaacguguaaggugcagagcaauagaguuuucugcgauacaaugaacuccagaacccugccuucugaggugaaucucugcaacgucgacauuuuuaauccgaaauaugauuguaagaucaugaccagcaaaacagacguguccagcucugucauuaccucccugggagccaucgugagcugcuacggcaagacaaaauguacggcuucuaacaagugccgggggauuaucaagaccuucuccaauggaugugauuauguuagcaacaaaggcguggacacagucuccgugggcaauacccuuuacuauguuaacaagcaagaggggaaaucucuguacgugaagggagaacccaucauuaauuuuuaugacccucucgucuuccccagcgaugaguuugacgccuccaucucucaggugaacgagaaaauuaaccagagccuggcuuucauccgcaaguccgaugaacugcuccacaaugugaacgccggcaagagcacaaccaauauuaugaucacgaccauuaucaucguuauuaucgucauucugcuuucucugaucgccguggggcuccugcuguacugcaaagcuagauccacaccugugacccuuagcaaggaccagcucucuggaauuaacaauaucgcguucuccaacugaggacuagucccuguucccagagcccacuuuuuuuucuuuuuuugaaauaaaauagccugucuuucagaucuaaaaaaaaaaaaaaaaaaaaaaaaaaaaaaaaaaaaaaaaaaaaaaaaaaaaaaaaaaaaaaaaugcaucccccccccccccccccccccccccccccccaaaggcucuuuucagagccaccagaauu

SEQ ID NO: 5357 - RNA, 1984 nt, Artificial Sequence
  mRNA product Design a-3 comprising derived and/or modified sequence from HRSV(A2)__F_DSCav1_mut5 (opt6)
gggagagggcgcuuggcuugcaaggacccugagcugcggcauugaagcacacccaacccaacucgacugaagucagccucacugaaccggaucugagaaucuucucucucugggcuugccagggcucuccgaaccuagcuagcauccucuucaauuccaacuagaaagcuuaccauggaacuauuaauacuuaaagccaacgcaauaacaacaauucucacugcugucaccuucugcuucgccucaggccaaaacauaacggaagaauuuuaccaaucaacaugcucugcaguauccaaaggcuaccuaucugcucuaagaacagguugguauacaucaguaauaaccauagaacuaucaaacauaaaagaaaauaaaugcaacggaacagacgcaaaaguuaaacucauaaaacaagaacuagacaaauauaaaaacgcaguuaccgaacuacaacuacuuaugcaauccacucccgccacuggaucaggaucagcaauagcaucaggagucgcaguauguaaagucuuacaccucgaaggcgaagucaauaaaaucaaauccgcauuacuauccacaaacaaagcagucguaucccuaagcggaugcggaguaucaguacuaacauuuaaaguacuagaccuaaaaaauuacaucgauaaacaacuauuaccuauauuaaacaaacaauccugcuccauuucaaauaucgaaaccguaauagaauuucaacaaaaaaacaacagauuacuagaaauaacaagagaauuuuccguaaaugcuggcguaacaacaccaguauccacauacaugcucacaaacuccgaacuacuaucacuaauaaaugacaugcccauaacaaacgaucaaaaaaaacuaaugucaaauaauguacaaauaguaagacaacaaagcuacuccaucauguguauaauaaaagaagaaguacuagcauacguaguucaacuaccacuuuacggcguaaucgacaccccuugcuggaaacuacacaccuccccucuaugcaccacaaacacaaaagaagguuccaacauaugccuuaccagaacagacagaggcugguauugcgacaacgcaggaucaguuucauuuuuuccacaagcugaaacaugcaaaguacaaucaaacagagucuucugcgacacaaugaacucaagaacucuacccucagaaguaaaccuauguaacguagacauuuucaaccccaaauacgacugcaaaauuaugacaucaaaaacagacguuucaucaucaguuaucaccucauuaggagcaauaguaagcugcuacggaaaaacaaaaugcaccgccucaaauaaaugcagaggaauaauaaaaacuuucuccaacggaugcgacuacguuucaaacaaagguguagacacuguaucaguaggaaacacacuauauuacguaaauaaacaagaaggaaaaucacuuuaugucaaaggagaaccaauaaucaauuucuacgacccauuaguauucccaucagacgaauuugaugcuucaauaucacaaguaaacgaaaaaauaaaucaaucacucgcauuuauacgaaaaucagacgaacuacuacacaauguaaacgcaggcaaaucaacaacaaacauaaugauaacaacaauaaucauuguaauaauaguaauacuucuaucucuaauagcaguaggauuacuccucuacugcaaagcaagaucaaccccuguaacacuaucaaaagaccaacuuucagguauaaauaauauagcuuuuuccaauuaaggacuagucccuguucccagagcccacuuuuuuuucuuuuuuugaaauaaaauagccugucuuucagaucuaaaaaaaaaaaaaaaaaaaaaaaaaaaaaaaaaaaaaaaaaaaaaaaaaaaaaaaaaaaaaaaaugcaucccccccccccccccccccccccccccccccaaaggcucuuuucagagccaccagaauu

SEQ ID NO: 5358 - RNA, 1984 nt, Artificial Sequence
  mRNA product Design a-3 comprising derived and/or modified sequence from HRSV(A2)__F_DSCav1_mut5 (opt11)
gggagagggcgcuuggcuugcaaggacccugagcugcggcauugaagcacacccaacccaacucgacugaagucagccucacugaaccggaucugagaaucuucucucucugggcuugccagggcucuccgaaccuagcuagcauccucuucaauuccaacuagaaagcuuaccauggagcuccuaauccucaaagccaacgcgaucacuacaauccucacagccgucaccuucugcuucgccuccggccaaaacaucaccgaggaguucuaccaaucaaccugcuccgccguaucaaaaggauaccuaagcgcccuacggaccggcugguacacaucugucaucaccaucgaacuaucaaacaucaaagaaaacaaaugcaacggaaccgacgcaaaagucaaacugauuaaacaagaacuagacaaauacaaaaacgcagucaccgaacugcaauuacucaugcaaagcacaccggccaccggcucaggcagcgccaucgccuccggcgucgccgucugcaaaguucuccaccucgagggcgaagucaacaaaauaaaaucugcccuccucuccaccaacaaagccgucgucucccucagcggcugcggagucuccguccucaccuucaaaguucucgaucucaagaacuauauugacaaacaacuucuacccauacucaacaaacaaagcugcagcauauccaacaucgaaaccgucaucgaguuccaacaaaagaacaaccgccuccucgaaauaacccgcgaguucagcguuaacgccggagucacuaccccugucuccaccuacaugcucaccaacuccgaacuccuaucacuaaucaacgacaugcccauaaccaacgaccagaagaaacucauguccaacaacguccaaauuguccgacaacaaagcuacuccauaaugugcauaauaaaagaggaaguccucgccuacgucguacaacugccccuuuauggcguaaucgacacacccugcuggaaacuccacacgucaccccucugcaccaccaacacaaaagaaggcucgaacaucugccuaacacggacugaccgcggcugguacugcgacaacgccggcuccgucagcuucuucccacaagccgaaaccugcaaaguacaauccaaccgaguauucugcgacaccaugaacuccagaacccuccccucagaggucaaccugugcaacguagacaucuucaaccccaaauacgacugcaaaauaaugaccucaaaaacagacgucuccucuuccguaaucaccagccucggagccaucgucagcugcuacggcaaaaccaaaugcaccgccucaaacaaaugccgcggcaucaucaaaacauucucaaacggcugcgacuacgucuccaacaaaggcgucgacacaguaagcguaggcaacacacuguacuacgucaacaaacaagagggaaaaucacucuacgucaaaggagaacccauaaucaacuucuacgacccccucguuuuccccagcgacgaguucgacgccagcauaucccaagucaacgagaaaauuaaccaaucccuagcauucauccgaaaaucugacgaacugcuccacaacgucaacgcgggaaaaucaacaaccaacauaaugauaaccacaaucauaauagucaucaucguaauccuccucagccuaaucgcugucggccuccuccucuacugcaaagcccguuccaccccagucacacuuuccaaggaccaacuaagcggaauaaacaacaucgcguucucaaacuaaggacuagucccuguucccagagcccacuuuuuuuucuuuuuuugaaauaaaauagccugucuuucagaucuaaaaaaaaaaaaaaaaaaaaaaaaaaaaaaaaaaaaaaaaaaaaaaaaaaaaaaaaaaaaaaaaugcaucccccccccccccccccccccccccccccccaaaggcucuuuucagagccaccagaauu

SEQ ID NO: 5359 - RNA, 1933 nt, Artificial Sequence
  mRNA product Design a-4 comprising derived and/or modified sequence from HRSV(A2)__F_DSCav1_mut5 (opt1)
gggagacuccugucgggcggaaguaggaggaguagaguuuaaaaacaguacucuuuuuccgguucgggacguaguugaagcaacgacaagccggauaaccgcucuugagacaggaagcuuaccauggagcugcucauccugaaggccaacgccaucaccaccauccugacggcggugaccuucugcuucgccagcggccagaacaucaccgaggaguucuaccaguccacgugcagcgccgucuccaagggguaccucagcgcccugcggaccggcugguacaccuccgugaucaccaucgagcugagcaacaucaaggagaacaagugcaacgggaccgacgccaaggugaagcucaucaagcaggagcuggacaaguacaagaacgcggucacggagcugcagcuccugaugcaguccaccccggcaaccggcuccggcuccgccaucgcgagcggcgucgccgugugcaaggugcugcaccucgagggggaggucaacaagaucaagagcgcccugcuguccaccaacaaggccguggugagccucuccggcugcggcgucagcgugcugaccuucaaggugcuggaccucaagaacuacaucgacaagcagcugcugcccauccugaacaagcagagcugcuccaucagcaacaucgagacggugaucgaguuccagcagaagaacaaccggcuccuggagaucacccgcgaguucagcgugaacgccggggucaccacccccguguccacguacaugcugaccaacagcgagcuccugucccugaucaacgacaugccgaucaccaacgaccagaagaagcucaugagcaacaacgugcagaucguccggcagcaguccuacagcaucaugugcaucaucaaggaggaggugcuggcguacgugguccagcugccccucuacggcgugaucgacacccccugcuggaagcugcacacgagcccccugugcaccaccaacaccaaggagggguccaacaucugccucacgcgcaccgaccggggcugguacugcgacaacgccggcagcgucuccuucuucccgcaggccgagaccugcaaggugcagagcaaccgcguguucugcgacaccaugaacucccggacgcugcccagcgagguaaaccucugcaacgucgacaucuucaaccccaaguacgacugcaagaucaugaccuccaagaccgacgugagcuccagcgugaucaccucccugggggccaucgucagcugcuacggcaagacgaagugcaccgccagcaacaagugccgggggaucaucaagaccuucuccaacggcugcgacuacgugagcaacaagggcguggacaccguguccgucgggaacacccuguacuacgugaacaagcaggagggcaagagccucuacgugaagggggagcccaucaucaacuucuacgacccgcuggucuuccccuccgacgaguucgacgcgagcaucucccaggugaacgagaagaucaaccagagccuggccuucauccgcaaguccgacgagcugcuccacaacgugaacgccggcaagagcacgaccaacaucaugaucaccaccaucaucaucgucaucaucgugauccugcugucccucaucgccguggggcugcugcucuacugcaaggcccggagcacgcccgucacccuguccaaggaccagcugagcggcaucaacaacaucgcguucuccaacugaggacuagucccuguucccagagcccacuuuuuuuucuuuuuuugaaauaaaauagccugucuuucagaucuaaaaaaaaaaaaaaaaaaaaaaaaaaaaaaaaaaaaaaaaaaaaaaaaaaaaaaaaaaaaaaaaugcaucccccccccccccccccccccccccccccccaaaggcucuuuucagagccaccagaauu

SEQ ID NO: 5360 - RNA, 1933 nt, Artificial Sequence
  mRNA product Design a-4 comprising derived and/or modified sequence from HRSV(A2)__F_DSCav1_mut5 (opt1)
gggagacuccugucgggcggaaguaggaggaguagaguuuaaaaacaguacucuuuuuccgguucgggacguaguugaagcaacgacaagccggauaaccgcucuugagacaggaagcuuaccauggagcugcucauccugaaggccaacgccaucaccaccauccugacggcggugaccuucugcuucgccagcggccagaacaucaccgaggaguucuaccaguccacgugcagcgccgucuccaagggguaccucagcgcccugcgcaccggcugguacaccuccgugaucaccaucgagcugagcaacaucaaggagaacaagugcaacgggaccgacgccaaggugaagcucaucaagcaggagcuggacaaguacaagaacgcggucacggagcugcagcuccugaugcaguccacccccgccaccggcagcggguccgccaucgccagcggcguggcggugugcaagguccugcaccucgagggcgaggugaacaagaucaaguccgcccugcugagcaccaacaaggccguggucucccucagcgggugcggcguguccgugcugacguucaagguccuggaccucaagaacuacaucgacaagcagcugcugccgauccucaacaagcagagcugcuccaucagcaacaucgagaccgugaucgaguuccagcagaagaacaaccggcugcuggagaucacccgcgaguucuccgugaacgccggggucaccacgcccgugagcaccuacaugcucaccaacagcgagcugcugucccucaucaacgacaugcccaucaccaacgaccagaagaagcugaugagcaacaacgugcagaucguccggcagcaguccuacagcaucaugugcaucaucaaggaggaggugcuggccuacgugguccagcucccccuguacggcgugaucgacacgccgugcuggaagcugcacaccagcccccucugcaccaccaacacgaaggagggguccaacaucugccugacccgcaccgaccggggcugguacugcgacaacgcgggcuccgugagcuucuucccccaggccgagaccugcaagguccaguccaaccgcguguucugcgacacgaugaacagccggacccuccccuccgaggucaaccugugcaacguggacaucuucaacccgaaguacgacugcaagaucaugaccagcaagaccgacguguccagcuccgucaucacgagccugggggccaucguguccugcuacggcaagaccaagugcaccgccagcaacaagugccgggggaucaucaagaccuucuccaacggcugcgacuacgugagcaacaagggcgucgacacggugagcguggggaacacccucuacuacgucaacaagcaggagggcaagucccuguacgugaagggggagcccaucaucaacuucuacgacccccugguguuccccagcgacgaguucgacgccuccaucagccaggucaacgagaagaucaaccagucccucgcguucauccgcaagagcgacgagcugcugcacaacgugaacgccggcaaguccaccaccaacaucaugaucaccacgaucaucaucgugaucaucgucauccuccugagccugaucgccguggggcuccugcuguacugcaaggcccgguccaccccggugacccugagcaaggaccagcucuccggcaucaacaacaucgccuucagcaacugaggacuagucccuguucccagagcccacuuuuuuuucuuuuuuugaaauaaaauagccugucuuucagaucuaaaaaaaaaaaaaaaaaaaaaaaaaaaaaaaaaaaaaaaaaaaaaaaaaaaaaaaaaaaaaaaaugcaucccccccccccccccccccccccccccccccaaaggcucuuuucagagccaccagaauu

SEQ ID NO: 5361 - RNA, 1933 nt, Artificial Sequence
  mRNA product Design a-4 comprising derived and/or modified sequence from HRSV(A2)__F_DSCav1_mut5 (opt2)
gggagacuccugucgggcggaaguaggaggaguagaguuuaaaaacaguacucuuuuuccgguucgggacguaguugaagcaacgacaagccggauaaccgcucuugagacaggaagcuuaccauggagcuccucauccucaaggccaacgccaucaccaccauccucaccgccgucaccuucugcuucgccuccggccagaacaucaccgaggaguucuaccaguccaccugcuccgccgucuccaagggcuaccucuccgcccuccgcaccggcugguacaccuccgucaucaccaucgagcucuccaacaucaaggagaacaagugcaacggcaccgacgccaaggucaagcucaucaagcaggagcucgacaaguacaagaacgccgucaccgagcuccagcuccucaugcaguccacccccgccaccggcuccggcuccgccaucgccuccggcgucgccgucugcaagguccuccaccucgagggcgaggucaacaagaucaaguccgcccuccucuccaccaacaaggccgucgucucccucuccggcugcggcgucuccguccucaccuucaagguccucgaccucaagaacuacaucgacaagcagcuccuccccauccucaacaagcaguccugcuccaucuccaacaucgagaccgucaucgaguuccagcagaagaacaaccgccuccucgagaucacccgcgaguucuccgucaacgccggcgucaccacccccgucuccaccuacaugcucaccaacuccgagcuccucucccucaucaacgacaugcccaucaccaacgaccagaagaagcucauguccaacaacguccagaucguccgccagcaguccuacuccaucaugugcaucaucaaggaggagguccucgccuacgucguccagcucccccucuacggcgucaucgacacccccugcuggaagcuccacaccuccccccucugcaccaccaacaccaaggagggcuccaacaucugccucacccgcaccgaccgcggcugguacugcgacaacgccggcuccgucuccuucuucccccaggccgagaccugcaagguccaguccaaccgcgucuucugcgacaccaugaacucccgcacccuccccuccgaggucaaccucugcaacgucgacaucuucaaccccaaguacgacugcaagaucaugaccuccaagaccgacgucuccuccuccgucaucaccucccucggcgccaucgucuccugcuacggcaagaccaagugcaccgccuccaacaagugccgcggcaucaucaagaccuucuccaacggcugcgacuacgucuccaacaagggcgucgacaccgucuccgucggcaacacccucuacuacgucaacaagcaggagggcaagucccucuacgucaagggcgagcccaucaucaacuucuacgacccccucgucuuccccuccgacgaguucgacgccuccaucucccaggucaacgagaagaucaaccagucccucgccuucauccgcaaguccgacgagcuccuccacaacgucaacgccggcaaguccaccaccaacaucaugaucaccaccaucaucaucgucaucaucgucauccuccucucccucaucgccgucggccuccuccucuacugcaaggcccgcuccacccccgucacccucuccaaggaccagcucuccggcaucaacaacaucgccuucuccaacugaggacuagucccuguucccagagcccacuuuuuuuucuuuuuuugaaauaaaauagccugucuuucagaucuaaaaaaaaaaaaaaaaaaaaaaaaaaaaaaaaaaaaaaaaaaaaaaaaaaaaaaaaaaaaaaaaugcaucccccccccccccccccccccccccccccccaaaggcucuuuucagagccaccagaauu

SEQ ID NO: 5362 - RNA, 1933 nt, Artificial Sequence
  mRNA product Design a-4 comprising derived and/or modified sequence from HRSV(A2)__F_DSCav1_mut5 (opt3)
gggagacuccugucgggcggaaguaggaggaguagaguuuaaaaacaguacucuuuuuccgguucgggacguaguugaagcaacgacaagccggauaaccgcucuugagacaggaagcuuaccauggagcugcucauccuuaaggccaacgcuauuaccacaauacugacugcagugacguucugcuuugccagcggccagaauaucaccgaagaguucuaccaauccacauguucugcggucucaaaaggguauuugagugcuuuaagaacuggaugguacaccagcguuauuacaaucgaacuguccaacauuaaggagaauaaaugcaacgguaccgacgccaaggugaaacuaaucaagcaggaacucgauaaguauaaaaaugcaguaacugagcugcagcuucugaugcagucuacacccgccaccggcucggggucagcuauagcaagcggaguggccgucuguaagguguugcaccucgagggcgaaguuaacaaaaucaagagugcucugcuguccacgaauaaagccguggucucucucagcgguugcgggguguccguauuaacuuuuaagguucuggaccuuaagaacuacauugauaaacaauugcugccuauccuaaauaagcagucauguaguauuagcaacaucgagaccgugauagaguuccagcagaaaaauaacaggcuccuggaaauuacacgggaguuuucugucaaugcgggagugacuaccccaguguccacauauaugcuuaccaacucagaacuguugagccucaucaaugacaugccgauuacgaacgaucaaaagaaacugaugaguaacaauguccagaucguucgccagcagucuuacuccaucaugugcauuauaaaggaggaaguguuagcauauguagugcaacugccccucuacggcgucaucgacacuccuuguuggaaacuucauacaagcccacugugcaccacuaacacaaaggagggcucgaauauuuguuugacccgaacggaucgugggugguacugcgacaacgccggaucuguguccuucuuuccccaggcugaaaccuguaagguucagucaaauagaguguucugcgauacaaugaacaguagaacucugccuagcgaggucaaucucugcaacguggacaucuuuaauccaaaauaugauuguaagauaaugaccuccaaaacagacguaucuagcucaguuauuaccagucugggugccaucguguccugcuacggcaagacuaaauguacagcaagcaacaagugcagggggaucauuaagaccuucucuaauggaugugauuaugucucaaacaaaggcguggacacugucaguguggguaauacgcuuuacuauguuaacaagcaagaggggaaaagccuguacgugaagggagaacccaucauuaauuuuuaugacccuuugguauucccauccgaugaguuugacgcuucuauaucgcaggucaacgagaaaaucaaccagagccucgccuucauucggaaguccgaugaacuguuacacaaugugaacgcgggcaagucaacaaccaauaucaugaucacuaccauuauaaucguuauuaucgugauucugcuaagucucaucgccgucggccugcuuuuguacugcaaagcacgcucuacaccggugacccugagcaaggaccagcucuccgggauaaacaauaucgcuuucucaaacugaggacuagucccuguucccagagcccacuuuuuuuucuuuuuuugaaauaaaauagccugucuuucagaucuaaaaaaaaaaaaaaaaaaaaaaaaaaaaaaaaaaaaaaaaaaaaaaaaaaaaaaaaaaaaaaaaugcaucccccccccccccccccccccccccccccccaaaggcucuuuucagagccaccagaauu

SEQ ID NO: 5363 - RNA, 1933 nt, Artificial Sequence
  mRNA product Design a-4 comprising derived and/or modified sequence from HRSV(A2)__F_DSCav1_mut5 (opt4)
gggagacuccugucgggcggaaguaggaggaguagaguuuaaaaacaguacucuuuuuccgguucgggacguaguugaagcaacgacaagccggauaaccgcucuugagacaggaagcuuaccauggagcugcugauccugaaggccaacgccaucaccaccauccugaccgccgugaccuucugcuucgccagcggccagaacaucaccgaggaguucuaccagagcaccugcagcgccgugagcaagggcuaccugagcgcccugagaaccggcugguacaccagcgugaucaccaucgagcugagcaacaucaaggagaacaagugcaacggcaccgacgccaaggugaagcugaucaagcaggagcuggacaaguacaagaacgccgugaccgagcugcagcugcugaugcagagcacccccgccaccggcagcggcagcgccaucgccagcggcguggccgugugcaaggugcugcaccuggagggcgaggugaacaagaucaagagcgcccugcugagcaccaacaaggccguggugagccugagcggcugcggcgugagcgugcugaccuucaaggugcuggaccugaagaacuacaucgacaagcagcugcugcccauccugaacaagcagagcugcagcaucagcaacaucgagaccgugaucgaguuccagcagaagaacaacagacugcuggagaucaccagagaguucagcgugaacgccggcgugaccacccccgugagcaccuacaugcugaccaacagcgagcugcugagccugaucaacgacaugcccaucaccaacgaccagaagaagcugaugagcaacaacgugcagaucgugagacagcagagcuacagcaucaugugcaucaucaaggaggaggugcuggccuacguggugcagcugccccuguacggcgugaucgacacccccugcuggaagcugcacaccagcccccugugcaccaccaacaccaaggagggcagcaacaucugccugaccagaaccgacagaggcugguacugcgacaacgccggcagcgugagcuucuucccccaggccgagaccugcaaggugcagagcaacagaguguucugcgacaccaugaacagcagaacccugcccagcgaggugaaccugugcaacguggacaucuucaaccccaaguacgacugcaagaucaugaccagcaagaccgacgugagcagcagcgugaucaccagccugggcgccaucgugagcugcuacggcaagaccaagugcaccgccagcaacaagugcagaggcaucaucaagaccuucagcaacggcugcgacuacgugagcaacaagggcguggacaccgugagcgugggcaacacccuguacuacgugaacaagcaggagggcaagagccuguacgugaagggcgagcccaucaucaacuucuacgacccccugguguuccccagcgacgaguucgacgccagcaucagccaggugaacgagaagaucaaccagagccuggccuucaucagaaagagcgacgagcugcugcacaacgugaacgccggcaagagcaccaccaacaucaugaucaccaccaucaucaucgugaucaucgugauccugcugagccugaucgccgugggccugcugcuguacugcaaggccagaagcacccccgugacccugagcaaggaccagcugagcggcaucaacaacaucgccuucagcaacugaggacuagucccuguucccagagcccacuuuuuuuucuuuuuuugaaauaaaauagccugucuuucagaucuaaaaaaaaaaaaaaaaaaaaaaaaaaaaaaaaaaaaaaaaaaaaaaaaaaaaaaaaaaaaaaaaugcaucccccccccccccccccccccccccccccccaaaggcucuuuucagagccaccagaauu

SEQ ID NO: 5364 - RNA, 1933 nt, Artificial Sequence
  mRNA product Design a-4 comprising derived and/or modified sequence from HRSV(A2)__F_DSCav1_mut5 (opt5)
gggagacuccugucgggcggaaguaggaggaguagaguuuaaaaacaguacucuuuuuccgguucgggacguaguugaagcaacgacaagccggauaaccgcucuugagacaggaagcuuaccauggagcugcucauccugaaggccaacgcuauuaccacaauccuuacggccgugaccuucugcuuugcgagcggccagaauauuacagaagaguucuaccaauccaccuguucugcugucagcaaaggguaucuguccgcccucagaacaggaugguacaccucuguuaucacaauugaacugagcaacaucaaggagaauaaaugcaacggcaccgacgccaaggugaaacuuaucaagcaggaacuggauaaguauaaaaaugcugugacggagcuccagcugcugaugcaguccacccccgccacagggucuggaagcgcuauugccuccggcgucgcgguguguaagguucuccaccuggagggggaagugaacaaaaucaagagcgcccuucugucuaccaauaaagcugucgugucccucagcggaugcggcguuucugugcugacauuuaagguccuugaccugaagaacuacauugauaaacaacuccugccuauccugaauaagcaguccuguagcauuucuaacaucgagaccgugauugaguuccagcagaaaaauaaccggcuccuggaaaucacgcgcgaguuuuccgugaaugccggcgucacaaccccgguuagcacauauaugcuuaccaacuccgaacugcucucucugaucaaugacaugcccauuaccaacgaucaaaagaaacuuaugagcaacaaugugcagaucgugagacagcaguccuacagcauuaugugcaucauuaaggaggaaguccuggcuuaugugguucaacucccucuguacggggugaucgacacacccuguuggaaacugcauacgucuccucucugcaccacaaacaccaaggagggauccaauaucugucugacacggaccgaucgcggcugguacugcgacaacgccgggagcgucucuuucuuuccccaggcggaaacguguaaggugcagagcaauagaguuuucugcgauacaaugaacuccagaacccugccuucugaggugaaucucugcaacgucgacauuuuuaauccgaaauaugauuguaagaucaugaccagcaaaacagacguguccagcucugucauuaccucccugggagccaucgugagcugcuacggcaagacaaaauguacggcuucuaacaagugccgggggauuaucaagaccuucuccaauggaugugauuauguuagcaacaaaggcguggacacagucuccgugggcaauacccuuuacuauguuaacaagcaagaggggaaaucucuguacgugaagggagaacccaucauuaauuuuuaugacccucucgucuuccccagcgaugaguuugacgccuccaucucucaggugaacgagaaaauuaaccagagccuggcuuucauccgcaaguccgaugaacugcuccacaaugugaacgccggcaagagcacaaccaauauuaugaucacgaccauuaucaucguuauuaucgucauucugcuuucucugaucgccguggggcuccugcuguacugcaaagcuagauccacaccugugacccuuagcaaggaccagcucucuggaauuaacaauaucgcguucuccaacugaggacuagucccuguucccagagcccacuuuuuuuucuuuuuuugaaauaaaauagccugucuuucagaucuaaaaaaaaaaaaaaaaaaaaaaaaaaaaaaaaaaaaaaaaaaaaaaaaaaaaaaaaaaaaaaaaugcaucccccccccccccccccccccccccccccccaaaggcucuuuucagagccaccagaauu

SEQ ID NO: 5365 - RNA, 1933 nt, Artificial Sequence
  mRNA product Design a-4 comprising derived and/or modified sequence from HRSV(A2)__F_DSCav1_mut5 (opt6)
gggagacuccugucgggcggaaguaggaggaguagaguuuaaaaacaguacucuuuuuccgguucgggacguaguugaagcaacgacaagccggauaaccgcucuugagacaggaagcuuaccauggaacuauuaauacuuaaagccaacgcaauaacaacaauucucacugcugucaccuucugcuucgccucaggccaaaacauaacggaagaauuuuaccaaucaacaugcucugcaguauccaaaggcuaccuaucugcucuaagaacagguugguauacaucaguaauaaccauagaacuaucaaacauaaaagaaaauaaaugcaacggaacagacgcaaaaguuaaacucauaaaacaagaacuagacaaauauaaaaacgcaguuaccgaacuacaacuacuuaugcaauccacucccgccacuggaucaggaucagcaauagcaucaggagucgcaguauguaaagucuuacaccucgaaggcgaagucaauaaaaucaaauccgcauuacuauccacaaacaaagcagucguaucccuaagcggaugcggaguaucaguacuaacauuuaaaguacuagaccuaaaaaauuacaucgauaaacaacuauuaccuauauuaaacaaacaauccugcuccauuucaaauaucgaaaccguaauagaauuucaacaaaaaaacaacagauuacuagaaauaacaagagaauuuuccguaaaugcuggcguaacaacaccaguauccacauacaugcucacaaacuccgaacuacuaucacuaauaaaugacaugcccauaacaaacgaucaaaaaaaacuaaugucaaauaauguacaaauaguaagacaacaaagcuacuccaucauguguauaauaaaagaagaaguacuagcauacguaguucaacuaccacuuuacggcguaaucgacaccccuugcuggaaacuacacaccuccccucuaugcaccacaaacacaaaagaagguuccaacauaugccuuaccagaacagacagaggcugguauugcgacaacgcaggaucaguuucauuuuuuccacaagcugaaacaugcaaaguacaaucaaacagagucuucugcgacacaaugaacucaagaacucuacccucagaaguaaaccuauguaacguagacauuuucaaccccaaauacgacugcaaaauuaugacaucaaaaacagacguuucaucaucaguuaucaccucauuaggagcaauaguaagcugcuacggaaaaacaaaaugcaccgccucaaauaaaugcagaggaauaauaaaaacuuucuccaacggaugcgacuacguuucaaacaaagguguagacacuguaucaguaggaaacacacuauauuacguaaauaaacaagaaggaaaaucacuuuaugucaaaggagaaccaauaaucaauuucuacgacccauuaguauucccaucagacgaauuugaugcuucaauaucacaaguaaacgaaaaaauaaaucaaucacucgcauuuauacgaaaaucagacgaacuacuacacaauguaaacgcaggcaaaucaacaacaaacauaaugauaacaacaauaaucauuguaauaauaguaauacuucuaucucuaauagcaguaggauuacuccucuacugcaaagcaagaucaaccccuguaacacuaucaaaagaccaacuuucagguauaaauaauauagcuuuuuccaauuaaggacuagucccuguucccagagcccacuuuuuuuucuuuuuuugaaauaaaauagccugucuuucagaucuaaaaaaaaaaaaaaaaaaaaaaaaaaaaaaaaaaaaaaaaaaaaaaaaaaaaaaaaaaaaaaaaugcaucccccccccccccccccccccccccccccccaaaggcucuuuucagagccaccagaauu

SEQ ID NO: 5366 - RNA, 1933 nt, Artificial Sequence
  mRNA product Design a-4 comprising derived and/or modified sequence from HRSV(A2)__F_DSCav1_mut5 (opt11)
gggagacuccugucgggcggaaguaggaggaguagaguuuaaaaacaguacucuuuuuccgguucgggacguaguugaagcaacgacaagccggauaaccgcucuugagacaggaagcuuaccauggagcuccuaauccucaaagccaacgcgaucacuacaauccucacagccgucaccuucugcuucgccuccggccaaaacaucaccgaggaguucuaccaaucaaccugcuccgccguaucaaaaggauaccuaagcgcccuacggaccggcugguacacaucugucaucaccaucgaacuaucaaacaucaaagaaaacaaaugcaacggaaccgacgcaaaagucaaacugauuaaacaagaacuagacaaauacaaaaacgcagucaccgaacugcaauuacucaugcaaagcacaccggccaccggcucaggcagcgccaucgccuccggcgucgccgucugcaaaguucuccaccucgagggcgaagucaacaaaauaaaaucugcccuccucuccaccaacaaagccgucgucucccucagcggcugcggagucuccguccucaccuucaaaguucucgaucucaagaacuauauugacaaacaacuucuacccauacucaacaaacaaagcugcagcauauccaacaucgaaaccgucaucgaguuccaacaaaagaacaaccgccuccucgaaauaacccgcgaguucagcguuaacgccggagucacuaccccugucuccaccuacaugcucaccaacuccgaacuccuaucacuaaucaacgacaugcccauaaccaacgaccagaagaaacucauguccaacaacguccaaauuguccgacaacaaagcuacuccauaaugugcauaauaaaagaggaaguccucgccuacgucguacaacugccccuuuauggcguaaucgacacacccugcuggaaacuccacacgucaccccucugcaccaccaacacaaaagaaggcucgaacaucugccuaacacggacugaccgcggcugguacugcgacaacgccggcuccgucagcuucuucccacaagccgaaaccugcaaaguacaauccaaccgaguauucugcgacaccaugaacuccagaacccuccccucagaggucaaccugugcaacguagacaucuucaaccccaaauacgacugcaaaauaaugaccucaaaaacagacgucuccucuuccguaaucaccagccucggagccaucgucagcugcuacggcaaaaccaaaugcaccgccucaaacaaaugccgcggcaucaucaaaacauucucaaacggcugcgacuacgucuccaacaaaggcgucgacacaguaagcguaggcaacacacuguacuacgucaacaaacaagagggaaaaucacucuacgucaaaggagaacccauaaucaacuucuacgacccccucguuuuccccagcgacgaguucgacgccagcauaucccaagucaacgagaaaauuaaccaaucccuagcauucauccgaaaaucugacgaacugcuccacaacgucaacgcgggaaaaucaacaaccaacauaaugauaaccacaaucauaauagucaucaucguaauccuccucagccuaaucgcugucggccuccuccucuacugcaaagcccguuccaccccagucacacuuuccaaggaccaacuaagcggaauaaacaacaucgcguucucaaacuaaggacuagucccuguucccagagcccacuuuuuuuucuuuuuuugaaauaaaauagccugucuuucagaucuaaaaaaaaaaaaaaaaaaaaaaaaaaaaaaaaaaaaaaaaaaaaaaaaaaaaaaaaaaaaaaaaugcaucccccccccccccccccccccccccccccccaaaggcucuuuucagagccaccagaauu

SEQ ID NO: 5367 - RNA, 1879 nt, Artificial Sequence
  mRNA product Design a-5 comprising derived and/or modified sequence from HRSV(A2)__F_DSCav1_mut5 (opt1)
gggagacuuucccauucuguagcagaauuugguguugccuguggucuuggucccgcggagaagcuuaccauggagcugcucauccugaaggccaacgccaucaccaccauccugacggcggugaccuucugcuucgccagcggccagaacaucaccgaggaguucuaccaguccacgugcagcgccgucuccaagggguaccucagcgcccugcggaccggcugguacaccuccgugaucaccaucgagcugagcaacaucaaggagaacaagugcaacgggaccgacgccaaggugaagcucaucaagcaggagcuggacaaguacaagaacgcggucacggagcugcagcuccugaugcaguccaccccggcaaccggcuccggcuccgccaucgcgagcggcgucgccgugugcaaggugcugcaccucgagggggaggucaacaagaucaagagcgcccugcuguccaccaacaaggccguggugagccucuccggcugcggcgucagcgugcugaccuucaaggugcuggaccucaagaacuacaucgacaagcagcugcugcccauccugaacaagcagagcugcuccaucagcaacaucgagacggugaucgaguuccagcagaagaacaaccggcuccuggagaucacccgcgaguucagcgugaacgccggggucaccacccccguguccacguacaugcugaccaacagcgagcuccugucccugaucaacgacaugccgaucaccaacgaccagaagaagcucaugagcaacaacgugcagaucguccggcagcaguccuacagcaucaugugcaucaucaaggaggaggugcuggcguacgugguccagcugccccucuacggcgugaucgacacccccugcuggaagcugcacacgagcccccugugcaccaccaacaccaaggagggguccaacaucugccucacgcgcaccgaccggggcugguacugcgacaacgccggcagcgucuccuucuucccgcaggccgagaccugcaaggugcagagcaaccgcguguucugcgacaccaugaacucccggacgcugcccagcgagguaaaccucugcaacgucgacaucuucaaccccaaguacgacugcaagaucaugaccuccaagaccgacgugagcuccagcgugaucaccucccugggggccaucgucagcugcuacggcaagacgaagugcaccgccagcaacaagugccgggggaucaucaagaccuucuccaacggcugcgacuacgugagcaacaagggcguggacaccguguccgucgggaacacccuguacuacgugaacaagcaggagggcaagagccucuacgugaagggggagcccaucaucaacuucuacgacccgcuggucuuccccuccgacgaguucgacgcgagcaucucccaggugaacgagaagaucaaccagagccuggccuucauccgcaaguccgacgagcugcuccacaacgugaacgccggcaagagcacgaccaacaucaugaucaccaccaucaucaucgucaucaucgugauccugcugucccucaucgccguggggcugcugcucuacugcaaggcccggagcacgcccgucacccuguccaaggaccagcugagcggcaucaacaacaucgcguucuccaacugaggacuagucccuguucccagagcccacuuuuuuuucuuuuuuugaaauaaaauagccugucuuucagaucuaaaaaaaaaaaaaaaaaaaaaaaaaaaaaaaaaaaaaaaaaaaaaaaaaaaaaaaaaaaaaaaaugcaucccccccccccccccccccccccccccccccaaaggcucuuuucagagccaccagaauu

SEQ ID NO: 5368 - RNA, 1879 nt, Artificial Sequence
  mRNA product Design a-5 comprising derived and/or modified sequence from HRSV(A2)__F_DSCav1_mut5 (opt1)
gggagacuuucccauucuguagcagaauuugguguugccuguggucuuggucccgcggagaagcuuaccauggagcugcucauccugaaggccaacgccaucaccaccauccugacggcggugaccuucugcuucgccagcggccagaacaucaccgaggaguucuaccaguccacgugcagcgccgucuccaagggguaccucagcgcccugcgcaccggcugguacaccuccgugaucaccaucgagcugagcaacaucaaggagaacaagugcaacgggaccgacgccaaggugaagcucaucaagcaggagcuggacaaguacaagaacgcggucacggagcugcagcuccugaugcaguccacccccgccaccggcagcggguccgccaucgccagcggcguggcggugugcaagguccugcaccucgagggcgaggugaacaagaucaaguccgcccugcugagcaccaacaaggccguggucucccucagcgggugcggcguguccgugcugacguucaagguccuggaccucaagaacuacaucgacaagcagcugcugccgauccucaacaagcagagcugcuccaucagcaacaucgagaccgugaucgaguuccagcagaagaacaaccggcugcuggagaucacccgcgaguucuccgugaacgccggggucaccacgcccgugagcaccuacaugcucaccaacagcgagcugcugucccucaucaacgacaugcccaucaccaacgaccagaagaagcugaugagcaacaacgugcagaucguccggcagcaguccuacagcaucaugugcaucaucaaggaggaggugcuggccuacgugguccagcucccccuguacggcgugaucgacacgccgugcuggaagcugcacaccagcccccucugcaccaccaacacgaaggagggguccaacaucugccugacccgcaccgaccggggcugguacugcgacaacgcgggcuccgugagcuucuucccccaggccgagaccugcaagguccaguccaaccgcguguucugcgacacgaugaacagccggacccuccccuccgaggucaaccugugcaacguggacaucuucaacccgaaguacgacugcaagaucaugaccagcaagaccgacguguccagcuccgucaucacgagccugggggccaucguguccugcuacggcaagaccaagugcaccgccagcaacaagugccgggggaucaucaagaccuucuccaacggcugcgacuacgugagcaacaagggcgucgacacggugagcguggggaacacccucuacuacgucaacaagcaggagggcaagucccuguacgugaagggggagcccaucaucaacuucuacgacccccugguguuccccagcgacgaguucgacgccuccaucagccaggucaacgagaagaucaaccagucccucgcguucauccgcaagagcgacgagcugcugcacaacgugaacgccggcaaguccaccaccaacaucaugaucaccacgaucaucaucgugaucaucgucauccuccugagccugaucgccguggggcuccugcuguacugcaaggcccgguccaccccggugacccugagcaaggaccagcucuccggcaucaacaacaucgccuucagcaacugaggacuagucccuguucccagagcccacuuuuuuuucuuuuuuugaaauaaaauagccugucuuucagaucuaaaaaaaaaaaaaaaaaaaaaaaaaaaaaaaaaaaaaaaaaaaaaaaaaaaaaaaaaaaaaaaaugcaucccccccccccccccccccccccccccccccaaaggcucuuuucagagccaccagaauu

SEQ ID NO: 5369 - RNA, 1879 nt, Artificial Sequence
  mRNA product Design a-5 comprising derived and/or modified sequence from HRSV(A2)__F_DSCav1_mut5 (opt2)
gggagacuuucccauucuguagcagaauuugguguugccuguggucuuggucccgcggagaagcuuaccauggagcuccucauccucaaggccaacgccaucaccaccauccucaccgccgucaccuucugcuucgccuccggccagaacaucaccgaggaguucuaccaguccaccugcuccgccgucuccaagggcuaccucuccgcccuccgcaccggcugguacaccuccgucaucaccaucgagcucuccaacaucaaggagaacaagugcaacggcaccgacgccaaggucaagcucaucaagcaggagcucgacaaguacaagaacgccgucaccgagcuccagcuccucaugcaguccacccccgccaccggcuccggcuccgccaucgccuccggcgucgccgucugcaagguccuccaccucgagggcgaggucaacaagaucaaguccgcccuccucuccaccaacaaggccgucgucucccucuccggcugcggcgucuccguccucaccuucaagguccucgaccucaagaacuacaucgacaagcagcuccuccccauccucaacaagcaguccugcuccaucuccaacaucgagaccgucaucgaguuccagcagaagaacaaccgccuccucgagaucacccgcgaguucuccgucaacgccggcgucaccacccccgucuccaccuacaugcucaccaacuccgagcuccucucccucaucaacgacaugcccaucaccaacgaccagaagaagcucauguccaacaacguccagaucguccgccagcaguccuacuccaucaugugcaucaucaaggaggagguccucgccuacgucguccagcucccccucuacggcgucaucgacacccccugcuggaagcuccacaccuccccccucugcaccaccaacaccaaggagggcuccaacaucugccucacccgcaccgaccgcggcugguacugcgacaacgccggcuccgucuccuucuucccccaggccgagaccugcaagguccaguccaaccgcgucuucugcgacaccaugaacucccgcacccuccccuccgaggucaaccucugcaacgucgacaucuucaaccccaaguacgacugcaagaucaugaccuccaagaccgacgucuccuccuccgucaucaccucccucggcgccaucgucuccugcuacggcaagaccaagugcaccgccuccaacaagugccgcggcaucaucaagaccuucuccaacggcugcgacuacgucuccaacaagggcgucgacaccgucuccgucggcaacacccucuacuacgucaacaagcaggagggcaagucccucuacgucaagggcgagcccaucaucaacuucuacgacccccucgucuuccccuccgacgaguucgacgccuccaucucccaggucaacgagaagaucaaccagucccucgccuucauccgcaaguccgacgagcuccuccacaacgucaacgccggcaaguccaccaccaacaucaugaucaccaccaucaucaucgucaucaucgucauccuccucucccucaucgccgucggccuccuccucuacugcaaggcccgcuccacccccgucacccucuccaaggaccagcucuccggcaucaacaacaucgccuucuccaacugaggacuagucccuguucccagagcccacuuuuuuuucuuuuuuugaaauaaaauagccugucuuucagaucuaaaaaaaaaaaaaaaaaaaaaaaaaaaaaaaaaaaaaaaaaaaaaaaaaaaaaaaaaaaaaaaaugcaucccccccccccccccccccccccccccccccaaaggcucuuuucagagccaccagaauu

SEQ ID NO: 5370 - RNA, 1879 nt, Artificial Sequence
  mRNA product Design a-5 comprising derived and/or modified sequence from HRSV(A2)__F_DSCav1_mut5 (opt3)
gggagacuuucccauucuguagcagaauuugguguugccuguggucuuggucccgcggagaagcuuaccauggagcugcucauccuuaaggccaacgcuauuaccacaauacugacugcagugacguucugcuuugccagcggccagaauaucaccgaagaguucuaccaauccacauguucugcggucucaaaaggguauuugagugcuuuaagaacuggaugguacaccagcguuauuacaaucgaacuguccaacauuaaggagaauaaaugcaacgguaccgacgccaaggugaaacuaaucaagcaggaacucgauaaguauaaaaaugcaguaacugagcugcagcuucugaugcagucuacacccgccaccggcucggggucagcuauagcaagcggaguggccgucuguaagguguugcaccucgagggcgaaguuaacaaaaucaagagugcucugcuguccacgaauaaagccguggucucucucagcgguugcgggguguccguauuaacuuuuaagguucuggaccuuaagaacuacauugauaaacaauugcugccuauccuaaauaagcagucauguaguauuagcaacaucgagaccgugauagaguuccagcagaaaaauaacaggcuccuggaaauuacacgggaguuuucugucaaugcgggagugacuaccccaguguccacauauaugcuuaccaacucagaacuguugagccucaucaaugacaugccgauuacgaacgaucaaaagaaacugaugaguaacaauguccagaucguucgccagcagucuuacuccaucaugugcauuauaaaggaggaaguguuagcauauguagugcaacugccccucuacggcgucaucgacacuccuuguuggaaacuucauacaagcccacugugcaccacuaacacaaaggagggcucgaauauuuguuugacccgaacggaucgugggugguacugcgacaacgccggaucuguguccuucuuuccccaggcugaaaccuguaagguucagucaaauagaguguucugcgauacaaugaacaguagaacucugccuagcgaggucaaucucugcaacguggacaucuuuaauccaaaauaugauuguaagauaaugaccuccaaaacagacguaucuagcucaguuauuaccagucugggugccaucguguccugcuacggcaagacuaaauguacagcaagcaacaagugcagggggaucauuaagaccuucucuaauggaugugauuaugucucaaacaaaggcguggacacugucaguguggguaauacgcuuuacuauguuaacaagcaagaggggaaaagccuguacgugaagggagaacccaucauuaauuuuuaugacccuuugguauucccauccgaugaguuugacgcuucuauaucgcaggucaacgagaaaaucaaccagagccucgccuucauucggaaguccgaugaacuguuacacaaugugaacgcgggcaagucaacaaccaauaucaugaucacuaccauuauaaucguuauuaucgugauucugcuaagucucaucgccgucggccugcuuuuguacugcaaagcacgcucuacaccggugacccugagcaaggaccagcucuccgggauaaacaauaucgcuuucucaaacugaggacuagucccuguucccagagcccacuuuuuuuucuuuuuuugaaauaaaauagccugucuuucagaucuaaaaaaaaaaaaaaaaaaaaaaaaaaaaaaaaaaaaaaaaaaaaaaaaaaaaaaaaaaaaaaaaugcaucccccccccccccccccccccccccccccccaaaggcucuuuucagagccaccagaauu

SEQ ID NO: 5371 - RNA, 1879 nt, Artificial Sequence
  mRNA product Design a-5 comprising derived and/or modified sequence from HRSV(A2)__F_DSCav1_mut5 (opt4)
gggagacuuucccauucuguagcagaauuugguguugccuguggucuuggucccgcggagaagcuuaccauggagcugcugauccugaaggccaacgccaucaccaccauccugaccgccgugaccuucugcuucgccagcggccagaacaucaccgaggaguucuaccagagcaccugcagcgccgugagcaagggcuaccugagcgcccugagaaccggcugguacaccagcgugaucaccaucgagcugagcaacaucaaggagaacaagugcaacggcaccgacgccaaggugaagcugaucaagcaggagcuggacaaguacaagaacgccgugaccgagcugcagcugcugaugcagagcacccccgccaccggcagcggcagcgccaucgccagcggcguggccgugugcaaggugcugcaccuggagggcgaggugaacaagaucaagagcgcccugcugagcaccaacaaggccguggugagccugagcggcugcggcgugagcgugcugaccuucaaggugcuggaccugaagaacuacaucgacaagcagcugcugcccauccugaacaagcagagcugcagcaucagcaacaucgagaccgugaucgaguuccagcagaagaacaacagacugcuggagaucaccagagaguucagcgugaacgccggcgugaccacccccgugagcaccuacaugcugaccaacagcgagcugcugagccugaucaacgacaugcccaucaccaacgaccagaagaagcugaugagcaacaacgugcagaucgugagacagcagagcuacagcaucaugugcaucaucaaggaggaggugcuggccuacguggugcagcugccccuguacggcgugaucgacacccccugcuggaagcugcacaccagcccccugugcaccaccaacaccaaggagggcagcaacaucugccugaccagaaccgacagaggcugguacugcgacaacgccggcagcgugagcuucuucccccaggccgagaccugcaaggugcagagcaacagaguguucugcgacaccaugaacagcagaacccugcccagcgaggugaaccugugcaacguggacaucuucaaccccaaguacgacugcaagaucaugaccagcaagaccgacgugagcagcagcgugaucaccagccugggcgccaucgugagcugcuacggcaagaccaagugcaccgccagcaacaagugcagaggcaucaucaagaccuucagcaacggcugcgacuacgugagcaacaagggcguggacaccgugagcgugggcaacacccuguacuacgugaacaagcaggagggcaagagccuguacgugaagggcgagcccaucaucaacuucuacgacccccugguguuccccagcgacgaguucgacgccagcaucagccaggugaacgagaagaucaaccagagccuggccuucaucagaaagagcgacgagcugcugcacaacgugaacgccggcaagagcaccaccaacaucaugaucaccaccaucaucaucgugaucaucgugauccugcugagccugaucgccgugggccugcugcuguacugcaaggccagaagcacccccgugacccugagcaaggaccagcugagcggcaucaacaacaucgccuucagcaacugaggacuagucccuguucccagagcccacuuuuuuuucuuuuuuugaaauaaaauagccugucuuucagaucuaaaaaaaaaaaaaaaaaaaaaaaaaaaaaaaaaaaaaaaaaaaaaaaaaaaaaaaaaaaaaaaaugcaucccccccccccccccccccccccccccccccaaaggcucuuuucagagccaccagaauu

SEQ ID NO: 5372 - RNA, 1879 nt, Artificial Sequence
  mRNA product Design a-5 comprising derived and/or modified sequence from HRSV(A2)__F_DSCav1_mut5 (opt5)
gggagacuuucccauucuguagcagaauuugguguugccuguggucuuggucccgcggagaagcuuaccauggagcugcucauccugaaggccaacgcuauuaccacaauccuuacggccgugaccuucugcuuugcgagcggccagaauauuacagaagaguucuaccaauccaccuguucugcugucagcaaaggguaucuguccgcccucagaacaggaugguacaccucuguuaucacaauugaacugagcaacaucaaggagaauaaaugcaacggcaccgacgccaaggugaaacuuaucaagcaggaacuggauaaguauaaaaaugcugugacggagcuccagcugcugaugcaguccacccccgccacagggucuggaagcgcuauugccuccggcgucgcgguguguaagguucuccaccuggagggggaagugaacaaaaucaagagcgcccuucugucuaccaauaaagcugucgugucccucagcggaugcggcguuucugugcugacauuuaagguccuugaccugaagaacuacauugauaaacaacuccugccuauccugaauaagcaguccuguagcauuucuaacaucgagaccgugauugaguuccagcagaaaaauaaccggcuccuggaaaucacgcgcgaguuuuccgugaaugccggcgucacaaccccgguuagcacauauaugcuuaccaacuccgaacugcucucucugaucaaugacaugcccauuaccaacgaucaaaagaaacuuaugagcaacaaugugcagaucgugagacagcaguccuacagcauuaugugcaucauuaaggaggaaguccuggcuuaugugguucaacucccucuguacggggugaucgacacacccuguuggaaacugcauacgucuccucucugcaccacaaacaccaaggagggauccaauaucugucugacacggaccgaucgcggcugguacugcgacaacgccgggagcgucucuuucuuuccccaggcggaaacguguaaggugcagagcaauagaguuuucugcgauacaaugaacuccagaacccugccuucugaggugaaucucugcaacgucgacauuuuuaauccgaaauaugauuguaagaucaugaccagcaaaacagacguguccagcucugucauuaccucccugggagccaucgugagcugcuacggcaagacaaaauguacggcuucuaacaagugccgggggauuaucaagaccuucuccaauggaugugauuauguuagcaacaaaggcguggacacagucuccgugggcaauacccuuuacuauguuaacaagcaagaggggaaaucucuguacgugaagggagaacccaucauuaauuuuuaugacccucucgucuuccccagcgaugaguuugacgccuccaucucucaggugaacgagaaaauuaaccagagccuggcuuucauccgcaaguccgaugaacugcuccacaaugugaacgccggcaagagcacaaccaauauuaugaucacgaccauuaucaucguuauuaucgucauucugcuuucucugaucgccguggggcuccugcuguacugcaaagcuagauccacaccugugacccuuagcaaggaccagcucucuggaauuaacaauaucgcguucuccaacugaggacuagucccuguucccagagcccacuuuuuuuucuuuuuuugaaauaaaauagccugucuuucagaucuaaaaaaaaaaaaaaaaaaaaaaaaaaaaaaaaaaaaaaaaaaaaaaaaaaaaaaaaaaaaaaaaugcaucccccccccccccccccccccccccccccccaaaggcucuuuucagagccaccagaauu

SEQ ID NO: 5373 - RNA, 1879 nt, Artificial Sequence
  mRNA product Design a-5 comprising derived and/or modified sequence from HRSV(A2)__F_DSCav1_mut5 (opt6)
gggagacuuucccauucuguagcagaauuugguguugccuguggucuuggucccgcggagaagcuuaccauggaacuauuaauacuuaaagccaacgcaauaacaacaauucucacugcugucaccuucugcuucgccucaggccaaaacauaacggaagaauuuuaccaaucaacaugcucugcaguauccaaaggcuaccuaucugcucuaagaacagguugguauacaucaguaauaaccauagaacuaucaaacauaaaagaaaauaaaugcaacggaacagacgcaaaaguuaaacucauaaaacaagaacuagacaaauauaaaaacgcaguuaccgaacuacaacuacuuaugcaauccacucccgccacuggaucaggaucagcaauagcaucaggagucgcaguauguaaagucuuacaccucgaaggcgaagucaauaaaaucaaauccgcauuacuauccacaaacaaagcagucguaucccuaagcggaugcggaguaucaguacuaacauuuaaaguacuagaccuaaaaaauuacaucgauaaacaacuauuaccuauauuaaacaaacaauccugcuccauuucaaauaucgaaaccguaauagaauuucaacaaaaaaacaacagauuacuagaaauaacaagagaauuuuccguaaaugcuggcguaacaacaccaguauccacauacaugcucacaaacuccgaacuacuaucacuaauaaaugacaugcccauaacaaacgaucaaaaaaaacuaaugucaaauaauguacaaauaguaagacaacaaagcuacuccaucauguguauaauaaaagaagaaguacuagcauacguaguucaacuaccacuuuacggcguaaucgacaccccuugcuggaaacuacacaccuccccucuaugcaccacaaacacaaaagaagguuccaacauaugccuuaccagaacagacagaggcugguauugcgacaacgcaggaucaguuucauuuuuuccacaagcugaaacaugcaaaguacaaucaaacagagucuucugcgacacaaugaacucaagaacucuacccucagaaguaaaccuauguaacguagacauuuucaaccccaaauacgacugcaaaauuaugacaucaaaaacagacguuucaucaucaguuaucaccucauuaggagcaauaguaagcugcuacggaaaaacaaaaugcaccgccucaaauaaaugcagaggaauaauaaaaacuuucuccaacggaugcgacuacguuucaaacaaagguguagacacuguaucaguaggaaacacacuauauuacguaaauaaacaagaaggaaaaucacuuuaugucaaaggagaaccaauaaucaauuucuacgacccauuaguauucccaucagacgaauuugaugcuucaauaucacaaguaaacgaaaaaauaaaucaaucacucgcauuuauacgaaaaucagacgaacuacuacacaauguaaacgcaggcaaaucaacaacaaacauaaugauaacaacaauaaucauuguaauaauaguaauacuucuaucucuaauagcaguaggauuacuccucuacugcaaagcaagaucaaccccuguaacacuaucaaaagaccaacuuucagguauaaauaauauagcuuuuuccaauuaaggacuagucccuguucccagagcccacuuuuuuuucuuuuuuugaaauaaaauagccugucuuucagaucuaaaaaaaaaaaaaaaaaaaaaaaaaaaaaaaaaaaaaaaaaaaaaaaaaaaaaaaaaaaaaaaaugcaucccccccccccccccccccccccccccccccaaaggcucuuuucagagccaccagaauu

SEQ ID NO: 5374 - RNA, 1879 nt, Artificial Sequence
  mRNA product Design a-5 comprising derived and/or modified sequence from HRSV(A2)__F_DSCav1_mut5 (opt11)
gggagacuuucccauucuguagcagaauuugguguugccuguggucuuggucccgcggagaagcuuaccauggagcuccuaauccucaaagccaacgcgaucacuacaauccucacagccgucaccuucugcuucgccuccggccaaaacaucaccgaggaguucuaccaaucaaccugcuccgccguaucaaaaggauaccuaagcgcccuacggaccggcugguacacaucugucaucaccaucgaacuaucaaacaucaaagaaaacaaaugcaacggaaccgacgcaaaagucaaacugauuaaacaagaacuagacaaauacaaaaacgcagucaccgaacugcaauuacucaugcaaagcacaccggccaccggcucaggcagcgccaucgccuccggcgucgccgucugcaaaguucuccaccucgagggcgaagucaacaaaauaaaaucugcccuccucuccaccaacaaagccgucgucucccucagcggcugcggagucuccguccucaccuucaaaguucucgaucucaagaacuauauugacaaacaacuucuacccauacucaacaaacaaagcugcagcauauccaacaucgaaaccgucaucgaguuccaacaaaagaacaaccgccuccucgaaauaacccgcgaguucagcguuaacgccggagucacuaccccugucuccaccuacaugcucaccaacuccgaacuccuaucacuaaucaacgacaugcccauaaccaacgaccagaagaaacucauguccaacaacguccaaauuguccgacaacaaagcuacuccauaaugugcauaauaaaagaggaaguccucgccuacgucguacaacugccccuuuauggcguaaucgacacacccugcuggaaacuccacacgucaccccucugcaccaccaacacaaaagaaggcucgaacaucugccuaacacggacugaccgcggcugguacugcgacaacgccggcuccgucagcuucuucccacaagccgaaaccugcaaaguacaauccaaccgaguauucugcgacaccaugaacuccagaacccuccccucagaggucaaccugugcaacguagacaucuucaaccccaaauacgacugcaaaauaaugaccucaaaaacagacgucuccucuuccguaaucaccagccucggagccaucgucagcugcuacggcaaaaccaaaugcaccgccucaaacaaaugccgcggcaucaucaaaacauucucaaacggcugcgacuacgucuccaacaaaggcgucgacacaguaagcguaggcaacacacuguacuacgucaacaaacaagagggaaaaucacucuacgucaaaggagaacccauaaucaacuucuacgacccccucguuuuccccagcgacgaguucgacgccagcauaucccaagucaacgagaaaauuaaccaaucccuagcauucauccgaaaaucugacgaacugcuccacaacgucaacgcgggaaaaucaacaaccaacauaaugauaaccacaaucauaauagucaucaucguaauccuccucagccuaaucgcugucggccuccuccucuacugcaaagcccguuccaccccagucacacuuuccaaggaccaacuaagcggaauaaacaacaucgcguucucaaacuaaggacuagucccuguucccagagcccacuuuuuuuucuuuuuuugaaauaaaauagccugucuuucagaucuaaaaaaaaaaaaaaaaaaaaaaaaaaaaaaaaaaaaaaaaaaaaaaaaaaaaaaaaaaaaaaaaugcaucccccccccccccccccccccccccccccccaaaggcucuuuucagagccaccagaauu

SEQ ID NO: 5375 - RNA, 2060 nt, Artificial Sequence
  mRNA product Design b-1 comprising derived and/or modified sequence from HRSV(A2)__F_DSCav1_mut5 (opt1)
gggagacggagacggccugcaggaccugcucucucagcccucagccgaggccuacgccgagccgagugcgcagccgacgaccgggaggagccgcagccuucaacucugagguacugugauccgcgcugcccgccgggccgccccaguccgcugcugcggcaccuccuucccucgcgcccucuucgcucgccagcgccuucccugugagccugcgucaccgcggccgccaagcuuaccauggagcugcucauccugaaggccaacgccaucaccaccauccugacggcggugaccuucugcuucgccagcggccagaacaucaccgaggaguucuaccaguccacgugcagcgccgucuccaagggguaccucagcgcccugcggaccggcugguacaccuccgugaucaccaucgagcugagcaacaucaaggagaacaagugcaacgggaccgacgccaaggugaagcucaucaagcaggagcuggacaaguacaagaacgcggucacggagcugcagcuccugaugcaguccaccccggcaaccggcuccggcuccgccaucgcgagcggcgucgccgugugcaaggugcugcaccucgagggggaggucaacaagaucaagagcgcccugcuguccaccaacaaggccguggugagccucuccggcugcggcgucagcgugcugaccuucaaggugcuggaccucaagaacuacaucgacaagcagcugcugcccauccugaacaagcagagcugcuccaucagcaacaucgagacggugaucgaguuccagcagaagaacaaccggcuccuggagaucacccgcgaguucagcgugaacgccggggucaccacccccguguccacguacaugcugaccaacagcgagcuccugucccugaucaacgacaugccgaucaccaacgaccagaagaagcucaugagcaacaacgugcagaucguccggcagcaguccuacagcaucaugugcaucaucaaggaggaggugcuggcguacgugguccagcugccccucuacggcgugaucgacacccccugcuggaagcugcacacgagcccccugugcaccaccaacaccaaggagggguccaacaucugccucacgcgcaccgaccggggcugguacugcgacaacgccggcagcgucuccuucuucccgcaggccgagaccugcaaggugcagagcaaccgcguguucugcgacaccaugaacucccggacgcugcccagcgagguaaaccucugcaacgucgacaucuucaaccccaaguacgacugcaagaucaugaccuccaagaccgacgugagcuccagcgugaucaccucccugggggccaucgucagcugcuacggcaagacgaagugcaccgccagcaacaagugccgggggaucaucaagaccuucuccaacggcugcgacuacgugagcaacaagggcguggacaccguguccgucgggaacacccuguacuacgugaacaagcaggagggcaagagccucuacgugaagggggagcccaucaucaacuucuacgacccgcuggucuuccccuccgacgaguucgacgcgagcaucucccaggugaacgagaagaucaaccagagccuggccuucauccgcaaguccgacgagcugcuccacaacgugaacgccggcaagagcacgaccaacaucaugaucaccaccaucaucaucgucaucaucgugauccugcugucccucaucgccguggggcugcugcucuacugcaaggcccggagcacgcccgucacccuguccaaggaccagcugagcggcaucaacaacaucgcguucuccaacugaggacuaguguccaccugucccuccugggcugcuggauugucucguuuuccugccaaauaaacaggaucagcgcuuuacagaucuaaaaaaaaaaaaaaaaaaaaaaaaaaaaaaaaaaaaaaaaaaaaaaaaaaaaaaaaaaaaaaaaugcaucccccccccccccccccccccccccccccccaaaggcucuuuucagagccaccagaauu

SEQ ID NO: 5376 - RNA, 2060 nt, Artificial Sequence
  mRNA product Design b-1 comprising derived and/or modified sequence from HRSV(A2)__F_DSCav1_mut5 (opt1)
gggagacggagacggccugcaggaccugcucucucagcccucagccgaggccuacgccgagccgagugcgcagccgacgaccgggaggagccgcagccuucaacucugagguacugugauccgcgcugcccgccgggccgccccaguccgcugcugcggcaccuccuucccucgcgcccucuucgcucgccagcgccuucccugugagccugcgucaccgcggccgccaagcuuaccauggagcugcucauccugaaggccaacgccaucaccaccauccugacggcggugaccuucugcuucgccagcggccagaacaucaccgaggaguucuaccaguccacgugcagcgccgucuccaagggguaccucagcgcccugcgcaccggcugguacaccuccgugaucaccaucgagcugagcaacaucaaggagaacaagugcaacgggaccgacgccaaggugaagcucaucaagcaggagcuggacaaguacaagaacgcggucacggagcugcagcuccugaugcaguccacccccgccaccggcagcggguccgccaucgccagcggcguggcggugugcaagguccugcaccucgagggcgaggugaacaagaucaaguccgcccugcugagcaccaacaaggccguggucucccucagcgggugcggcguguccgugcugacguucaagguccuggaccucaagaacuacaucgacaagcagcugcugccgauccucaacaagcagagcugcuccaucagcaacaucgagaccgugaucgaguuccagcagaagaacaaccggcugcuggagaucacccgcgaguucuccgugaacgccggggucaccacgcccgugagcaccuacaugcucaccaacagcgagcugcugucccucaucaacgacaugcccaucaccaacgaccagaagaagcugaugagcaacaacgugcagaucguccggcagcaguccuacagcaucaugugcaucaucaaggaggaggugcuggccuacgugguccagcucccccuguacggcgugaucgacacgccgugcuggaagcugcacaccagcccccucugcaccaccaacacgaaggagggguccaacaucugccugacccgcaccgaccggggcugguacugcgacaacgcgggcuccgugagcuucuucccccaggccgagaccugcaagguccaguccaaccgcguguucugcgacacgaugaacagccggacccuccccuccgaggucaaccugugcaacguggacaucuucaacccgaaguacgacugcaagaucaugaccagcaagaccgacguguccagcuccgucaucacgagccugggggccaucguguccugcuacggcaagaccaagugcaccgccagcaacaagugccgggggaucaucaagaccuucuccaacggcugcgacuacgugagcaacaagggcgucgacacggugagcguggggaacacccucuacuacgucaacaagcaggagggcaagucccuguacgugaagggggagcccaucaucaacuucuacgacccccugguguuccccagcgacgaguucgacgccuccaucagccaggucaacgagaagaucaaccagucccucgcguucauccgcaagagcgacgagcugcugcacaacgugaacgccggcaaguccaccaccaacaucaugaucaccacgaucaucaucgugaucaucgucauccuccugagccugaucgccguggggcuccugcuguacugcaaggcccgguccaccccggugacccugagcaaggaccagcucuccggcaucaacaacaucgccuucagcaacugaggacuaguguccaccugucccuccugggcugcuggauugucucguuuuccugccaaauaaacaggaucagcgcuuuacagaucuaaaaaaaaaaaaaaaaaaaaaaaaaaaaaaaaaaaaaaaaaaaaaaaaaaaaaaaaaaaaaaaaugcaucccccccccccccccccccccccccccccccaaaggcucuuuucagagccaccagaauu

SEQ ID NO: 5377 - RNA, 2060 nt, Artificial Sequence
  mRNA product Design b-1 comprising derived and/or modified sequence from HRSV(A2)__F_DSCav1_mut5 (opt2)
gggagacggagacggccugcaggaccugcucucucagcccucagccgaggccuacgccgagccgagugcgcagccgacgaccgggaggagccgcagccuucaacucugagguacugugauccgcgcugcccgccgggccgccccaguccgcugcugcggcaccuccuucccucgcgcccucuucgcucgccagcgccuucccugugagccugcgucaccgcggccgccaagcuuaccauggagcuccucauccucaaggccaacgccaucaccaccauccucaccgccgucaccuucugcuucgccuccggccagaacaucaccgaggaguucuaccaguccaccugcuccgccgucuccaagggcuaccucuccgcccuccgcaccggcugguacaccuccgucaucaccaucgagcucuccaacaucaaggagaacaagugcaacggcaccgacgccaaggucaagcucaucaagcaggagcucgacaaguacaagaacgccgucaccgagcuccagcuccucaugcaguccacccccgccaccggcuccggcuccgccaucgccuccggcgucgccgucugcaagguccuccaccucgagggcgaggucaacaagaucaaguccgcccuccucuccaccaacaaggccgucgucucccucuccggcugcggcgucuccguccucaccuucaagguccucgaccucaagaacuacaucgacaagcagcuccuccccauccucaacaagcaguccugcuccaucuccaacaucgagaccgucaucgaguuccagcagaagaacaaccgccuccucgagaucacccgcgaguucuccgucaacgccggcgucaccacccccgucuccaccuacaugcucaccaacuccgagcuccucucccucaucaacgacaugcccaucaccaacgaccagaagaagcucauguccaacaacguccagaucguccgccagcaguccuacuccaucaugugcaucaucaaggaggagguccucgccuacgucguccagcucccccucuacggcgucaucgacacccccugcuggaagcuccacaccuccccccucugcaccaccaacaccaaggagggcuccaacaucugccucacccgcaccgaccgcggcugguacugcgacaacgccggcuccgucuccuucuucccccaggccgagaccugcaagguccaguccaaccgcgucuucugcgacaccaugaacucccgcacccuccccuccgaggucaaccucugcaacgucgacaucuucaaccccaaguacgacugcaagaucaugaccuccaagaccgacgucuccuccuccgucaucaccucccucggcgccaucgucuccugcuacggcaagaccaagugcaccgccuccaacaagugccgcggcaucaucaagaccuucuccaacggcugcgacuacgucuccaacaagggcgucgacaccgucuccgucggcaacacccucuacuacgucaacaagcaggagggcaagucccucuacgucaagggcgagcccaucaucaacuucuacgacccccucgucuuccccuccgacgaguucgacgccuccaucucccaggucaacgagaagaucaaccagucccucgccuucauccgcaaguccgacgagcuccuccacaacgucaacgccggcaaguccaccaccaacaucaugaucaccaccaucaucaucgucaucaucgucauccuccucucccucaucgccgucggccuccuccucuacugcaaggcccgcuccacccccgucacccucuccaaggaccagcucuccggcaucaacaacaucgccuucuccaacugaggacuaguguccaccugucccuccugggcugcuggauugucucguuuuccugccaaauaaacaggaucagcgcuuuacagaucuaaaaaaaaaaaaaaaaaaaaaaaaaaaaaaaaaaaaaaaaaaaaaaaaaaaaaaaaaaaaaaaaugcaucccccccccccccccccccccccccccccccaaaggcucuuuucagagccaccagaauu

SEQ ID NO: 5378 - RNA, 2060 nt, Artificial Sequence
  mRNA product Design b-1 comprising derived and/or modified sequence from HRSV(A2)__F_DSCav1_mut5 (opt3)
gggagacggagacggccugcaggaccugcucucucagcccucagccgaggccuacgccgagccgagugcgcagccgacgaccgggaggagccgcagccuucaacucugagguacugugauccgcgcugcccgccgggccgccccaguccgcugcugcggcaccuccuucccucgcgcccucuucgcucgccagcgccuucccugugagccugcgucaccgcggccgccaagcuuaccauggagcugcucauccuuaaggccaacgcuauuaccacaauacugacugcagugacguucugcuuugccagcggccagaauaucaccgaagaguucuaccaauccacauguucugcggucucaaaaggguauuugagugcuuuaagaacuggaugguacaccagcguuauuacaaucgaacuguccaacauuaaggagaauaaaugcaacgguaccgacgccaaggugaaacuaaucaagcaggaacucgauaaguauaaaaaugcaguaacugagcugcagcuucugaugcagucuacacccgccaccggcucggggucagcuauagcaagcggaguggccgucuguaagguguugcaccucgagggcgaaguuaacaaaaucaagagugcucugcuguccacgaauaaagccguggucucucucagcgguugcgggguguccguauuaacuuuuaagguucuggaccuuaagaacuacauugauaaacaauugcugccuauccuaaauaagcagucauguaguauuagcaacaucgagaccgugauagaguuccagcagaaaaauaacaggcuccuggaaauuacacgggaguuuucugucaaugcgggagugacuaccccaguguccacauauaugcuuaccaacucagaacuguugagccucaucaaugacaugccgauuacgaacgaucaaaagaaacugaugaguaacaauguccagaucguucgccagcagucuuacuccaucaugugcauuauaaaggaggaaguguuagcauauguagugcaacugccccucuacggcgucaucgacacuccuuguuggaaacuucauacaagcccacugugcaccacuaacacaaaggagggcucgaauauuuguuugacccgaacggaucgugggugguacugcgacaacgccggaucuguguccuucuuuccccaggcugaaaccuguaagguucagucaaauagaguguucugcgauacaaugaacaguagaacucugccuagcgaggucaaucucugcaacguggacaucuuuaauccaaaauaugauuguaagauaaugaccuccaaaacagacguaucuagcucaguuauuaccagucugggugccaucguguccugcuacggcaagacuaaauguacagcaagcaacaagugcagggggaucauuaagaccuucucuaauggaugugauuaugucucaaacaaaggcguggacacugucaguguggguaauacgcuuuacuauguuaacaagcaagaggggaaaagccuguacgugaagggagaacccaucauuaauuuuuaugacccuuugguauucccauccgaugaguuugacgcuucuauaucgcaggucaacgagaaaaucaaccagagccucgccuucauucggaaguccgaugaacuguuacacaaugugaacgcgggcaagucaacaaccaauaucaugaucacuaccauuauaaucguuauuaucgugauucugcuaagucucaucgccgucggccugcuuuuguacugcaaagcacgcucuacaccggugacccugagcaaggaccagcucuccgggauaaacaauaucgcuuucucaaacugaggacuaguguccaccugucccuccugggcugcuggauugucucguuuuccugccaaauaaacaggaucagcgcuuuacagaucuaaaaaaaaaaaaaaaaaaaaaaaaaaaaaaaaaaaaaaaaaaaaaaaaaaaaaaaaaaaaaaaaugcaucccccccccccccccccccccccccccccccaaaggcucuuuucagagccaccagaauu

SEQ ID NO: 5379 - RNA, 2060 nt, Artificial Sequence
  mRNA product Design b-1 comprising derived and/or modified sequence from HRSV(A2)__F_DSCav1_mut5 (opt4)
gggagacggagacggccugcaggaccugcucucucagcccucagccgaggccuacgccgagccgagugcgcagccgacgaccgggaggagccgcagccuucaacucugagguacugugauccgcgcugcccgccgggccgccccaguccgcugcugcggcaccuccuucccucgcgcccucuucgcucgccagcgccuucccugugagccugcgucaccgcggccgccaagcuuaccauggagcugcugauccugaaggccaacgccaucaccaccauccugaccgccgugaccuucugcuucgccagcggccagaacaucaccgaggaguucuaccagagcaccugcagcgccgugagcaagggcuaccugagcgcccugagaaccggcugguacaccagcgugaucaccaucgagcugagcaacaucaaggagaacaagugcaacggcaccgacgccaaggugaagcugaucaagcaggagcuggacaaguacaagaacgccgugaccgagcugcagcugcugaugcagagcacccccgccaccggcagcggcagcgccaucgccagcggcguggccgugugcaaggugcugcaccuggagggcgaggugaacaagaucaagagcgcccugcugagcaccaacaaggccguggugagccugagcggcugcggcgugagcgugcugaccuucaaggugcuggaccugaagaacuacaucgacaagcagcugcugcccauccugaacaagcagagcugcagcaucagcaacaucgagaccgugaucgaguuccagcagaagaacaacagacugcuggagaucaccagagaguucagcgugaacgccggcgugaccacccccgugagcaccuacaugcugaccaacagcgagcugcugagccugaucaacgacaugcccaucaccaacgaccagaagaagcugaugagcaacaacgugcagaucgugagacagcagagcuacagcaucaugugcaucaucaaggaggaggugcuggccuacguggugcagcugccccuguacggcgugaucgacacccccugcuggaagcugcacaccagcccccugugcaccaccaacaccaaggagggcagcaacaucugccugaccagaaccgacagaggcugguacugcgacaacgccggcagcgugagcuucuucccccaggccgagaccugcaaggugcagagcaacagaguguucugcgacaccaugaacagcagaacccugcccagcgaggugaaccugugcaacguggacaucuucaaccccaaguacgacugcaagaucaugaccagcaagaccgacgugagcagcagcgugaucaccagccugggcgccaucgugagcugcuacggcaagaccaagugcaccgccagcaacaagugcagaggcaucaucaagaccuucagcaacggcugcgacuacgugagcaacaagggcguggacaccgugagcgugggcaacacccuguacuacgugaacaagcaggagggcaagagccuguacgugaagggcgagcccaucaucaacuucuacgacccccugguguuccccagcgacgaguucgacgccagcaucagccaggugaacgagaagaucaaccagagccuggccuucaucagaaagagcgacgagcugcugcacaacgugaacgccggcaagagcaccaccaacaucaugaucaccaccaucaucaucgugaucaucgugauccugcugagccugaucgccgugggccugcugcuguacugcaaggccagaagcacccccgugacccugagcaaggaccagcugagcggcaucaacaacaucgccuucagcaacugaggacuaguguccaccugucccuccugggcugcuggauugucucguuuuccugccaaauaaacaggaucagcgcuuuacagaucuaaaaaaaaaaaaaaaaaaaaaaaaaaaaaaaaaaaaaaaaaaaaaaaaaaaaaaaaaaaaaaaaugcaucccccccccccccccccccccccccccccccaaaggcucuuuucagagccaccagaauu

SEQ ID NO: 5380 - RNA, 2060 nt, Artificial Sequence
  mRNA product Design b-1 comprising derived and/or modified sequence from HRSV(A2)__F_DSCav1_mut5 (opt5)
gggagacggagacggccugcaggaccugcucucucagcccucagccgaggccuacgccgagccgagugcgcagccgacgaccgggaggagccgcagccuucaacucugagguacugugauccgcgcugcccgccgggccgccccaguccgcugcugcggcaccuccuucccucgcgcccucuucgcucgccagcgccuucccugugagccugcgucaccgcggccgccaagcuuaccauggagcugcucauccugaaggccaacgcuauuaccacaauccuuacggccgugaccuucugcuuugcgagcggccagaauauuacagaagaguucuaccaauccaccuguucugcugucagcaaaggguaucuguccgcccucagaacaggaugguacaccucuguuaucacaauugaacugagcaacaucaaggagaauaaaugcaacggcaccgacgccaaggugaaacuuaucaagcaggaacuggauaaguauaaaaaugcugugacggagcuccagcugcugaugcaguccacccccgccacagggucuggaagcgcuauugccuccggcgucgcgguguguaagguucuccaccuggagggggaagugaacaaaaucaagagcgcccuucugucuaccaauaaagcugucgugucccucagcggaugcggcguuucugugcugacauuuaagguccuugaccugaagaacuacauugauaaacaacuccugccuauccugaauaagcaguccuguagcauuucuaacaucgagaccgugauugaguuccagcagaaaaauaaccggcuccuggaaaucacgcgcgaguuuuccgugaaugccggcgucacaaccccgguuagcacauauaugcuuaccaacuccgaacugcucucucugaucaaugacaugcccauuaccaacgaucaaaagaaacuuaugagcaacaaugugcagaucgugagacagcaguccuacagcauuaugugcaucauuaaggaggaaguccuggcuuaugugguucaacucccucuguacggggugaucgacacacccuguuggaaacugcauacgucuccucucugcaccacaaacaccaaggagggauccaauaucugucugacacggaccgaucgcggcugguacugcgacaacgccgggagcgucucuuucuuuccccaggcggaaacguguaaggugcagagcaauagaguuuucugcgauacaaugaacuccagaacccugccuucugaggugaaucucugcaacgucgacauuuuuaauccgaaauaugauuguaagaucaugaccagcaaaacagacguguccagcucugucauuaccucccugggagccaucgugagcugcuacggcaagacaaaauguacggcuucuaacaagugccgggggauuaucaagaccuucuccaauggaugugauuauguuagcaacaaaggcguggacacagucuccgugggcaauacccuuuacuauguuaacaagcaagaggggaaaucucuguacgugaagggagaacccaucauuaauuuuuaugacccucucgucuuccccagcgaugaguuugacgccuccaucucucaggugaacgagaaaauuaaccagagccuggcuuucauccgcaaguccgaugaacugcuccacaaugugaacgccggcaagagcacaaccaauauuaugaucacgaccauuaucaucguuauuaucgucauucugcuuucucugaucgccguggggcuccugcuguacugcaaagcuagauccacaccugugacccuuagcaaggaccagcucucuggaauuaacaauaucgcguucuccaacugaggacuaguguccaccugucccuccugggcugcuggauugucucguuuuccugccaaauaaacaggaucagcgcuuuacagaucuaaaaaaaaaaaaaaaaaaaaaaaaaaaaaaaaaaaaaaaaaaaaaaaaaaaaaaaaaaaaaaaaugcaucccccccccccccccccccccccccccccccaaaggcucuuuucagagccaccagaauu

SEQ ID NO: 5381 - RNA, 2060 nt, Artificial Sequence
  mRNA product Design b-1 comprising derived and/or modified sequence from HRSV(A2)__F_DSCav1_mut5 (opt6)
gggagacggagacggccugcaggaccugcucucucagcccucagccgaggccuacgccgagccgagugcgcagccgacgaccgggaggagccgcagccuucaacucugagguacugugauccgcgcugcccgccgggccgccccaguccgcugcugcggcaccuccuucccucgcgcccucuucgcucgccagcgccuucccugugagccugcgucaccgcggccgccaagcuuaccauggaacuauuaauacuuaaagccaacgcaauaacaacaauucucacugcugucaccuucugcuucgccucaggccaaaacauaacggaagaauuuuaccaaucaacaugcucugcaguauccaaaggcuaccuaucugcucuaagaacagguugguauacaucaguaauaaccauagaacuaucaaacauaaaagaaaauaaaugcaacggaacagacgcaaaaguuaaacucauaaaacaagaacuagacaaauauaaaaacgcaguuaccgaacuacaacuacuuaugcaauccacucccgccacuggaucaggaucagcaauagcaucaggagucgcaguauguaaagucuuacaccucgaaggcgaagucaauaaaaucaaauccgcauuacuauccacaaacaaagcagucguaucccuaagcggaugcggaguaucaguacuaacauuuaaaguacuagaccuaaaaaauuacaucgauaaacaacuauuaccuauauuaaacaaacaauccugcuccauuucaaauaucgaaaccguaauagaauuucaacaaaaaaacaacagauuacuagaaauaacaagagaauuuuccguaaaugcuggcguaacaacaccaguauccacauacaugcucacaaacuccgaacuacuaucacuaauaaaugacaugcccauaacaaacgaucaaaaaaaacuaaugucaaauaauguacaaauaguaagacaacaaagcuacuccaucauguguauaauaaaagaagaaguacuagcauacguaguucaacuaccacuuuacggcguaaucgacaccccuugcuggaaacuacacaccuccccucuaugcaccacaaacacaaaagaagguuccaacauaugccuuaccagaacagacagaggcugguauugcgacaacgcaggaucaguuucauuuuuuccacaagcugaaacaugcaaaguacaaucaaacagagucuucugcgacacaaugaacucaagaacucuacccucagaaguaaaccuauguaacguagacauuuucaaccccaaauacgacugcaaaauuaugacaucaaaaacagacguuucaucaucaguuaucaccucauuaggagcaauaguaagcugcuacggaaaaacaaaaugcaccgccucaaauaaaugcagaggaauaauaaaaacuuucuccaacggaugcgacuacguuucaaacaaagguguagacacuguaucaguaggaaacacacuauauuacguaaauaaacaagaaggaaaaucacuuuaugucaaaggagaaccaauaaucaauuucuacgacccauuaguauucccaucagacgaauuugaugcuucaauaucacaaguaaacgaaaaaauaaaucaaucacucgcauuuauacgaaaaucagacgaacuacuacacaauguaaacgcaggcaaaucaacaacaaacauaaugauaacaacaauaaucauuguaauaauaguaauacuucuaucucuaauagcaguaggauuacuccucuacugcaaagcaagaucaaccccuguaacacuaucaaaagaccaacuuucagguauaaauaauauagcuuuuuccaauuaaggacuaguguccaccugucccuccugggcugcuggauugucucguuuuccugccaaauaaacaggaucagcgcuuuacagaucuaaaaaaaaaaaaaaaaaaaaaaaaaaaaaaaaaaaaaaaaaaaaaaaaaaaaaaaaaaaaaaaaugcaucccccccccccccccccccccccccccccccaaaggcucuuuucagagccaccagaauu

SEQ ID NO: 5382 - RNA, 2060 nt, Artificial Sequence
  mRNA product Design b-1 comprising derived and/or modified sequence from HRSV(A2)__F_DSCav1_mut5 (opt11)
gggagacggagacggccugcaggaccugcucucucagcccucagccgaggccuacgccgagccgagugcgcagccgacgaccgggaggagccgcagccuucaacucugagguacugugauccgcgcugcccgccgggccgccccaguccgcugcugcggcaccuccuucccucgcgcccucuucgcucgccagcgccuucccugugagccugcgucaccgcggccgccaagcuuaccauggagcuccuaauccucaaagccaacgcgaucacuacaauccucacagccgucaccuucugcuucgccuccggccaaaacaucaccgaggaguucuaccaaucaaccugcuccgccguaucaaaaggauaccuaagcgcccuacggaccggcugguacacaucugucaucaccaucgaacuaucaaacaucaaagaaaacaaaugcaacggaaccgacgcaaaagucaaacugauuaaacaagaacuagacaaauacaaaaacgcagucaccgaacugcaauuacucaugcaaagcacaccggccaccggcucaggcagcgccaucgccuccggcgucgccgucugcaaaguucuccaccucgagggcgaagucaacaaaauaaaaucugcccuccucuccaccaacaaagccgucgucucccucagcggcugcggagucuccguccucaccuucaaaguucucgaucucaagaacuauauugacaaacaacuucuacccauacucaacaaacaaagcugcagcauauccaacaucgaaaccgucaucgaguuccaacaaaagaacaaccgccuccucgaaauaacccgcgaguucagcguuaacgccggagucacuaccccugucuccaccuacaugcucaccaacuccgaacuccuaucacuaaucaacgacaugcccauaaccaacgaccagaagaaacucauguccaacaacguccaaauuguccgacaacaaagcuacuccauaaugugcauaauaaaagaggaaguccucgccuacgucguacaacugccccuuuauggcguaaucgacacacccugcuggaaacuccacacgucaccccucugcaccaccaacacaaaagaaggcucgaacaucugccuaacacggacugaccgcggcugguacugcgacaacgccggcuccgucagcuucuucccacaagccgaaaccugcaaaguacaauccaaccgaguauucugcgacaccaugaacuccagaacccuccccucagaggucaaccugugcaacguagacaucuucaaccccaaauacgacugcaaaauaaugaccucaaaaacagacgucuccucuuccguaaucaccagccucggagccaucgucagcugcuacggcaaaaccaaaugcaccgccucaaacaaaugccgcggcaucaucaaaacauucucaaacggcugcgacuacgucuccaacaaaggcgucgacacaguaagcguaggcaacacacuguacuacgucaacaaacaagagggaaaaucacucuacgucaaaggagaacccauaaucaacuucuacgacccccucguuuuccccagcgacgaguucgacgccagcauaucccaagucaacgagaaaauuaaccaaucccuagcauucauccgaaaaucugacgaacugcuccacaacgucaacgcgggaaaaucaacaaccaacauaaugauaaccacaaucauaauagucaucaucguaauccuccucagccuaaucgcugucggccuccuccucuacugcaaagcccguuccaccccagucacacuuuccaaggaccaacuaagcggaauaaacaacaucgcguucucaaacuaaggacuaguguccaccugucccuccugggcugcuggauugucucguuuuccugccaaauaaacaggaucagcgcuuuacagaucuaaaaaaaaaaaaaaaaaaaaaaaaaaaaaaaaaaaaaaaaaaaaaaaaaaaaaaaaaaaaaaaaugcaucccccccccccccccccccccccccccccccaaaggcucuuuucagagccaccagaauu

SEQ ID NO: 5383 - RNA, 1880 nt, Artificial Sequence
  mRNA product Design b-2 comprising derived and/or modified sequence from HRSV(A2)__F_DSCav1_mut5 (opt1)
gggagagccucugcuggaguccggggaguggcguuggcugcuagagcgaagcuuaccauggagcugcucauccugaaggccaacgccaucaccaccauccugacggcggugaccuucugcuucgccagcggccagaacaucaccgaggaguucuaccaguccacgugcagcgccgucuccaagggguaccucagcgcccugcggaccggcugguacaccuccgugaucaccaucgagcugagcaacaucaaggagaacaagugcaacgggaccgacgccaaggugaagcucaucaagcaggagcuggacaaguacaagaacgcggucacggagcugcagcuccugaugcaguccaccccggcaaccggcuccggcuccgccaucgcgagcggcgucgccgugugcaaggugcugcaccucgagggggaggucaacaagaucaagagcgcccugcuguccaccaacaaggccguggugagccucuccggcugcggcgucagcgugcugaccuucaaggugcuggaccucaagaacuacaucgacaagcagcugcugcccauccugaacaagcagagcugcuccaucagcaacaucgagacggugaucgaguuccagcagaagaacaaccggcuccuggagaucacccgcgaguucagcgugaacgccggggucaccacccccguguccacguacaugcugaccaacagcgagcuccugucccugaucaacgacaugccgaucaccaacgaccagaagaagcucaugagcaacaacgugcagaucguccggcagcaguccuacagcaucaugugcaucaucaaggaggaggugcuggcguacgugguccagcugccccucuacggcgugaucgacacccccugcuggaagcugcacacgagcccccugugcaccaccaacaccaaggagggguccaacaucugccucacgcgcaccgaccggggcugguacugcgacaacgccggcagcgucuccuucuucccgcaggccgagaccugcaaggugcagagcaaccgcguguucugcgacaccaugaacucccggacgcugcccagcgagguaaaccucugcaacgucgacaucuucaaccccaaguacgacugcaagaucaugaccuccaagaccgacgugagcuccagcgugaucaccucccugggggccaucgucagcugcuacggcaagacgaagugcaccgccagcaacaagugccgggggaucaucaagaccuucuccaacggcugcgacuacgugagcaacaagggcguggacaccguguccgucgggaacacccuguacuacgugaacaagcaggagggcaagagccucuacgugaagggggagcccaucaucaacuucuacgacccgcuggucuuccccuccgacgaguucgacgcgagcaucucccaggugaacgagaagaucaaccagagccuggccuucauccgcaaguccgacgagcugcuccacaacgugaacgccggcaagagcacgaccaacaucaugaucaccaccaucaucaucgucaucaucgugauccugcugucccucaucgccguggggcugcugcucuacugcaaggcccggagcacgcccgucacccuguccaaggaccagcugagcggcaucaacaacaucgcguucuccaacugaggacuaguguccaccugucccuccugggcugcuggauugucucguuuuccugccaaauaaacaggaucagcgcuuuacagaucuaaaaaaaaaaaaaaaaaaaaaaaaaaaaaaaaaaaaaaaaaaaaaaaaaaaaaaaaaaaaaaaaugcaucccccccccccccccccccccccccccccccaaaggcucuuuucagagccaccagaauu

SEQ ID NO: 5384 - RNA, 1880 nt, Artificial Sequence
  mRNA product Design b-2 comprising derived and/or modified sequence from HRSV(A2)__F_DSCav1_mut5 (opt1)
gggagagccucugcuggaguccggggaguggcguuggcugcuagagcgaagcuuaccauggagcugcucauccugaaggccaacgccaucaccaccauccugacggcggugaccuucugcuucgccagcggccagaacaucaccgaggaguucuaccaguccacgugcagcgccgucuccaagggguaccucagcgcccugcgcaccggcugguacaccuccgugaucaccaucgagcugagcaacaucaaggagaacaagugcaacgggaccgacgccaaggugaagcucaucaagcaggagcuggacaaguacaagaacgcggucacggagcugcagcuccugaugcaguccacccccgccaccggcagcggguccgccaucgccagcggcguggcggugugcaagguccugcaccucgagggcgaggugaacaagaucaaguccgcccugcugagcaccaacaaggccguggucucccucagcgggugcggcguguccgugcugacguucaagguccuggaccucaagaacuacaucgacaagcagcugcugccgauccucaacaagcagagcugcuccaucagcaacaucgagaccgugaucgaguuccagcagaagaacaaccggcugcuggagaucacccgcgaguucuccgugaacgccggggucaccacgcccgugagcaccuacaugcucaccaacagcgagcugcugucccucaucaacgacaugcccaucaccaacgaccagaagaagcugaugagcaacaacgugcagaucguccggcagcaguccuacagcaucaugugcaucaucaaggaggaggugcuggccuacgugguccagcucccccuguacggcgugaucgacacgccgugcuggaagcugcacaccagcccccucugcaccaccaacacgaaggagggguccaacaucugccugacccgcaccgaccggggcugguacugcgacaacgcgggcuccgugagcuucuucccccaggccgagaccugcaagguccaguccaaccgcguguucugcgacacgaugaacagccggacccuccccuccgaggucaaccugugcaacguggacaucuucaacccgaaguacgacugcaagaucaugaccagcaagaccgacguguccagcuccgucaucacgagccugggggccaucguguccugcuacggcaagaccaagugcaccgccagcaacaagugccgggggaucaucaagaccuucuccaacggcugcgacuacgugagcaacaagggcgucgacacggugagcguggggaacacccucuacuacgucaacaagcaggagggcaagucccuguacgugaagggggagcccaucaucaacuucuacgacccccugguguuccccagcgacgaguucgacgccuccaucagccaggucaacgagaagaucaaccagucccucgcguucauccgcaagagcgacgagcugcugcacaacgugaacgccggcaaguccaccaccaacaucaugaucaccacgaucaucaucgugaucaucgucauccuccugagccugaucgccguggggcuccugcuguacugcaaggcccgguccaccccggugacccugagcaaggaccagcucuccggcaucaacaacaucgccuucagcaacugaggacuaguguccaccugucccuccugggcugcuggauugucucguuuuccugccaaauaaacaggaucagcgcuuuacagaucuaaaaaaaaaaaaaaaaaaaaaaaaaaaaaaaaaaaaaaaaaaaaaaaaaaaaaaaaaaaaaaaaugcaucccccccccccccccccccccccccccccccaaaggcucuuuucagagccaccagaauu

SEQ ID NO: 5385 - RNA, 1880 nt, Artificial Sequence
  mRNA product Design b-2 comprising derived and/or modified sequence from HRSV(A2)__F_DSCav1_mut5 (opt2)
gggagagccucugcuggaguccggggaguggcguuggcugcuagagcgaagcuuaccauggagcuccucauccucaaggccaacgccaucaccaccauccucaccgccgucaccuucugcuucgccuccggccagaacaucaccgaggaguucuaccaguccaccugcuccgccgucuccaagggcuaccucuccgcccuccgcaccggcugguacaccuccgucaucaccaucgagcucuccaacaucaaggagaacaagugcaacggcaccgacgccaaggucaagcucaucaagcaggagcucgacaaguacaagaacgccgucaccgagcuccagcuccucaugcaguccacccccgccaccggcuccggcuccgccaucgccuccggcgucgccgucugcaagguccuccaccucgagggcgaggucaacaagaucaaguccgcccuccucuccaccaacaaggccgucgucucccucuccggcugcggcgucuccguccucaccuucaagguccucgaccucaagaacuacaucgacaagcagcuccuccccauccucaacaagcaguccugcuccaucuccaacaucgagaccgucaucgaguuccagcagaagaacaaccgccuccucgagaucacccgcgaguucuccgucaacgccggcgucaccacccccgucuccaccuacaugcucaccaacuccgagcuccucucccucaucaacgacaugcccaucaccaacgaccagaagaagcucauguccaacaacguccagaucguccgccagcaguccuacuccaucaugugcaucaucaaggaggagguccucgccuacgucguccagcucccccucuacggcgucaucgacacccccugcuggaagcuccacaccuccccccucugcaccaccaacaccaaggagggcuccaacaucugccucacccgcaccgaccgcggcugguacugcgacaacgccggcuccgucuccuucuucccccaggccgagaccugcaagguccaguccaaccgcgucuucugcgacaccaugaacucccgcacccuccccuccgaggucaaccucugcaacgucgacaucuucaaccccaaguacgacugcaagaucaugaccuccaagaccgacgucuccuccuccgucaucaccucccucggcgccaucgucuccugcuacggcaagaccaagugcaccgccuccaacaagugccgcggcaucaucaagaccuucuccaacggcugcgacuacgucuccaacaagggcgucgacaccgucuccgucggcaacacccucuacuacgucaacaagcaggagggcaagucccucuacgucaagggcgagcccaucaucaacuucuacgacccccucgucuuccccuccgacgaguucgacgccuccaucucccaggucaacgagaagaucaaccagucccucgccuucauccgcaaguccgacgagcuccuccacaacgucaacgccggcaaguccaccaccaacaucaugaucaccaccaucaucaucgucaucaucgucauccuccucucccucaucgccgucggccuccuccucuacugcaaggcccgcuccacccccgucacccucuccaaggaccagcucuccggcaucaacaacaucgccuucuccaacugaggacuaguguccaccugucccuccugggcugcuggauugucucguuuuccugccaaauaaacaggaucagcgcuuuacagaucuaaaaaaaaaaaaaaaaaaaaaaaaaaaaaaaaaaaaaaaaaaaaaaaaaaaaaaaaaaaaaaaaugcaucccccccccccccccccccccccccccccccaaaggcucuuuucagagccaccagaauu

SEQ ID NO: 5386 - RNA, 1880 nt, Artificial Sequence
  mRNA product Design b-2 comprising derived and/or modified sequence from HRSV(A2)__F_DSCav1_mut5 (opt3)
gggagagccucugcuggaguccggggaguggcguuggcugcuagagcgaagcuuaccauggagcugcucauccuuaaggccaacgcuauuaccacaauacugacugcagugacguucugcuuugccagcggccagaauaucaccgaagaguucuaccaauccacauguucugcggucucaaaaggguauuugagugcuuuaagaacuggaugguacaccagcguuauuacaaucgaacuguccaacauuaaggagaauaaaugcaacgguaccgacgccaaggugaaacuaaucaagcaggaacucgauaaguauaaaaaugcaguaacugagcugcagcuucugaugcagucuacacccgccaccggcucggggucagcuauagcaagcggaguggccgucuguaagguguugcaccucgagggcgaaguuaacaaaaucaagagugcucugcuguccacgaauaaagccguggucucucucagcgguugcgggguguccguauuaacuuuuaagguucuggaccuuaagaacuacauugauaaacaauugcugccuauccuaaauaagcagucauguaguauuagcaacaucgagaccgugauagaguuccagcagaaaaauaacaggcuccuggaaauuacacgggaguuuucugucaaugcgggagugacuaccccaguguccacauauaugcuuaccaacucagaacuguugagccucaucaaugacaugccgauuacgaacgaucaaaagaaacugaugaguaacaauguccagaucguucgccagcagucuuacuccaucaugugcauuauaaaggaggaaguguuagcauauguagugcaacugccccucuacggcgucaucgacacuccuuguuggaaacuucauacaagcccacugugcaccacuaacacaaaggagggcucgaauauuuguuugacccgaacggaucgugggugguacugcgacaacgccggaucuguguccuucuuuccccaggcugaaaccuguaagguucagucaaauagaguguucugcgauacaaugaacaguagaacucugccuagcgaggucaaucucugcaacguggacaucuuuaauccaaaauaugauuguaagauaaugaccuccaaaacagacguaucuagcucaguuauuaccagucugggugccaucguguccugcuacggcaagacuaaauguacagcaagcaacaagugcagggggaucauuaagaccuucucuaauggaugugauuaugucucaaacaaaggcguggacacugucaguguggguaauacgcuuuacuauguuaacaagcaagaggggaaaagccuguacgugaagggagaacccaucauuaauuuuuaugacccuuugguauucccauccgaugaguuugacgcuucuauaucgcaggucaacgagaaaaucaaccagagccucgccuucauucggaaguccgaugaacuguuacacaaugugaacgcgggcaagucaacaaccaauaucaugaucacuaccauuauaaucguuauuaucgugauucugcuaagucucaucgccgucggccugcuuuuguacugcaaagcacgcucuacaccggugacccugagcaaggaccagcucuccgggauaaacaauaucgcuuucucaaacugaggacuaguguccaccugucccuccugggcugcuggauugucucguuuuccugccaaauaaacaggaucagcgcuuuacagaucuaaaaaaaaaaaaaaaaaaaaaaaaaaaaaaaaaaaaaaaaaaaaaaaaaaaaaaaaaaaaaaaaugcaucccccccccccccccccccccccccccccccaaaggcucuuuucagagccaccagaauu

SEQ ID NO: 5387 - RNA, 1880 nt, Artificial Sequence
  mRNA product Design b-2 comprising derived and/or modified sequence from HRSV(A2)__F_DSCav1_mut5 (opt4)
gggagagccucugcuggaguccggggaguggcguuggcugcuagagcgaagcuuaccauggagcugcugauccugaaggccaacgccaucaccaccauccugaccgccgugaccuucugcuucgccagcggccagaacaucaccgaggaguucuaccagagcaccugcagcgccgugagcaagggcuaccugagcgcccugagaaccggcugguacaccagcgugaucaccaucgagcugagcaacaucaaggagaacaagugcaacggcaccgacgccaaggugaagcugaucaagcaggagcuggacaaguacaagaacgccgugaccgagcugcagcugcugaugcagagcacccccgccaccggcagcggcagcgccaucgccagcggcguggccgugugcaaggugcugcaccuggagggcgaggugaacaagaucaagagcgcccugcugagcaccaacaaggccguggugagccugagcggcugcggcgugagcgugcugaccuucaaggugcuggaccugaagaacuacaucgacaagcagcugcugcccauccugaacaagcagagcugcagcaucagcaacaucgagaccgugaucgaguuccagcagaagaacaacagacugcuggagaucaccagagaguucagcgugaacgccggcgugaccacccccgugagcaccuacaugcugaccaacagcgagcugcugagccugaucaacgacaugcccaucaccaacgaccagaagaagcugaugagcaacaacgugcagaucgugagacagcagagcuacagcaucaugugcaucaucaaggaggaggugcuggccuacguggugcagcugccccuguacggcgugaucgacacccccugcuggaagcugcacaccagcccccugugcaccaccaacaccaaggagggcagcaacaucugccugaccagaaccgacagaggcugguacugcgacaacgccggcagcgugagcuucuucccccaggccgagaccugcaaggugcagagcaacagaguguucugcgacaccaugaacagcagaacccugcccagcgaggugaaccugugcaacguggacaucuucaaccccaaguacgacugcaagaucaugaccagcaagaccgacgugagcagcagcgugaucaccagccugggcgccaucgugagcugcuacggcaagaccaagugcaccgccagcaacaagugcagaggcaucaucaagaccuucagcaacggcugcgacuacgugagcaacaagggcguggacaccgugagcgugggcaacacccuguacuacgugaacaagcaggagggcaagagccuguacgugaagggcgagcccaucaucaacuucuacgacccccugguguuccccagcgacgaguucgacgccagcaucagccaggugaacgagaagaucaaccagagccuggccuucaucagaaagagcgacgagcugcugcacaacgugaacgccggcaagagcaccaccaacaucaugaucaccaccaucaucaucgugaucaucgugauccugcugagccugaucgccgugggccugcugcuguacugcaaggccagaagcacccccgugacccugagcaaggaccagcugagcggcaucaacaacaucgccuucagcaacugaggacuaguguccaccugucccuccugggcugcuggauugucucguuuuccugccaaauaaacaggaucagcgcuuuacagaucuaaaaaaaaaaaaaaaaaaaaaaaaaaaaaaaaaaaaaaaaaaaaaaaaaaaaaaaaaaaaaaaaugcaucccccccccccccccccccccccccccccccaaaggcucuuuucagagccaccagaauu

SEQ ID NO: 5388 - RNA, 1880 nt, Artificial Sequence
  mRNA product Design b-2 comprising derived and/or modified sequence from HRSV(A2)__F_DSCav1_mut5 (opt5)
gggagagccucugcuggaguccggggaguggcguuggcugcuagagcgaagcuuaccauggagcugcucauccugaaggccaacgcuauuaccacaauccuuacggccgugaccuucugcuuugcgagcggccagaauauuacagaagaguucuaccaauccaccuguucugcugucagcaaaggguaucuguccgcccucagaacaggaugguacaccucuguuaucacaauugaacugagcaacaucaaggagaauaaaugcaacggcaccgacgccaaggugaaacuuaucaagcaggaacuggauaaguauaaaaaugcugugacggagcuccagcugcugaugcaguccacccccgccacagggucuggaagcgcuauugccuccggcgucgcgguguguaagguucuccaccuggagggggaagugaacaaaaucaagagcgcccuucugucuaccaauaaagcugucgugucccucagcggaugcggcguuucugugcugacauuuaagguccuugaccugaagaacuacauugauaaacaacuccugccuauccugaauaagcaguccuguagcauuucuaacaucgagaccgugauugaguuccagcagaaaaauaaccggcuccuggaaaucacgcgcgaguuuuccgugaaugccggcgucacaaccccgguuagcacauauaugcuuaccaacuccgaacugcucucucugaucaaugacaugcccauuaccaacgaucaaaagaaacuuaugagcaacaaugugcagaucgugagacagcaguccuacagcauuaugugcaucauuaaggaggaaguccuggcuuaugugguucaacucccucuguacggggugaucgacacacccuguuggaaacugcauacgucuccucucugcaccacaaacaccaaggagggauccaauaucugucugacacggaccgaucgcggcugguacugcgacaacgccgggagcgucucuuucuuuccccaggcggaaacguguaaggugcagagcaauagaguuuucugcgauacaaugaacuccagaacccugccuucugaggugaaucucugcaacgucgacauuuuuaauccgaaauaugauuguaagaucaugaccagcaaaacagacguguccagcucugucauuaccucccugggagccaucgugagcugcuacggcaagacaaaauguacggcuucuaacaagugccgggggauuaucaagaccuucuccaauggaugugauuauguuagcaacaaaggcguggacacagucuccgugggcaauacccuuuacuauguuaacaagcaagaggggaaaucucuguacgugaagggagaacccaucauuaauuuuuaugacccucucgucuuccccagcgaugaguuugacgccuccaucucucaggugaacgagaaaauuaaccagagccuggcuuucauccgcaaguccgaugaacugcuccacaaugugaacgccggcaagagcacaaccaauauuaugaucacgaccauuaucaucguuauuaucgucauucugcuuucucugaucgccguggggcuccugcuguacugcaaagcuagauccacaccugugacccuuagcaaggaccagcucucuggaauuaacaauaucgcguucuccaacugaggacuaguguccaccugucccuccugggcugcuggauugucucguuuuccugccaaauaaacaggaucagcgcuuuacagaucuaaaaaaaaaaaaaaaaaaaaaaaaaaaaaaaaaaaaaaaaaaaaaaaaaaaaaaaaaaaaaaaaugcaucccccccccccccccccccccccccccccccaaaggcucuuuucagagccaccagaauu

SEQ ID NO: 5389 - RNA, 1880 nt, Artificial Sequence
  mRNA product Design b-2 comprising derived and/or modified sequence from HRSV(A2)__F_DSCav1_mut5 (opt6)
gggagagccucugcuggaguccggggaguggcguuggcugcuagagcgaagcuuaccauggaacuauuaauacuuaaagccaacgcaauaacaacaauucucacugcugucaccuucugcuucgccucaggccaaaacauaacggaagaauuuuaccaaucaacaugcucugcaguauccaaaggcuaccuaucugcucuaagaacagguugguauacaucaguaauaaccauagaacuaucaaacauaaaagaaaauaaaugcaacggaacagacgcaaaaguuaaacucauaaaacaagaacuagacaaauauaaaaacgcaguuaccgaacuacaacuacuuaugcaauccacucccgccacuggaucaggaucagcaauagcaucaggagucgcaguauguaaagucuuacaccucgaaggcgaagucaauaaaaucaaauccgcauuacuauccacaaacaaagcagucguaucccuaagcggaugcggaguaucaguacuaacauuuaaaguacuagaccuaaaaaauuacaucgauaaacaacuauuaccuauauuaaacaaacaauccugcuccauuucaaauaucgaaaccguaauagaauuucaacaaaaaaacaacagauuacuagaaauaacaagagaauuuuccguaaaugcuggcguaacaacaccaguauccacauacaugcucacaaacuccgaacuacuaucacuaauaaaugacaugcccauaacaaacgaucaaaaaaaacuaaugucaaauaauguacaaauaguaagacaacaaagcuacuccaucauguguauaauaaaagaagaaguacuagcauacguaguucaacuaccacuuuacggcguaaucgacaccccuugcuggaaacuacacaccuccccucuaugcaccacaaacacaaaagaagguuccaacauaugccuuaccagaacagacagaggcugguauugcgacaacgcaggaucaguuucauuuuuuccacaagcugaaacaugcaaaguacaaucaaacagagucuucugcgacacaaugaacucaagaacucuacccucagaaguaaaccuauguaacguagacauuuucaaccccaaauacgacugcaaaauuaugacaucaaaaacagacguuucaucaucaguuaucaccucauuaggagcaauaguaagcugcuacggaaaaacaaaaugcaccgccucaaauaaaugcagaggaauaauaaaaacuuucuccaacggaugcgacuacguuucaaacaaagguguagacacuguaucaguaggaaacacacuauauuacguaaauaaacaagaaggaaaaucacuuuaugucaaaggagaaccaauaaucaauuucuacgacccauuaguauucccaucagacgaauuugaugcuucaauaucacaaguaaacgaaaaaauaaaucaaucacucgcauuuauacgaaaaucagacgaacuacuacacaauguaaacgcaggcaaaucaacaacaaacauaaugauaacaacaauaaucauuguaauaauaguaauacuucuaucucuaauagcaguaggauuacuccucuacugcaaagcaagaucaaccccuguaacacuaucaaaagaccaacuuucagguauaaauaauauagcuuuuuccaauuaaggacuaguguccaccugucccuccugggcugcuggauugucucguuuuccugccaaauaaacaggaucagcgcuuuacagaucuaaaaaaaaaaaaaaaaaaaaaaaaaaaaaaaaaaaaaaaaaaaaaaaaaaaaaaaaaaaaaaaaugcaucccccccccccccccccccccccccccccccaaaggcucuuuucagagccaccagaauu

SEQ ID NO: 5390 - RNA, 1880 nt, Artificial Sequence
  mRNA product Design b-2 comprising derived and/or modified sequence from HRSV(A2)__F_DSCav1_mut5 (opt11)
gggagagccucugcuggaguccggggaguggcguuggcugcuagagcgaagcuuaccauggagcuccuaauccucaaagccaacgcgaucacuacaauccucacagccgucaccuucugcuucgccuccggccaaaacaucaccgaggaguucuaccaaucaaccugcuccgccguaucaaaaggauaccuaagcgcccuacggaccggcugguacacaucugucaucaccaucgaacuaucaaacaucaaagaaaacaaaugcaacggaaccgacgcaaaagucaaacugauuaaacaagaacuagacaaauacaaaaacgcagucaccgaacugcaauuacucaugcaaagcacaccggccaccggcucaggcagcgccaucgccuccggcgucgccgucugcaaaguucuccaccucgagggcgaagucaacaaaauaaaaucugcccuccucuccaccaacaaagccgucgucucccucagcggcugcggagucuccguccucaccuucaaaguucucgaucucaagaacuauauugacaaacaacuucuacccauacucaacaaacaaagcugcagcauauccaacaucgaaaccgucaucgaguuccaacaaaagaacaaccgccuccucgaaauaacccgcgaguucagcguuaacgccggagucacuaccccugucuccaccuacaugcucaccaacuccgaacuccuaucacuaaucaacgacaugcccauaaccaacgaccagaagaaacucauguccaacaacguccaaauuguccgacaacaaagcuacuccauaaugugcauaauaaaagaggaaguccucgccuacgucguacaacugccccuuuauggcguaaucgacacacccugcuggaaacuccacacgucaccccucugcaccaccaacacaaaagaaggcucgaacaucugccuaacacggacugaccgcggcugguacugcgacaacgccggcuccgucagcuucuucccacaagccgaaaccugcaaaguacaauccaaccgaguauucugcgacaccaugaacuccagaacccuccccucagaggucaaccugugcaacguagacaucuucaaccccaaauacgacugcaaaauaaugaccucaaaaacagacgucuccucuuccguaaucaccagccucggagccaucgucagcugcuacggcaaaaccaaaugcaccgccucaaacaaaugccgcggcaucaucaaaacauucucaaacggcugcgacuacgucuccaacaaaggcgucgacacaguaagcguaggcaacacacuguacuacgucaacaaacaagagggaaaaucacucuacgucaaaggagaacccauaaucaacuucuacgacccccucguuuuccccagcgacgaguucgacgccagcauaucccaagucaacgagaaaauuaaccaaucccuagcauucauccgaaaaucugacgaacugcuccacaacgucaacgcgggaaaaucaacaaccaacauaaugauaaccacaaucauaauagucaucaucguaauccuccucagccuaaucgcugucggccuccuccucuacugcaaagcccguuccaccccagucacacuuuccaaggaccaacuaagcggaauaaacaacaucgcguucucaaacuaaggacuaguguccaccugucccuccugggcugcuggauugucucguuuuccugccaaauaaacaggaucagcgcuuuacagaucuaaaaaaaaaaaaaaaaaaaaaaaaaaaaaaaaaaaaaaaaaaaaaaaaaaaaaaaaaaaaaaaaugcaucccccccccccccccccccccccccccccccaaaggcucuuuucagagccaccagaauu

SEQ ID NO: 5391 - RNA, 1900 nt, Artificial Sequence
  mRNA product Design b-3 comprising derived and/or modified sequence from HRSV(A2)__F_DSCav1_mut5 (opt1)
gggagagucccgcagucggcguccagcggcucugcuuguucgugugugugucguugcaggccuuauucaagcuuaccauggagcugcucauccugaaggccaacgccaucaccaccauccugacggcggugaccuucugcuucgccagcggccagaacaucaccgaggaguucuaccaguccacgugcagcgccgucuccaagggguaccucagcgcccugcggaccggcugguacaccuccgugaucaccaucgagcugagcaacaucaaggagaacaagugcaacgggaccgacgccaaggugaagcucaucaagcaggagcuggacaaguacaagaacgcggucacggagcugcagcuccugaugcaguccaccccggcaaccggcuccggcuccgccaucgcgagcggcgucgccgugugcaaggugcugcaccucgagggggaggucaacaagaucaagagcgcccugcuguccaccaacaaggccguggugagccucuccggcugcggcgucagcgugcugaccuucaaggugcuggaccucaagaacuacaucgacaagcagcugcugcccauccugaacaagcagagcugcuccaucagcaacaucgagacggugaucgaguuccagcagaagaacaaccggcuccuggagaucacccgcgaguucagcgugaacgccggggucaccacccccguguccacguacaugcugaccaacagcgagcuccugucccugaucaacgacaugccgaucaccaacgaccagaagaagcucaugagcaacaacgugcagaucguccggcagcaguccuacagcaucaugugcaucaucaaggaggaggugcuggcguacgugguccagcugccccucuacggcgugaucgacacccccugcuggaagcugcacacgagcccccugugcaccaccaacaccaaggagggguccaacaucugccucacgcgcaccgaccggggcugguacugcgacaacgccggcagcgucuccuucuucccgcaggccgagaccugcaaggugcagagcaaccgcguguucugcgacaccaugaacucccggacgcugcccagcgagguaaaccucugcaacgucgacaucuucaaccccaaguacgacugcaagaucaugaccuccaagaccgacgugagcuccagcgugaucaccucccugggggccaucgucagcugcuacggcaagacgaagugcaccgccagcaacaagugccgggggaucaucaagaccuucuccaacggcugcgacuacgugagcaacaagggcguggacaccguguccgucgggaacacccuguacuacgugaacaagcaggagggcaagagccucuacgugaagggggagcccaucaucaacuucuacgacccgcuggucuuccccuccgacgaguucgacgcgagcaucucccaggugaacgagaagaucaaccagagccuggccuucauccgcaaguccgacgagcugcuccacaacgugaacgccggcaagagcacgaccaacaucaugaucaccaccaucaucaucgucaucaucgugauccugcugucccucaucgccguggggcugcugcucuacugcaaggcccggagcacgcccgucacccuguccaaggaccagcugagcggcaucaacaacaucgcguucuccaacugaggacuaguguccaccugucccuccugggcugcuggauugucucguuuuccugccaaauaaacaggaucagcgcuuuacagaucuaaaaaaaaaaaaaaaaaaaaaaaaaaaaaaaaaaaaaaaaaaaaaaaaaaaaaaaaaaaaaaaaugcaucccccccccccccccccccccccccccccccaaaggcucuuuucagagccaccagaauu

SEQ ID NO: 5392 - RNA, 1900 nt, Artificial Sequence
  mRNA product Design b-3 comprising derived and/or modified sequence from HRSV(A2)__F_DSCav1_mut5 (opt1)
gggagagucccgcagucggcguccagcggcucugcuuguucgugugugugucguugcaggccuuauucaagcuuaccauggagcugcucauccugaaggccaacgccaucaccaccauccugacggcggugaccuucugcuucgccagcggccagaacaucaccgaggaguucuaccaguccacgugcagcgccgucuccaagggguaccucagcgcccugcgcaccggcugguacaccuccgugaucaccaucgagcugagcaacaucaaggagaacaagugcaacgggaccgacgccaaggugaagcucaucaagcaggagcuggacaaguacaagaacgcggucacggagcugcagcuccugaugcaguccacccccgccaccggcagcggguccgccaucgccagcggcguggcggugugcaagguccugcaccucgagggcgaggugaacaagaucaaguccgcccugcugagcaccaacaaggccguggucucccucagcgggugcggcguguccgugcugacguucaagguccuggaccucaagaacuacaucgacaagcagcugcugccgauccucaacaagcagagcugcuccaucagcaacaucgagaccgugaucgaguuccagcagaagaacaaccggcugcuggagaucacccgcgaguucuccgugaacgccggggucaccacgcccgugagcaccuacaugcucaccaacagcgagcugcugucccucaucaacgacaugcccaucaccaacgaccagaagaagcugaugagcaacaacgugcagaucguccggcagcaguccuacagcaucaugugcaucaucaaggaggaggugcuggccuacgugguccagcucccccuguacggcgugaucgacacgccgugcuggaagcugcacaccagcccccucugcaccaccaacacgaaggagggguccaacaucugccugacccgcaccgaccggggcugguacugcgacaacgcgggcuccgugagcuucuucccccaggccgagaccugcaagguccaguccaaccgcguguucugcgacacgaugaacagccggacccuccccuccgaggucaaccugugcaacguggacaucuucaacccgaaguacgacugcaagaucaugaccagcaagaccgacguguccagcuccgucaucacgagccugggggccaucguguccugcuacggcaagaccaagugcaccgccagcaacaagugccgggggaucaucaagaccuucuccaacggcugcgacuacgugagcaacaagggcgucgacacggugagcguggggaacacccucuacuacgucaacaagcaggagggcaagucccuguacgugaagggggagcccaucaucaacuucuacgacccccugguguuccccagcgacgaguucgacgccuccaucagccaggucaacgagaagaucaaccagucccucgcguucauccgcaagagcgacgagcugcugcacaacgugaacgccggcaaguccaccaccaacaucaugaucaccacgaucaucaucgugaucaucgucauccuccugagccugaucgccguggggcuccugcuguacugcaaggcccgguccaccccggugacccugagcaaggaccagcucuccggcaucaacaacaucgccuucagcaacugaggacuaguguccaccugucccuccugggcugcuggauugucucguuuuccugccaaauaaacaggaucagcgcuuuacagaucuaaaaaaaaaaaaaaaaaaaaaaaaaaaaaaaaaaaaaaaaaaaaaaaaaaaaaaaaaaaaaaaaugcaucccccccccccccccccccccccccccccccaaaggcucuuuucagagccaccagaauu

SEQ ID NO: 5393 - RNA, 1900 nt, Artificial Sequence
  mRNA product Design b-3 comprising derived and/or modified sequence from HRSV(A2)__F_DSCav1_mut5 (opt2)
gggagagucccgcagucggcguccagcggcucugcuuguucgugugugugucguugcaggccuuauucaagcuuaccauggagcuccucauccucaaggccaacgccaucaccaccauccucaccgccgucaccuucugcuucgccuccggccagaacaucaccgaggaguucuaccaguccaccugcuccgccgucuccaagggcuaccucuccgcccuccgcaccggcugguacaccuccgucaucaccaucgagcucuccaacaucaaggagaacaagugcaacggcaccgacgccaaggucaagcucaucaagcaggagcucgacaaguacaagaacgccgucaccgagcuccagcuccucaugcaguccacccccgccaccggcuccggcuccgccaucgccuccggcgucgccgucugcaagguccuccaccucgagggcgaggucaacaagaucaaguccgcccuccucuccaccaacaaggccgucgucucccucuccggcugcggcgucuccguccucaccuucaagguccucgaccucaagaacuacaucgacaagcagcuccuccccauccucaacaagcaguccugcuccaucuccaacaucgagaccgucaucgaguuccagcagaagaacaaccgccuccucgagaucacccgcgaguucuccgucaacgccggcgucaccacccccgucuccaccuacaugcucaccaacuccgagcuccucucccucaucaacgacaugcccaucaccaacgaccagaagaagcucauguccaacaacguccagaucguccgccagcaguccuacuccaucaugugcaucaucaaggaggagguccucgccuacgucguccagcucccccucuacggcgucaucgacacccccugcuggaagcuccacaccuccccccucugcaccaccaacaccaaggagggcuccaacaucugccucacccgcaccgaccgcggcugguacugcgacaacgccggcuccgucuccuucuucccccaggccgagaccugcaagguccaguccaaccgcgucuucugcgacaccaugaacucccgcacccuccccuccgaggucaaccucugcaacgucgacaucuucaaccccaaguacgacugcaagaucaugaccuccaagaccgacgucuccuccuccgucaucaccucccucggcgccaucgucuccugcuacggcaagaccaagugcaccgccuccaacaagugccgcggcaucaucaagaccuucuccaacggcugcgacuacgucuccaacaagggcgucgacaccgucuccgucggcaacacccucuacuacgucaacaagcaggagggcaagucccucuacgucaagggcgagcccaucaucaacuucuacgacccccucgucuuccccuccgacgaguucgacgccuccaucucccaggucaacgagaagaucaaccagucccucgccuucauccgcaaguccgacgagcuccuccacaacgucaacgccggcaaguccaccaccaacaucaugaucaccaccaucaucaucgucaucaucgucauccuccucucccucaucgccgucggccuccuccucuacugcaaggcccgcuccacccccgucacccucuccaaggaccagcucuccggcaucaacaacaucgccuucuccaacugaggacuaguguccaccugucccuccugggcugcuggauugucucguuuuccugccaaauaaacaggaucagcgcuuuacagaucuaaaaaaaaaaaaaaaaaaaaaaaaaaaaaaaaaaaaaaaaaaaaaaaaaaaaaaaaaaaaaaaaugcaucccccccccccccccccccccccccccccccaaaggcucuuuucagagccaccagaauu

SEQ ID NO: 5394 - RNA, 1900 nt, Artificial Sequence
  mRNA product Design b-3 comprising derived and/or modified sequence from HRSV(A2)__F_DSCav1_mut5 (opt3)
gggagagucccgcagucggcguccagcggcucugcuuguucgugugugugucguugcaggccuuauucaagcuuaccauggagcugcucauccuuaaggccaacgcuauuaccacaauacugacugcagugacguucugcuuugccagcggccagaauaucaccgaagaguucuaccaauccacauguucugcggucucaaaaggguauuugagugcuuuaagaacuggaugguacaccagcguuauuacaaucgaacuguccaacauuaaggagaauaaaugcaacgguaccgacgccaaggugaaacuaaucaagcaggaacucgauaaguauaaaaaugcaguaacugagcugcagcuucugaugcagucuacacccgccaccggcucggggucagcuauagcaagcggaguggccgucuguaagguguugcaccucgagggcgaaguuaacaaaaucaagagugcucugcuguccacgaauaaagccguggucucucucagcgguugcgggguguccguauuaacuuuuaagguucuggaccuuaagaacuacauugauaaacaauugcugccuauccuaaauaagcagucauguaguauuagcaacaucgagaccgugauagaguuccagcagaaaaauaacaggcuccuggaaauuacacgggaguuuucugucaaugcgggagugacuaccccaguguccacauauaugcuuaccaacucagaacuguugagccucaucaaugacaugccgauuacgaacgaucaaaagaaacugaugaguaacaauguccagaucguucgccagcagucuuacuccaucaugugcauuauaaaggaggaaguguuagcauauguagugcaacugccccucuacggcgucaucgacacuccuuguuggaaacuucauacaagcccacugugcaccacuaacacaaaggagggcucgaauauuuguuugacccgaacggaucgugggugguacugcgacaacgccggaucuguguccuucuuuccccaggcugaaaccuguaagguucagucaaauagaguguucugcgauacaaugaacaguagaacucugccuagcgaggucaaucucugcaacguggacaucuuuaauccaaaauaugauuguaagauaaugaccuccaaaacagacguaucuagcucaguuauuaccagucugggugccaucguguccugcuacggcaagacuaaauguacagcaagcaacaagugcagggggaucauuaagaccuucucuaauggaugugauuaugucucaaacaaaggcguggacacugucaguguggguaauacgcuuuacuauguuaacaagcaagaggggaaaagccuguacgugaagggagaacccaucauuaauuuuuaugacccuuugguauucccauccgaugaguuugacgcuucuauaucgcaggucaacgagaaaaucaaccagagccucgccuucauucggaaguccgaugaacuguuacacaaugugaacgcgggcaagucaacaaccaauaucaugaucacuaccauuauaaucguuauuaucgugauucugcuaagucucaucgccgucggccugcuuuuguacugcaaagcacgcucuacaccggugacccugagcaaggaccagcucuccgggauaaacaauaucgcuuucucaaacugaggacuaguguccaccugucccuccugggcugcuggauugucucguuuuccugccaaauaaacaggaucagcgcuuuacagaucuaaaaaaaaaaaaaaaaaaaaaaaaaaaaaaaaaaaaaaaaaaaaaaaaaaaaaaaaaaaaaaaaugcaucccccccccccccccccccccccccccccccaaaggcucuuuucagagccaccagaauu

SEQ ID NO: 5395 - RNA, 1900 nt, Artificial Sequence
  mRNA product Design b-3 comprising derived and/or modified sequence from HRSV(A2)__F_DSCav1_mut5 (opt4)
gggagagucccgcagucggcguccagcggcucugcuuguucgugugugugucguugcaggccuuauucaagcuuaccauggagcugcugauccugaaggccaacgccaucaccaccauccugaccgccgugaccuucugcuucgccagcggccagaacaucaccgaggaguucuaccagagcaccugcagcgccgugagcaagggcuaccugagcgcccugagaaccggcugguacaccagcgugaucaccaucgagcugagcaacaucaaggagaacaagugcaacggcaccgacgccaaggugaagcugaucaagcaggagcuggacaaguacaagaacgccgugaccgagcugcagcugcugaugcagagcacccccgccaccggcagcggcagcgccaucgccagcggcguggccgugugcaaggugcugcaccuggagggcgaggugaacaagaucaagagcgcccugcugagcaccaacaaggccguggugagccugagcggcugcggcgugagcgugcugaccuucaaggugcuggaccugaagaacuacaucgacaagcagcugcugcccauccugaacaagcagagcugcagcaucagcaacaucgagaccgugaucgaguuccagcagaagaacaacagacugcuggagaucaccagagaguucagcgugaacgccggcgugaccacccccgugagcaccuacaugcugaccaacagcgagcugcugagccugaucaacgacaugcccaucaccaacgaccagaagaagcugaugagcaacaacgugcagaucgugagacagcagagcuacagcaucaugugcaucaucaaggaggaggugcuggccuacguggugcagcugccccuguacggcgugaucgacacccccugcuggaagcugcacaccagcccccugugcaccaccaacaccaaggagggcagcaacaucugccugaccagaaccgacagaggcugguacugcgacaacgccggcagcgugagcuucuucccccaggccgagaccugcaaggugcagagcaacagaguguucugcgacaccaugaacagcagaacccugcccagcgaggugaaccugugcaacguggacaucuucaaccccaaguacgacugcaagaucaugaccagcaagaccgacgugagcagcagcgugaucaccagccugggcgccaucgugagcugcuacggcaagaccaagugcaccgccagcaacaagugcagaggcaucaucaagaccuucagcaacggcugcgacuacgugagcaacaagggcguggacaccgugagcgugggcaacacccuguacuacgugaacaagcaggagggcaagagccuguacgugaagggcgagcccaucaucaacuucuacgacccccugguguuccccagcgacgaguucgacgccagcaucagccaggugaacgagaagaucaaccagagccuggccuucaucagaaagagcgacgagcugcugcacaacgugaacgccggcaagagcaccaccaacaucaugaucaccaccaucaucaucgugaucaucgugauccugcugagccugaucgccgugggccugcugcuguacugcaaggccagaagcacccccgugacccugagcaaggaccagcugagcggcaucaacaacaucgccuucagcaacugaggacuaguguccaccugucccuccugggcugcuggauugucucguuuuccugccaaauaaacaggaucagcgcuuuacagaucuaaaaaaaaaaaaaaaaaaaaaaaaaaaaaaaaaaaaaaaaaaaaaaaaaaaaaaaaaaaaaaaaugcaucccccccccccccccccccccccccccccccaaaggcucuuuucagagccaccagaauu

SEQ ID NO: 5396 - RNA, 1900 nt, Artificial Sequence
  mRNA product Design b-3 comprising derived and/or modified sequence from HRSV(A2)__F_DSCav1_mut5 (opt5)
gggagagucccgcagucggcguccagcggcucugcuuguucgugugugugucguugcaggccuuauucaagcuuaccauggagcugcucauccugaaggccaacgcuauuaccacaauccuuacggccgugaccuucugcuuugcgagcggccagaauauuacagaagaguucuaccaauccaccuguucugcugucagcaaaggguaucuguccgcccucagaacaggaugguacaccucuguuaucacaauugaacugagcaacaucaaggagaauaaaugcaacggcaccgacgccaaggugaaacuuaucaagcaggaacuggauaaguauaaaaaugcugugacggagcuccagcugcugaugcaguccacccccgccacagggucuggaagcgcuauugccuccggcgucgcgguguguaagguucuccaccuggagggggaagugaacaaaaucaagagcgcccuucugucuaccaauaaagcugucgugucccucagcggaugcggcguuucugugcugacauuuaagguccuugaccugaagaacuacauugauaaacaacuccugccuauccugaauaagcaguccuguagcauuucuaacaucgagaccgugauugaguuccagcagaaaaauaaccggcuccuggaaaucacgcgcgaguuuuccgugaaugccggcgucacaaccccgguuagcacauauaugcuuaccaacuccgaacugcucucucugaucaaugacaugcccauuaccaacgaucaaaagaaacuuaugagcaacaaugugcagaucgugagacagcaguccuacagcauuaugugcaucauuaaggaggaaguccuggcuuaugugguucaacucccucuguacggggugaucgacacacccuguuggaaacugcauacgucuccucucugcaccacaaacaccaaggagggauccaauaucugucugacacggaccgaucgcggcugguacugcgacaacgccgggagcgucucuuucuuuccccaggcggaaacguguaaggugcagagcaauagaguuuucugcgauacaaugaacuccagaacccugccuucugaggugaaucucugcaacgucgacauuuuuaauccgaaauaugauuguaagaucaugaccagcaaaacagacguguccagcucugucauuaccucccugggagccaucgugagcugcuacggcaagacaaaauguacggcuucuaacaagugccgggggauuaucaagaccuucuccaauggaugugauuauguuagcaacaaaggcguggacacagucuccgugggcaauacccuuuacuauguuaacaagcaagaggggaaaucucuguacgugaagggagaacccaucauuaauuuuuaugacccucucgucuuccccagcgaugaguuugacgccuccaucucucaggugaacgagaaaauuaaccagagccuggcuuucauccgcaaguccgaugaacugcuccacaaugugaacgccggcaagagcacaaccaauauuaugaucacgaccauuaucaucguuauuaucgucauucugcuuucucugaucgccguggggcuccugcuguacugcaaagcuagauccacaccugugacccuuagcaaggaccagcucucuggaauuaacaauaucgcguucuccaacugaggacuaguguccaccugucccuccugggcugcuggauugucucguuuuccugccaaauaaacaggaucagcgcuuuacagaucuaaaaaaaaaaaaaaaaaaaaaaaaaaaaaaaaaaaaaaaaaaaaaaaaaaaaaaaaaaaaaaaaugcaucccccccccccccccccccccccccccccccaaaggcucuuuucagagccaccagaauu

SEQ ID NO: 5397 - RNA, 1900 nt, Artificial Sequence
  mRNA product Design b-3 comprising derived and/or modified sequence from HRSV(A2)__F_DSCav1_mut5 (opt6)
gggagagucccgcagucggcguccagcggcucugcuuguucgugugugugucguugcaggccuuauucaagcuuaccauggaacuauuaauacuuaaagccaacgcaauaacaacaauucucacugcugucaccuucugcuucgccucaggccaaaacauaacggaagaauuuuaccaaucaacaugcucugcaguauccaaaggcuaccuaucugcucuaagaacagguugguauacaucaguaauaaccauagaacuaucaaacauaaaagaaaauaaaugcaacggaacagacgcaaaaguuaaacucauaaaacaagaacuagacaaauauaaaaacgcaguuaccgaacuacaacuacuuaugcaauccacucccgccacuggaucaggaucagcaauagcaucaggagucgcaguauguaaagucuuacaccucgaaggcgaagucaauaaaaucaaauccgcauuacuauccacaaacaaagcagucguaucccuaagcggaugcggaguaucaguacuaacauuuaaaguacuagaccuaaaaaauuacaucgauaaacaacuauuaccuauauuaaacaaacaauccugcuccauuucaaauaucgaaaccguaauagaauuucaacaaaaaaacaacagauuacuagaaauaacaagagaauuuuccguaaaugcuggcguaacaacaccaguauccacauacaugcucacaaacuccgaacuacuaucacuaauaaaugacaugcccauaacaaacgaucaaaaaaaacuaaugucaaauaauguacaaauaguaagacaacaaagcuacuccaucauguguauaauaaaagaagaaguacuagcauacguaguucaacuaccacuuuacggcguaaucgacaccccuugcuggaaacuacacaccuccccucuaugcaccacaaacacaaaagaagguuccaacauaugccuuaccagaacagacagaggcugguauugcgacaacgcaggaucaguuucauuuuuuccacaagcugaaacaugcaaaguacaaucaaacagagucuucugcgacacaaugaacucaagaacucuacccucagaaguaaaccuauguaacguagacauuuucaaccccaaauacgacugcaaaauuaugacaucaaaaacagacguuucaucaucaguuaucaccucauuaggagcaauaguaagcugcuacggaaaaacaaaaugcaccgccucaaauaaaugcagaggaauaauaaaaacuuucuccaacggaugcgacuacguuucaaacaaagguguagacacuguaucaguaggaaacacacuauauuacguaaauaaacaagaaggaaaaucacuuuaugucaaaggagaaccaauaaucaauuucuacgacccauuaguauucccaucagacgaauuugaugcuucaauaucacaaguaaacgaaaaaauaaaucaaucacucgcauuuauacgaaaaucagacgaacuacuacacaauguaaacgcaggcaaaucaacaacaaacauaaugauaacaacaauaaucauuguaauaauaguaauacuucuaucucuaauagcaguaggauuacuccucuacugcaaagcaagaucaaccccuguaacacuaucaaaagaccaacuuucagguauaaauaauauagcuuuuuccaauuaaggacuaguguccaccugucccuccugggcugcuggauugucucguuuuccugccaaauaaacaggaucagcgcuuuacagaucuaaaaaaaaaaaaaaaaaaaaaaaaaaaaaaaaaaaaaaaaaaaaaaaaaaaaaaaaaaaaaaaaugcaucccccccccccccccccccccccccccccccaaaggcucuuuucagagccaccagaauu

SEQ ID NO: 5398 - RNA, 1900 nt, Artificial Sequence
  mRNA product Design b-3 comprising derived and/or modified sequence from HRSV(A2)__F_DSCav1_mut5 (opt11)
gggagagucccgcagucggcguccagcggcucugcuuguucgugugugugucguugcaggccuuauucaagcuuaccauggagcuccuaauccucaaagccaacgcgaucacuacaauccucacagccgucaccuucugcuucgccuccggccaaaacaucaccgaggaguucuaccaaucaaccugcuccgccguaucaaaaggauaccuaagcgcccuacggaccggcugguacacaucugucaucaccaucgaacuaucaaacaucaaagaaaacaaaugcaacggaaccgacgcaaaagucaaacugauuaaacaagaacuagacaaauacaaaaacgcagucaccgaacugcaauuacucaugcaaagcacaccggccaccggcucaggcagcgccaucgccuccggcgucgccgucugcaaaguucuccaccucgagggcgaagucaacaaaauaaaaucugcccuccucuccaccaacaaagccgucgucucccucagcggcugcggagucuccguccucaccuucaaaguucucgaucucaagaacuauauugacaaacaacuucuacccauacucaacaaacaaagcugcagcauauccaacaucgaaaccgucaucgaguuccaacaaaagaacaaccgccuccucgaaauaacccgcgaguucagcguuaacgccggagucacuaccccugucuccaccuacaugcucaccaacuccgaacuccuaucacuaaucaacgacaugcccauaaccaacgaccagaagaaacucauguccaacaacguccaaauuguccgacaacaaagcuacuccauaaugugcauaauaaaagaggaaguccucgccuacgucguacaacugccccuuuauggcguaaucgacacacccugcuggaaacuccacacgucaccccucugcaccaccaacacaaaagaaggcucgaacaucugccuaacacggacugaccgcggcugguacugcgacaacgccggcuccgucagcuucuucccacaagccgaaaccugcaaaguacaauccaaccgaguauucugcgacaccaugaacuccagaacccuccccucagaggucaaccugugcaacguagacaucuucaaccccaaauacgacugcaaaauaaugaccucaaaaacagacgucuccucuuccguaaucaccagccucggagccaucgucagcugcuacggcaaaaccaaaugcaccgccucaaacaaaugccgcggcaucaucaaaacauucucaaacggcugcgacuacgucuccaacaaaggcgucgacacaguaagcguaggcaacacacuguacuacgucaacaaacaagagggaaaaucacucuacgucaaaggagaacccauaaucaacuucuacgacccccucguuuuccccagcgacgaguucgacgccagcauaucccaagucaacgagaaaauuaaccaaucccuagcauucauccgaaaaucugacgaacugcuccacaacgucaacgcgggaaaaucaacaaccaacauaaugauaaccacaaucauaauagucaucaucguaauccuccucagccuaaucgcugucggccuccuccucuacugcaaagcccguuccaccccagucacacuuuccaaggaccaacuaagcggaauaaacaacaucgcguucucaaacuaaggacuaguguccaccugucccuccugggcugcuggauugucucguuuuccugccaaauaaacaggaucagcgcuuuacagaucuaaaaaaaaaaaaaaaaaaaaaaaaaaaaaaaaaaaaaaaaaaaaaaaaaaaaaaaaaaaaaaaaugcaucccccccccccccccccccccccccccccccaaaggcucuuuucagagccaccagaauu

SEQ ID NO: 5399 - RNA, 1951 nt, Artificial Sequence
  mRNA product Design b-4 comprising derived and/or modified sequence from HRSV(A2)__F_DSCav1_mut5 (opt1)
gggagagucccgcagucggcguccagcggcucugcuuguucgugugugugucguugcaggccuuauucaagcuuaccauggagcugcucauccugaaggccaacgccaucaccaccauccugacggcggugaccuucugcuucgccagcggccagaacaucaccgaggaguucuaccaguccacgugcagcgccgucuccaagggguaccucagcgcccugcggaccggcugguacaccuccgugaucaccaucgagcugagcaacaucaaggagaacaagugcaacgggaccgacgccaaggugaagcucaucaagcaggagcuggacaaguacaagaacgcggucacggagcugcagcuccugaugcaguccaccccggcaaccggcuccggcuccgccaucgcgagcggcgucgccgugugcaaggugcugcaccucgagggggaggucaacaagaucaagagcgcccugcuguccaccaacaaggccguggugagccucuccggcugcggcgucagcgugcugaccuucaaggugcuggaccucaagaacuacaucgacaagcagcugcugcccauccugaacaagcagagcugcuccaucagcaacaucgagacggugaucgaguuccagcagaagaacaaccggcuccuggagaucacccgcgaguucagcgugaacgccggggucaccacccccguguccacguacaugcugaccaacagcgagcuccugucccugaucaacgacaugccgaucaccaacgaccagaagaagcucaugagcaacaacgugcagaucguccggcagcaguccuacagcaucaugugcaucaucaaggaggaggugcuggcguacgugguccagcugccccucuacggcgugaucgacacccccugcuggaagcugcacacgagcccccugugcaccaccaacaccaaggagggguccaacaucugccucacgcgcaccgaccggggcugguacugcgacaacgccggcagcgucuccuucuucccgcaggccgagaccugcaaggugcagagcaaccgcguguucugcgacaccaugaacucccggacgcugcccagcgagguaaaccucugcaacgucgacaucuucaaccccaaguacgacugcaagaucaugaccuccaagaccgacgugagcuccagcgugaucaccucccugggggccaucgucagcugcuacggcaagacgaagugcaccgccagcaacaagugccgggggaucaucaagaccuucuccaacggcugcgacuacgugagcaacaagggcguggacaccguguccgucgggaacacccuguacuacgugaacaagcaggagggcaagagccucuacgugaagggggagcccaucaucaacuucuacgacccgcuggucuuccccuccgacgaguucgacgcgagcaucucccaggugaacgagaagaucaaccagagccuggccuucauccgcaaguccgacgagcugcuccacaacgugaacgccggcaagagcacgaccaacaucaugaucaccaccaucaucaucgucaucaucgugauccugcugucccucaucgccguggggcugcugcucuacugcaaggcccggagcacgcccgucacccuguccaaggaccagcugagcggcaucaacaacaucgcguucuccaacugaggacuaguaauaaggaaacuguaugaaugucugugggcaggaagugaagagauccuucuguaaagguuuuuggaauuaugucugcugaauaauaaacuuuuuugaaauaauaaaucugguagaaaaaugagaucuaaaaaaaaaaaaaaaaaaaaaaaaaaaaaaaaaaaaaaaaaaaaaaaaaaaaaaaaaaaaaaaaugcaucccccccccccccccccccccccccccccccaaaggcucuuuucagagccaccagaauu

SEQ ID NO: 5400 - RNA, 1951 nt, Artificial Sequence
  mRNA product Design b-4 comprising derived and/or modified sequence from HRSV(A2)__F_DSCav1_mut5 (opt1)
gggagagucccgcagucggcguccagcggcucugcuuguucgugugugugucguugcaggccuuauucaagcuuaccauggagcugcucauccugaaggccaacgccaucaccaccauccugacggcggugaccuucugcuucgccagcggccagaacaucaccgaggaguucuaccaguccacgugcagcgccgucuccaagggguaccucagcgcccugcgcaccggcugguacaccuccgugaucaccaucgagcugagcaacaucaaggagaacaagugcaacgggaccgacgccaaggugaagcucaucaagcaggagcuggacaaguacaagaacgcggucacggagcugcagcuccugaugcaguccacccccgccaccggcagcggguccgccaucgccagcggcguggcggugugcaagguccugcaccucgagggcgaggugaacaagaucaaguccgcccugcugagcaccaacaaggccguggucucccucagcgggugcggcguguccgugcugacguucaagguccuggaccucaagaacuacaucgacaagcagcugcugccgauccucaacaagcagagcugcuccaucagcaacaucgagaccgugaucgaguuccagcagaagaacaaccggcugcuggagaucacccgcgaguucuccgugaacgccggggucaccacgcccgugagcaccuacaugcucaccaacagcgagcugcugucccucaucaacgacaugcccaucaccaacgaccagaagaagcugaugagcaacaacgugcagaucguccggcagcaguccuacagcaucaugugcaucaucaaggaggaggugcuggccuacgugguccagcucccccuguacggcgugaucgacacgccgugcuggaagcugcacaccagcccccucugcaccaccaacacgaaggagggguccaacaucugccugacccgcaccgaccggggcugguacugcgacaacgcgggcuccgugagcuucuucccccaggccgagaccugcaagguccaguccaaccgcguguucugcgacacgaugaacagccggacccuccccuccgaggucaaccugugcaacguggacaucuucaacccgaaguacgacugcaagaucaugaccagcaagaccgacguguccagcuccgucaucacgagccugggggccaucguguccugcuacggcaagaccaagugcaccgccagcaacaagugccgggggaucaucaagaccuucuccaacggcugcgacuacgugagcaacaagggcgucgacacggugagcguggggaacacccucuacuacgucaacaagcaggagggcaagucccuguacgugaagggggagcccaucaucaacuucuacgacccccugguguuccccagcgacgaguucgacgccuccaucagccaggucaacgagaagaucaaccagucccucgcguucauccgcaagagcgacgagcugcugcacaacgugaacgccggcaaguccaccaccaacaucaugaucaccacgaucaucaucgugaucaucgucauccuccugagccugaucgccguggggcuccugcuguacugcaaggcccgguccaccccggugacccugagcaaggaccagcucuccggcaucaacaacaucgccuucagcaacugaggacuaguaauaaggaaacuguaugaaugucugugggcaggaagugaagagauccuucuguaaagguuuuuggaauuaugucugcugaauaauaaacuuuuuugaaauaauaaaucugguagaaaaaugagaucuaaaaaaaaaaaaaaaaaaaaaaaaaaaaaaaaaaaaaaaaaaaaaaaaaaaaaaaaaaaaaaaaugcaucccccccccccccccccccccccccccccccaaaggcucuuuucagagccaccagaauu
